United States Patent Application Publication US 2004/0265849 A1 - sequence listing, part 9

SEQ ID NO: 6940 - DNA, 1790242 bp, Homo sapiens
  misc_feature (1)...(1790242): n = A,T,C or G, or insertion/deletion polymorphism (see Tables 1-2)
tattgtatgggagtctaagtctctttgtaggtcactcaggacttgctttatgaatctgggtgctcctgcattgggtgcatatatatttaggatagttagctcttcttgttgaattgatccctttaccattatgtaatggccttctttgtctcttttgatctttgttggtttaaagtctgttttattagagactaagattgcaacccctgcctttttttgttttccatttgcttggtagatcttcctccatccttttattttgagcctatgtgtgtctctgctcgtgagatgggtttcctgaatacagcacactgatgggtcttgactctttatccaatttgccagtctgtgtcttttaattggagcatttagtccatttacatttaaagttaatattgttatgtgtgaatttgatcctgtcattatgatgttagctggttattttgctcattagttgatgcagtttcttcctagcctcgatggtctttacagtttggcatgaatttgcagcagctggtaccggtttttcctttccatgtttagtgcttccttcaggagctgttttagggcaggcctgttggtgacaaaatctctcagcatttgcttgtctgtaaagtattttatttctccttcacttatgaagcttagtttggctggatatgaaattctgggttgaaaattcttttctttaagagtgttgaatattggcctccactctcttctggcttgtagagtttctgccaagacatccactgttagtctgatggacttccctttgtgagtaacctgacctttgtctctggctgcccttaccattttttccttcatttcaactttggtgaatctgacaattatgtgtcttggtgttgctcttctcgaggagtatctttgtgacattctctgtatttcctgagtctgaatgttggcctgccttgctagattggggaaggtctcctggataatatcctgcagagtgttttccaacttggttccattctgcccatcactttcaggtacaccaatcagacgtagatttggtcttttcacatagtcccatatttcttggaggctttttcgtttctttttatgctttcttctctaaacttcccttctcccttcatttcattcatttcatcttccatcactgatacactttcttccagttgatcgcattggctcctgaggcttctgcgttcttcacgtagttctcgagccttggctttcagctccatcagctcctttaagcacttctctgtattggttattctagttatatattcgtctaaatttttttcaaagttttcaacttctttgcctttggtttgaatttcctcctgtagttcgcagtagtttgatcgtctgaagccttcttctctcaactcgtcaaagtcattctccgtccagctttgttccgttgctggtgaggagctgcgttcctttggaggaggagaggcgctctgctttttagagtttccagtttttctgctctgttttttccccatctttgtggttttatctacttttggtgtttgatgatggtgatgtacagatgggtttttggtgtggatgtcctttctgtttgttagttttccttctaacattcaggaccctcagctgcaggtctgttggagtttgctagaggtccactccagaccctgtttgctggatatcagcagcggagattgcaaaacagcggattttcgtgaaccgtgaatgctgctgtctgatcgttcctctgcaagttttgtctcagaggagtacctggccgtgtgaggtgtcagtctgcccctactggggggtgcctcccagttaggctgctcgggggtcaaggggtcagggacccacttgaggaggcagtctgcccattctcagatctgcagctgcgtgctgggagaaccactgctctcttcaaagctgtcagacaggtacacttaagtctgcagaggttactgctgtctttttgtttgtctgtgccctgcccccagaggtggagcctacagaggcaggcaggcctccttgagctgtggtgggctccacccatttcgagcttcctggctgctttgtttacctaagcaagcctgggcaatggcgggcgcccctcccccagcctcgctgctgccttgcagtttgatctcagactgctgtgctagcaatcagtgagactctgtgggcataggaccctccaaagcatgtgcgggatataatctcctggtgcgctgtcttttaagcccatcggaaaagcgcagtattagggtgggagtgacccgattttccaggtgccgtctgtcacccctttctttgactaggaaagggaactccccgacctgttgttctttccgagtgaggcagtggcttgcccgacttcggctcgcgaacggtgcactgcacccactgtcctgcgcccactgtctggcactccctagtgagatgaacctggtacctcagatggaaatgcagaaatcacccgtcttctgcgtcgctcatgctgggagctgtagaccggagctgttcctattcagccatcttggctccaccttctcttttcttaactgcttcttagtaatccctgagtgaaatgtctatcctcaaatactggaaattccttagcgtgtacctgggtggcttcattgtctttcattttgagccatagtcaccaattattggcaacaggagaagtcccactcaatatcctatgtcatttaaagatctcatttgaagccataggttaggatgtgttatcccctcaggtgacagaatggtttggccacctggaggttgttgatagacttaaaaatgacccttttgggagtgaaggggaaataaatcatcttagtgggttgtgaagtgagaggtaaaaacataggggtggtggacaactcatttgggaagtattatgatgaaggcacagagaactaagtagcaaccacagggagttgtagggtaaaagtatgttttgtttgtttgaaaattttcaggtagaagtcctgtggcatatttttgcactgatcattggagaaagggtgataatgcagtgtgtgaggtgatcgtgaaggagcagagtccttgaaaaggtgagggaagaagggatccagcacacaagagagattagcctttggtaagagcaagaggacttcttgcattttaataggagggagggtagagaagatgaggctcggtgttagtgggtttatagatttgatgatggaaagatgtgaaacatcttccagatggcttctgttcttcttagtgaggcaggagagttggttagctgctaataataaggatggttgggaagggagagtgagaaacattttttttttttgtattaatagtacataagaccttcaaatcaggggcagattcatttagattcacctaaaatacctgacaaggtgccagaagtatttatcacatatttttgaaaaaaatggttttaattatcacaaacagggattattcctagctttaaatctcattttagaaaggtattatggctgttcagaaaattacatatttttaaagcccgaacctgaaattgccagtattttgagatattatggacagatgaaatggactcatggttcatgcaaaagtgattttcattctataagggattttattgacaagaagaaactactccattctgactaaagaacatattgcaccctggaggatttattttccaagagaggctactgacagggatagaattatcttctttttggaggcctcccttctctcctgtaatcttctagctggcgcctaacacagggctctgcatcaaggggcttctcaatacatccaattgaatgactttgtttggggccggtcctgatgcccagaacgaaaaaacttacttttgattacctcgggagaattgctagtaatggccctgatttattctctctcttttttctctcttttttttttccccagctcttctaccctcaatgtttgattgcttgcaagaggcatgtgagccaaaattttaaagtttgcaaagtataaagaaaggaaacaagtaaatagggaaggagaataaatactgaacaagactgggcaaggtgacaagaaagaactactgtgaaaatctggaagagggccaggatgcaaaatgcaggggctgtgtagtttacaggaactatttagcctccagcatgcctcagcgatcacacagagaaaggcagatttctctgcttttgtctcctaccctatagttagctatggaaatttgacataggtgatatatgttttctgtcagcaaactgatacaaatacagaggaccatggggcctgtgatcaacaaatccaacgtgatttgaattgctaggaggggacctcttgtggctatagtgggaaatacttcagctaaatactaccttggaggctgcagatatttttatgaaggaattaaaaaaaaacccactataaaagctctttaaaattacatttcagatatttataatatttaattgttttgataacaccaaattctgtaagaaggttttatctgtattgcatctctgaagagttcagtgtaatttaaagctcttcagcttttatccatttaattcacatatcctctgaaaagcaaatgaaaagaataagagttctcatctacattttgtaggtggaaaggagaggtacagggcaggtaagtaacttattgtggtttcacagcaggacaagctaggcttatgatagaatttggatatctcatcttgggctcaattcaacagtcctggtttggaaaacattcattattaaagctctaaaacaaaacctgctattttgcaagtgtcaagtgatttctttattcaagaaaagatggattgagagacataaaacttactctttgtttcactgtgaaaagatgctattcctagattctccagggggaaaaagctgctttaaaaaaatctggggaggatagcatgttagcaactaagaatctttagataaatatattgtcaattatgcccattttaaaggtagctacataaaaatacagttgttttgaaggctatcctgaaaatcatataaaatgaactcctttcatagttgattctctgacagttcccagaccctgcctttcctcttggctccctgaaatttgtgctaagagtatctggagagccaataaataaatgctttctttttattttgaattcagccttttaagaacaggactgccaaaactcaaacaagtagttcatattttagttagcacctcttgttttagaagctattagaagaaagtcggaaaaatggtaatgtccaaggaaatgccacagaagttcgagtgggatgtcaaggaattgatgaaatgataaagattgtttcagtggatgtgaagatattgagggagaagatatcaaaaaaaagggaaaaggaaatgtgaaaaagaatagtcatagagagaaaaaataaattttggtggagaagacttttttttttggtggcttaaatttaataatgggttaacctattgagtttttggtaaatcttcagtttagattctttactgataatgatgtggttcctcataaatactggaaggagagagtgtgatgcttggtacaagggatgagacaggtaatatttcagaagaagaaaaatacgatctcagatgtgacacatggccttgatgccatcatctctagggttctgaagacattgaattttacataattgatcttttgatgtgaggatttcctggactcttgttttccctgctttatcatttttcactttcaataattccagcctttggctttaattagatagaagaggttcttcttttggaaaggaactagagaaatgcaaatctaaacttattcagagctatgtttgtaggtctctaggcaaagtatgtgtctggcctttttcaacgaagtattttcagtaacaagttgtcagtgaggtcagtgactagcggttcaggattagataccacccaccctggcttgtaacctcccctttctttcttatcctgggtgaacaacgctcagcgaaattgactgccccactgtcatctgcctctcaatttggtactctgtaactctgtgaccaccaagaagcctttttccgtcccccacaaagctctttttggaaaattccctacgggagctgaattttaagcccatttactttataggaagaaacagaaaggtaagaatcaagtttgtaaagagaagagctgaacttcagcgaattctcatttctgcattgaattcctgtgtcttagttataatcataggtttaaaatttggggttttcttctgaactgaggaagatcacattattgtatgaaataggaatgttttgactagttatgagaaacgtaggctttcacgctaattttaaagttataaataactttcgaactattgccaggggaagctggtagccaaggtcgtgctttgcattcagagagtttctggctataaaaagccgattggatactgtgcaggaaaagataagatatggcctggatgcttgtgctttggcatgggagtggggaaaaggaagcaaagatggaatatgtttgaagggattttactttcaaccaaaagctaattcatagtaaatggaagatgtttcaagtgagataatggcaaaaagcattaatttctgaatttaatgtctatttgttttataattggaaggaatattaagaggttgaggaatgctctcagaactgtttgatgaccagttatagtcaaatgaaaatcactgtatggaatgatcatgagatgtaatgatcaatcatgtaaagaaaaggtcactatctaatgggatctgaatgattgtgagcagctgctgtcagttacacggaagacaaataaaagaaatgagttcaaatggaaacaagaagaaattggggttagacatcagaaagttcatttactgtagaggttttgagtcactgatatgtgcctactaagatctctggagataacgtgagaatgcaatgatttgcttaaaacaaagtggaaaaagcaggatttcaagtttgcattggttctgggtttgtggctagctttttagacagattgaaagctcaacatattgagaatagttgtgatttgaagattcagattatccatggtcagatttgaatggcatatttgagtgtgctattaaaatttcattgtccattataaaaaattatctcagtagaaccataggacaagtttgttaaatggagaaacctaaaatacagacagtatagacaaagttattcccatttgttacctcctacacatagtctaaatcttcctatttgagtaaagattggtaaaactttttttcattataaaagcattaaatgttcatcgtaggaattttgaaagcacagaaaaatatttcctgtaatttcattgatgtgtttccttctagtctttttttttctagatggctttaaaaataattgcaataatagtatagataaaatttggaaccttgctttttcrtttaaccatataccaaaacattttccacagaatattacctattctacagtggtgttattttaaatttgtgtaacatttgttcaagtgaatgaatataattttattaatcattgctgaacatctagatgctatggtaaacatctttgtgtatttatttacttatgtgtatatgtatgttgtagatatgtttaagataatttccttaatctctgtttctaactgtagaagtgttggattagagaacactatgtttgaaggtaaaagttgtgatatttaagatgtgtttttactgttattcttttaaagcattgtaaaattcctagtctaccaaatgatatatttattgtctatgatgtgcaaaacattgttatcaggcacatagataccaaaatacttagtgtttagaaggatggaatctctcctacctacaaaatttccactcaataaacttttacagatatcaacaaagctacatgtcagagttgaaaatacttcagctctgcctgaaaccgatagatagtattgttgatcacttacgttactttgcacatgaaaataacagaatgtataagtaactttattagaagaccatgtagacatagtgatttatatgacttttatgatacaactgtgacaaagaaataggaataggaagaataaattctttacttattgtgaatctttggagaaattagaagtatttggagaaaatctgtaggcaacagactagaaagaaaagggatagagggcacatgctagaggagcaattcagtattgggtttttctatagggaaaacatgagaatggaattaggcgtggctatggtaggagtcagagaagataagttttaattctgtcattgttgagtttgagaaccatgttgtgtaaatagagtagaaggaagaaagctaaggaattagtgataaatacaactaattattggaagtggttactggtcccaagtaatcaaagtggagagattagagatatcaatattatgtggtgtgaagtgagaggtagagttatgaattatcaaataatatattcttcctgtattaaaaaactttttaaattgtgaagtttttattattcagtaataatatttagagaaaaaccatagctacagaaggatgggagtttcattctctattccccatgaacttctgtttgcatgtttctattttttttggaatagaagggattaagatttaagaagagaagttggcaacccaaactggcctgaagagaaattatgcgctttgtaaygaaaacttgaaaatagtgtttatttatggatcattggctcatgggaatgctagtctagagatttaaaaagtgtgattttctgattcttgtttggatactggattttaagtgasatggtacwgcggggtggaactccggagtttagcaaagttgcaaatctaatggaaagtgacagataattgaggctgcagaatttttgaaggtgaacaggactgttagccgatacatctgatttttcacatgcttaaatactgtttttaaccacattatttttgcctgggattcagcgagtaatctgtaaccaatttaatcactagcttctagcatatgataggtgactttgagttcctgtgtgcaaaatggaagattaggtcaagtttatttggcaccctccccacctcttttctttgcctttcattatcctaaccaggatgattttctgcttcagatgcctcctggcaatggggaaattgatttgaaggagaaggcaatgtttagtgcaaagaaagtctctcaaatactggaacttgaacaatggaggcccctactttaaattagcactgttcaaaatgtaattagaagttcccaatttttaactaatctatgaaacgagataagaggcttgtgcctgaaagtaaatcagctacaccctaagcactttgtagcaagacttttttttttttttttttttttattgatcattcttgggtgtttctcgcagagggggatttggcagggtcacaggacaatagtggagggaaggtcagcagataaacaagtgaacaaaggtctctggttttcctaggcagaggaccctgcggccttccgcagtgtttgtgtccctgggtacttgagattagggagtggtgatgactcttaaggagcatgctgccttcaagcatctgtttaacaaagcacatcttgcaccgcccttaatccattcaaccctgagtggatacagcacatgtttcagagagcacagggttgggggtaaggtcacagatcaacaggatcccaaggcagaagaatttttcttagtacagaacaaaatgaaaagtctcccatgtctacctctttctacacagacacggcaaccatccgatttctcaatctttcccccacctttcccccctttctattccacaaaaccgccattgtcatcatggcccgttctcaatgagctgttgggtacacctcccagacggggtggtggccgggcagaggggctcctcacttcccagtaggggcggccgggcagaggcacccctcacctcccagagggggcggctggccgggcagggggctgaccccccacctccctcccggagggggcagctggccgggcggggggctgacccccccacctccctcccggacggggcggctggccgggcagaggggctcctcacttcccagtaggggcggccgggcagaggcgcccctcacttcccggatggggcggctggccgggtggggggctgacccccctacctccctccctcccggacggggtggctggccgggcggggggctgacccccccacctccctcccggacggggcagctggccaggcagaggggctcctcacttcccagtaggggcggccgggcagaggcgcccctcacctcctggacggggcggctggccaggcggggggctgacccccccacctccctcccggacgaggtggctgccgggcggagacactcctcacttcccagacggggtggctgctgggtggaggggctcctcacttctcagatggggcggctgccgggcggaggggctcctcacttctcagacggggcggttgccaggcagagggtctcctcacttctcagacggggcgaccgggcagagacgctcctcacatcccggacggggcggcagggcagaggtgctccccacatctcagacgatgggcggccgggcagagacgctcctcacttcccagatgtgatggtggccgggaagaggcgctcctcacttcctagatgggatggcggccaggcagagacgctcctcactttccagactgggcagccaggcagaggggctcctcacatcccagatgatgggcggccaggcggagatgctcctcacttcccagacggggtggtggccaggcagaggctgcaatctcggcactttgggaggccaaggcaggctgctgggaggtggaggttgtagtgagccgagatcatgccactgcactccagcctgggcaccattgagcactgagtgaacgagactccatctgcaatcccagcaccttgggaggccgaggctggtggatcactcgtggttgggagctggagaccagcccggccgacacagtgaaaccccgtctccaccaaaaaaatacgaaaaccagtcaggcgtggcggcgcgcgcctgcaatcgcaggcactcggcaggctgaggcaggagaatcaggcagggaggttgcagtgagccgagatggcagcagtaccgtccagcttcggctcggcatcagagggagaccgtggaaagagagggagagggagaccgtggggagagggagacagagacggagagggagagggagaggctgtagcaagactttctagatgaaggaagcactcattaacttacattctggtacaagctccttttctcatcgcagacctgcagtttgagtagcgttgcttaagttacactgtataaacatttatctcctcttgagaggtgaagctggctaggcttcagggtcaggtggggacttggagaacttttctgaatagctaarggattgtaaatgcaccaatcagtgctctgtgtctagtctagctaaaggtttgtaaacgcaccaatcagcactctgcaaaaatgcaccaatcagcgctctgtgtctagctaaaggtttgtaaatgcaccaatcaggactctgtaaaaacagaaccagtcactctgtaaaatggaccaatcagcactctgtaaaatggaccaatcagcaggacatggtgggggccaaataagagaataaaagctggctacctgagccagcagtggcaacctgctcgggtccccttccacactgtggaagctttgttctttcactcttcataataaatcttgctgctgctcactctttgggtccgcactacctttatgagctgtaacactcaccgtgagggtctgtggcttcattcctgaagtcagccagatcatgaacccactgggaggaacaaacaactccagacgtgctgcctttaagagccgtaacactcactgtgaaggtctgtggcttcactcctgaagtcagcaagaccacgaacccaccggaagggagtaactccggacacatatgaacatctgaaggaataaactccagacacaccatctttaagagtggtaacagtcaccgtggggtctgcggcttcattcttgaagtcagcgagaccaagaacccaccagaagcaaccaattctggacacattttggcaacccagatgggactctcgcctattgccaagtgatgagtaccatcagaccccttttgcttgctattctgtcctgtttttccttagaattctgggggtaaatactgggcacctgtcggtcagctaaaagcaactagcgcggccgctggactaaagacacaggtgccaggctttctgggatagggctctctaacaatccctgactctatggagttgggaatgttggtttgcctggagccagcttccactttaatggtacttccaggctgagccgagggttgacagagaggaaagccattcagctccrgggtcccaacaacaagttggttgaccctgcggccatgagtggaactctcaaaatcatgtcacccaagygagacttgcccatctatcctatctcctgacccttgcctcctgggtcctaatgcctgtcagacaaacttcctctcgcctctcttctctgaggctagtccacttctaaaaascactccctgtctctggtgcttttctagtttctcctataagaatgatttctagtataaacttcaggactcttttaccttctttaggcacccgggctcaccaatcagaaagacataatttttgcccaaagtcccatctgggcaagggactatctggaattttaggatccctcttcagacaagcaggcctaacaaaagctattcctgaagctaggatatggggagcttcggaaatggtatctttcctattcatataagtgaggacaaaaagcatcactcttccaactctggagatcctttccctctctcagggtatgtccgtccagttcatttttggggcataacatctttataggacagtggtaaggtcccaatactaacaggataatgcttaggactctaacagctttttgagaatgcatcggtaagggccactaaatccaatttttcttggtcctctttgtggtctaagaggacaggcaagaatgcaggtttttgagaatgcatcagtaagggccactaaatctgaccttcctcggtcctctttttggtctaagaggaaaactagtgtttctgatgctgcgtcggtgagcacaactattctgatcagcagggtccagggaccgttgcgggttcttgggcaagaggtgtttctgttgctgcatcagtaagtgcaactattccaatcagcagggtccagggactattgtgggttcttggggaggggtagaaacaaaccaagaccaagggtggttttgtctttcagatgggaaacactcaggcatcaacaggctcacccttgaaatgcatcctaagccattgggaccaatttgacctgcaaaccctgaaaaagaggcagctaacttttttctgcactatggcctggccccaatattctctctctgatgggaaagatggccacctgaaggaagtataaagtacaatcctatcctgcagcttgactttttctgtaagaaggaaggcaaatggagtgaaataccttatgtccaagctttcttttcattgaaggagaatacacaactatgcaaaacttgcaatttacatcccacaggaggacctctcagcttacctccatatcctagcctccctatagctccccttcctattaatgataagcctcctctaatctcccccacccagaaggaaacaaacaaagaaatctccaaaggaccacaaaaacccctgagctatcatttatgtccccttcaagctgtagggggaggggaatttggcccaacccgggtacatgtccccttctccctctctgatttaaagcagatcaaggcagatctggggaagttttcagatgatcctgttaggtatatagatgtcttacagggtctagggcaaacctttgacctcacttggagagatatcatgctattaggtcaaactctggcctttaatgaaaagaatgtggctttagttgcagcccgagagtttggagatacctggtatcttagtcaagtaaatgatagaatgacagtcgaagaaaggggcaaattccctactggtcagcaagccatccccagtatggatccccactgggacctcgactcagatcatggggactggagttgcaaacatctgttgacctgtgttttagaaggactaaggagaattaggaaaaagcctgtgaattattcaatgatgtccaccgtaactcagggaaaggaagaaaatccttctgccttcctcgaacagctatgggaggccttaagaaaatatactctcctgtcacccgacccactcgagggtcaattgattctaaaagataagtttattacctaatcagccacagatatcaggagaaagctccaaaagcgagccttgcgccctgaacaaaatctggaggcattattaaacctggcaacctcggtgttctataatagggaccaagagaaacaggcccaaaaagaaaagcaagatcagagaaaggccacagccttagtcatggccctcagacaaacaaaccttggtggttcagagaggacagaaaatagagcaggtcaatcacctggtagggcttgtattcagtatggtttgcaaggacactttaaaaaagattgtcctactagaaataagctgctccctcacccatgtccactatgcggaggcaatcactggaaggctcactgccccagagtacaatggttctctgggccagaagcccccaaccagatgatccaacaacaggactgaggatgcccggggcaagtgccagctcatgtcatcaccctcactgagccccgggtatgtttaaccattgagggccaggaaattgatttcctcctggacactggcatggccttctcagtgttaatctcctgtcctggacagctgtcctcaaggtccgttaccatctgaggaatcctgggatggcctgtaaccaggtatttctcccacctcctcagttgtaactgggagactttgctcttttcacatgcctttcttgttgtgtctgaaagtcccacacccttattagggagggacatattagccaaagctggagctattatctatgaatatggggaacaagttacccatttgttgtcccctgcttgaggagggaatcaaccctgaagtctgggcattggaaggaacaaactcaaggtccatccttaagccttcccacaggacaaaacttttctttatacatcacaaagagagcaggaatagctcttggggtccttactcagactcatgggacaaccccacaatcagtgacatacctaagtaaggaaattgatatagtagcaaaagtctggcctcactgtttacaggtagttgtggcggtggctgtcttagtgtcagaggctatcaaaataatacaaggaaaggatctcactgtctggactactcacaatgtaaatggcatactaggtgccaaaggaagtttatggttatcagacaaccgcctgcttagataccaggcgctactccttgagggaccagtgcttcaagtgcatacatgtgtggccctcagccctgccacttttctaccagaggatgaggagctggtcaagcatggctaccaacaggttatagtccagacttatgccacccaagatgatctcttagaagtccccttagctaatcctgaccttaacctatataccgatgaaagttcatttgtggagaatgggatacraagggcaggttatgccatagtaacagtacttgaaactaagcctcttcccccagggaccagcacccagttagcagaactagtggcacttacccaagccttagaactgggaaagggaagaagaataaatgtgtatacagatagcaagtatgcttatctaatcctacatgcccatgctgcaatatggaaagaaagggagttcctaacctctgggggaacccccattaaatatcacaaggaaaccctggagttattgcatacaatgcaaaaacccaaggagtataagactgccaaaaccaccagagagaaaagatggagagaaagaaagagagagacaaagtcaaagacagaaggaaagagagagaggaagaaacagatagacaaagagaaggagacagaggaagagacagagacaaagaaggagtcaaagagagagacagagagaggaagatacagagagacagaaagtcaaacaaggaaagaggaagagacaaagagggagtcagagagaaagagacagacagatgaagaaatcaaagagggagaaagagagagatagaagtagtaaagaaaaaacagtgtaccctattcctttaaaagccagggtaaattaaaaacctataattgataattgaaggtcttctctgtaaccctataacactcaaataccaccttgttgtcagtgtaaacaagggtgtagcccgaaagcactgaggccactgacaacccatagccttcctatctaaaatccttaacacagcaagtttcctaacaggggatctaaatcataattaattaccatacaaaggtccaaccagacctaggaggaactcccttcaggacaggacgatagatggttcctcctgggcgattaagggaaaaagacaatgggtgttcagtaagtgataaggaaactcttgtagaagcagagttaggaaaattgcctaataattggtctgcttaaatgtgcaagctgtttgcactcagctaaaccttaaagtacttacagaatcaggaaggagccatctataccaattctaagttaatatggactgaacgagggtttattaatagcaaagaataattaaaatcccaaacttacaaggttttcaacaaaagtaaagtttgctaaaagttaacggagtaacatgtattatcctactaccacacactctcaaaggatttctcagacagtttgcaagaaataacaaaatctatccttactctacaatcccaaatagactcttcggcagcagtgactctccaaaactgccgaggcttagacctcctcactgctgagaaaggaggactttgcaccttcttagyggaagagtgttgcttttacactaaccagtcagggatagtacaagatgcygcccagcgtttacaggaaaaggcttctgaaatcagacaacacctttcaaactcttataccaacctctggagttgggcaacatggcttctcccttttctaggtcccatgacagcaatcttgctattactcaccttcgggccctgtatttttaacctcttcgtcaaatttgtttcctctagaatcaaggccatcaagttacagatggtcttacaaatggaaccccaaatgagctcaactaacaacttctactgaggacccctggagtgacccgctggccctttcactggcctaaagagatcccctctggaggaaactagaactgcagggcaggccccttctttgcccctatccagcaggaagtagctagagcggtcatcgcccaattcccaaaagcagttggggtgtcctgtttagaggggggattgagagatgaagccggctgggcttctgggttgggtggggacttggagaattttctgtctagctaaaggttgtaaacgcatcartcagcactctgtgtctagctaaaggtttgtaaacgcaccagtcagcactctgtaaaaacgcacaaatcagtgctctgtgtctggctaaagatgtgtaaatgcaccaatcagcactctgcaaaaatgcaccaatcagcactctgtgtctagctaaaggtttgtaaatgcaccaatcagcagtctgtaaaaacgcaccagtcagtgctctgtgtctagctaaaggtttgtaaacgtgccaatcagcactctgtaaaaacggaccaatcagcactctgtaaaacggaccaatcagcgctctgtaaaatggaccaatcagcaggatgtgggtggggccaaataagggaataaaagctggccacctgagccagcagcggcaacccgctcaggtccccttccatgctgtggaagctttgttcttttgctcttcacaataaattttgctgttgctcactctttgggttcgcattacctttatgagctgtaatactcaccacgagggtctgcggcttcattcctgacgtgagcgagaccgtgaacccatcgggaggaacaaaccactccggatatgccgcctttaagagctgtaacactcactgagaaggtctgtggcttcactcctgaagtcagcaagaccgtgaacccaccggaaggaagaaactctggacacatctaaaggaacaaactctggacacaacatctttaagagtggtaacactcaccacgagkgtcygtggcttcgttcttgaagtcagtgagatcaagaacccaccagaaggaaccaattctggacacactcttacctatatgcatgaaggcagagaattgggatgaaggtatacaattaactgggtaataaatgaattaccaattctcagttgatgaggcctctaggggtggcatcagttcaaagaggcccagagttagctcattgaggagcccacagaataactgagaggcaggattgctgaagggctacactgggtctactctaatgttggtttggaattcattcattcattctatatgacttgtgtgccagacatagttcttagtctggagataaataccagtgaaccaaaaatagaccctgtcctcatgatgtttcctttctaatgtgtgtgtttttgtggatgggggtgaagacagagtaatacataaaccaacttctctgagattcaccagaagagatcctgggttcttagtccagggctgaagctcatgggtcatgttttcatgggaatttgcaggattaacttgcttttctgttagactctgcaatttctattttcccaatgtgggattacaaaggaatcttaagaatcaaatagtctgtgatagacactgttggttgcctatgcaatatccatgtattctcctctgcttgctaattgacagaaccctaatttgggtcaagaaaaaaaaggcataatgttatgcaggttgatcttgtatcttcttcccgcttaagacagttatatttggttaagacagatgcatagcagttctaatagacctgcctcattctttccagcagctttgtcgtgttttactctgtgtatgtagcagaatttatttagcccattctgaattgatggacatgtttgtagttttcagtatttgttgtttgtttgtcctgttgctgtgtgcaatgaatatgcttgttcatatatcctggtgtactttttgagtgtatccttagaatacgttcatggaagtggaattgctgtatcaatgggaatgtttattttaaaatttcataagtattacatttaattggaaatattcaagagtacacataatttataatttgagatgtattgtcatatttctcttcaagaagttcatatcagtttataccccttcaacagtgtatactaagagcttatgttccyaacacttaamcagcactgatgataccatatcaaaaattttcaattttggctgcttggtgaaaataatatcttgttttatttgatttgcatttaattaattataagtatagttgaacaatttctaagtacttattaacccattgcccttctttttacataaattgcctttacaaatacttgcccaattttttctattgagtctttttttttttttgagatagagtctcgctctgtcacccaggctagagtgcagtggtgccatctcagctcactgcaagctccgcctcgtgtgttcacaccattctcctgcctcagcctcccaagtagctgggactataggcgcccaccaccacgctgggctaaattttttttttttttttttgagacggggttttgctcttgtcacccaggttggagtgcaatggcgcaatctcggctcactgcaacctctgcctcctgggttcaagcaattctcctgcctcagcctcccgagtagctgcgattacgggtgcccaccaccacgcctggctaatttttttgtgtttttagtagagatggggttttactgtgttagccagcatggtcttgatcttgtgaccttgtgatccatctccctcaacctcccaaagtgctgggattacaggcatgagccaccacgcctggctgagttcttctttttatcccaccatagtaaattaagcaaattagctttttgcctgtttaatatgttccaggtatttccccataatttgttgtttattttatgacttttgttttatttttgaattatatagaaaacaaaatatttttgtagtcaaaattttaaacctcttcctttatagcttctgggttttgagttttgcttagaaagggctttctgcttaattattataaatttattatacatactttaaaaatgtattatacataaaaatttccacttagttattatacatttattatacataaacttatatattcatactttcagaactttaaaattcttgctacatctggaattgaatttgggcaaaagagtgagcagggagtaagctttatttttaatttttctcctaaatgtttattcagttgatcattataatttatttaagaatcaccttttttcctgataatttgaaaagccgtatttatcataagctaagtttatattggagtccatttctcagctgtctttcctgttctattaatatttgttcctattttttccaatccctacttttaaaataacttcatttcataatatgttttaataactggaaggaataatccttctccatattcttttctgtcctttcaggattttcctagatgtaatcacataatatttatttctagatgaattttaacattttatcaagttctcaagtggtctgtggacatttaacagggagaattaacacttctgtaatgttcaatttgcctatacatcactttttaatatacttaattcttcttttacaaccctcagtagagttttaaagttgttttcatatcagtatttaaaaaatttttattggtatcataaacggtctctttccttccatcatattttaaaattagttattatgtgtaagaaagtgagccattgatttgggtccacatttgtatttttaagaagtgcctccggtggttgatacacagctaatattcatatgggcttttgggatctagatctctatactgctcttttggatttatttcttcaaccaggtgtttcctcagatctgtaactaatcagtccacatatcttttttaaaaagtcatttataaaaattaactttcttaaagtaaaaagttatatatgcatatttattttagtaaagggtaccttagccagggtttttgattataactaaagtctactttagctggtttaagcaacaagagtttcataaatgacattaggtagttcatagattctccatgagagccagagaaacaaagacaatgcagctgggaagattggacagtgatacagaagtactggtttctaccgtttggtgcttttgggctggacactggaagccccatcgcagctttcctagaaggatctgattcctgtgacgttctaaaatctcacccaagccatgattgattggtgaaatctgggttctatttcagtcaatttattgctccatgttattctgagttattttaatgttttatctgttagtgaggactgatagtccctagtgaggcatacaaattgttaaaatatgaaatgcttttgtacttctcccttacccttaccagtgattttccttcacttggcctctgcttgagaccccctggacctttcctagacccagcaactgaaaggtaaacacttggcacaggatgaagcttccaagacagctccagcctaagctctgattgcttggggcctgagccatgctggttgttaaatatttttaatatctctcctactgttactcaattgacatccaattagattctatatattttttaaggcttttctgacccactaataataattaaaagtcagaccaatgaaagaatatatgacaatttatttaaccagtcccttattaatgcacatttaggttgtttctaccttttgttgctacaaacaattctgcagtttgtgatatacatctttgttcgtatgttcagatccctagaagtggcattactttgttcaataattcgtgcatataaaattttgtggatactgccagaatgcttttcaaagagattttaccaatattcactttgaccaacagtgtatgagatagctcacatttctttatcttggcaaagaaaatttcacaaaagatttaaaaaatgtttgagtgaaaccaattttatcttttagcaatgakttttttaaaaaaaggaagagaagaaaattaagttagtttactatgagtggctcctaatgaacctataccaatgtagcaaaaaatcattgttctcttttctaattaataatattttgatacttttctagagaccaagatagaatttggttttactttttaaattctacctttctgatatatgggaaaacatttgtgaattcccaatattctgttaccactctcattttccattagtatgccaaatgccagcaagaattctgtgataatatgtgcatgtttttcagtgctctgtaaaatagtggttctcaactcagggtgcttttgcttctcagaggacatttggcaatgtctggagacatttttggctgtcataactagggggcaggttcttttggcatctagtgggtagaagccagggatgctgctaaacattttacaacacacaggaaagcccccaaccataaagagttatccagcctcaaatgtcaatagcactgaagatgagaaaccctgctttaatggaatatacccagaaatggtcatttatctaaattgttaagcattctcttactatcttttctcctttctcgtttatcaatttcatytcaagattgttggtacaatctttttattttaaagaccattctccttgggagacaagatgaaagcaaagtaaaaatattgttattttgctttctctctattacttgttaatatgaaatctgtctgggggaggaggagacttgtaccttttttatctacttccatcatcaaacacaaccttaaaagtttttgtgttgtttaagtctttgctcatcctaggtttacactacttttctaatagactgatactacagtgatgtgttcatcctaacctttaccttcttccttcttttgtgtgttctttaaacatctcagctctttagaaggctccttgtataccatctgtgtgatgtagtaatggcttaagttttttgacctatttttcatttaaagtctgtggctctgggacattcttatattttctctcaactgctaagcaatctaagatacttgtcttactttgctttgtgttttctttctttactgtaatgaactctaaggtgatatgttcaattttccccaaggttcctgtcactttcacttccctaacgtatcattctttgttggtaataattaaatccagggtagcagttccattctttgcttcttttgccctctgaatgatgaagctgctggtagagaggcaggagataaaggagaggaatgattcagattttaattacttcattgtctttttcttttgccaaattcttggatgtttaaatctttgccaggtctctttttatcttgacctgtcacttcagtcaactttcttttctttttagcctttccatcacttctttcctagaatttacatttttgggtatttcactgagaacacagaagagatatattctaaattttcttttgtcttggtgataattttcccttacatctttaagaaagtgtcttcctcttttatgttacacgatttttaaattttgtttttttctgttatttttgaaatacataagatttatatttagtcctggtgtttgtcagaaatgaggtatgtgtagcctttgagctcaatcagtattagttttgattctacagaattattctctcaaatcttaaagtgaaggacaagtatcttgttaagtttctgggctacaggaggtacatttgcatcggggcaactcttctcctactcctattatttgttcctctacttggaggtgaatttaaccctagataatctgaagcaattcgattcacctttctaaaagagacacataaaacctaatctccagagcacccttctgtctgtgtttttcttatgtctgccttctcttttggggctttctcataccagagtacaatatgtcattctttccttgtcccctctcatcctgtgctgcatttctgcgactcaaaatcttctggctgagtgtagttagaaatgtattgctaggaggtgtctaggaaacacccctggctacctgaaaagcagcttctttgaagtaagggggtgcaagctgactttttgattggttgtgccagccccaagtctttgataggatgtgaggatacatgggtgggatgtgaggttgttgcaaatttagacacaagtgagtttcagctccctttttccttgtttataattcatgaagtagataaggtaaagtggccagatttagtaaataaaaatacaggacacactcttgatttaaattccaaggaaacagcacatatgtgtgtgtgcatgcgtgcgtgtgtaagtatgtcccaaatattgcatagggcatacttatgccaaaaaattattctttgtttatctgaaagtcaaagtgggcattttgtattttatctgtgaaccttaaggtaagggaaaattttcctccagtgtttggaaatcattaatgagatccttatcattttgtgtctcagatactagcgtaaaagggtctttttctaacttgasaaagcttgccctttctagtcttgtttcagctgcagggctggtcaacactggggagactggaggaaatttgtagaatctgggagccttcaaacaggagaagactgaaaacctggactctttccttttacaatgtatctgttgttaggaagagttcttctgacccctgcatcaaattagtactgactaaaatttgctagtgagaaagaacaccaaagacccttaaactagaaccccccttgtggcctatgttaccctagaagtgtttgtttctggcacatgtgtaactgactggaaggccctcctgactcagccactaggcttggtaaattaaaacgttgaaggcatgggttctgtgccatacatttgccggaatggtatgcttgtcttaaatcattgtggcctctcactggatccacagcaacagctagagtgcagcaggagaaagggtctcactgaactatggggagtcagcttccatcagtaaactgtgtaccaggaacagagcaccagcatccttcaacaaagcccacttgtattctaatccacttctctgcctttctttctctgtggcatgtgaatgaagatgcccccagagtttttgaacaatttgagagacaagagagatactggattccctgccagtctggcaattgggaagtggttttagcttgaaaaattaatagtaatgacctcatttttacccaaaactattgaagtggaccctgctattaccacatatacacatatattttacaaatatgacatcataacatatatcattttataattgttcagttctgtgaaagtttcttttttccttttccagtggcatgacctcagaagattgtatatatttttctgtgttcttgtgctttgcatttttgaatatacctatactgcttagattaataaagatctgtttataaaagacaatcaagttttgtgatttcttataattcctgggtctttctcttctttgccagcctgtatcattaatatattttaaagaccaagctaaaaaattaacctgaaataagtagccatccttgggtaaatatttttaattttgattacttaacttgggtgcctcggcctttagtttatatgatataatcttacatttaggcatatgctaatttaaaatatattggttattgatccctatgattgcattctagaggaaaatatagaatatatttatgatcttaggataggacataatttcttaaataagactcccaaaacatagccataaagtaaaaaactgaaattattacattaatgcaaaaattaattaattaaaagactgaaaaaacaataaaaakaaacaaaaactaccagttgacagggtatgtttacattcatccatataaagtggattgcattgttgtttcccaatcctcttgctccctatatccatcccctttgccatgtgtctttgcaattcctcctgctagaggcagagtgtatttccctgctccattaatgttagacttggccatatgacttgttttgcctgtcggaatgtgggcagaaaagttagacttggccatataacttgctttgcccattagaatgtgggcagaaaaggcagagtgccaactttgagccttcaccttaagaggtactcaatgtttccatttgcccatcttgtgtttctgttcatgagaagaatatgctccaagtggcctacttgtccaaggaggatgagaaaaatgtggagcagatctggatcccaaaactatagcctggggcaagctaagccaggtccattctgaattagccaatctttagccaacctgaaaatccacaagaaataataaatgttttcttaggccactgagttctaaacctcagtggtagttttttttatatggtgttattgtcaaaatagttgactcatacatcatttaacaaaagtcatttatcataagattttattaaaaactccaaaaaattaataaggaaaagataatcaaaaaacgaacaatccaatagggtcaatgatatgtgaaaaggtaattcacagaaaagaaaactagaatgacccataaataagtcaaaagaaacttagttttcttcactagttactgggtaaagacacattaaaacaacaatgggatactttatctactcattaaattggtagatattaatgtatggcaataacctagaatgtgtaaggatatgaagaaaatggaactttcatatacagatgttacaatgttcaagggaaggtatcctagacaaagagggacatatgaagcagggagaggatattttcaaggaatattactgacaaaagattatatttacaatatatagggaattctttgaagtcagtaaggaaatgaacaggcaacctaggagaaaaacaggtgaagaatacaagtaagcaattcatagaaaggatatttgaatggctgactaatcaactaaaaagagattagcatttacactggtaatcagaagtgcaaatcaaaacaatagtgatgtgatatctcctttgcatgtcccatgttgatgggagttaaaatgtcatgtaatatcttgttttggtgaggaggtggggacatgtgaacctacattctctgctggtggtgttttttggagaccaatttgacaatacttattgaaactgaacacacattctgacccagaaattctacttctgaattgtattagtttgctaggactgccagagtaaaataccacagactgggatctttaagcaagagaaatttattttttcacagttctggaggctataagtccaagatcaaggtgttggcaggtttggtttcttctgaggcctctttccttggcttgcagatgaccacctttctcacatggttgcccctctatgtgcacattcctgatgtcttttcttctctatgtcctaatttcctcttcttagaaggacaccagtatgactgaattagggcccatcctaacagcctcattttaacctaatcacctctttaacggacctatctccaaatacagtcatatcgtgagtgaggtactagggtttaggactttaacacaggaattttgaggagatacaatttagcccataacagaatgtatacaccagagggactcttgcataggcacacaaagagacatgtatgagaatgtttattacagcatnnnnnnnnnnnnnnnnnnnnnnnnnnnnnnnnnnnnnnnnnnnnnnnnnnnnnnnnnnnnnnnnnnnnnnnnnnnnnnnnnnnnnnnnnnnnnnnnnnnnnnnnnnnnnnnnnnnnnnnnnnnnnnnnnnnnnnnnnnnnnnnnnnnnnnnnnnnnnnnnnnnnnnnnnnnnnnnnnnnnnnnnnnnnnnnnnnnnnnnnnnnnnnnnnnnnnnnnnnnnnnnnnnnnnnnnnnnnnnnnnnnnnnnnnnnnnnnnnnnnnnnnnnnnnnnnnnnnnnnnnnnnnnnnnnnnnnnnnnnnnnnnnnnnnnnnnnnnnnnnnnnnnnnnnnnnnnnnnnnnnnnnnnnnnnnnnnnnnnnnnnnnnnnnnnnnnnnnnnnnnnnnnnnnnnnnnnnnnnnnnnnnnnnnnnnnnnnnnnnnnnnnnnnnnnnnnnnnnnnnnnnnnnnnnnnnnnnnnnnnnnnnnnnnnnnnnaaatcaatgtacaaaaatcacaagcattcttatacaccaataacagacaaacagagagccaaatcatgagtgaactaccattcacaattgcttcaaagagaataaaatacctgggaatccaacttacaagggatgtgaaggacctcttcaaggagaactacaaaccactgctcaatgaaataaaagaggacacaaacaaatggaagaacattccatgctcatgggtaggaagaatcaatatcgtgaaaatggccatactgcccaaggtaatttatagattcaatgccatccccatcaagctaccaatgactttcttcacagaattgggaaaaactactttaaagttcatatggaaccaaaaaagagcccgcatcgccaagtcaatcctaagccaaaagaacaaagctggaggcatcacactacctgacttcaaactatactacaaggctacagtaaccaaaacagcatgatactggtaccaaaacagagatatcgaccaatggaacagaacagagccctcagaaataatgcctcatatctacaaccatctgatctttgacaaacctgagagaaacaagcaatggggaaaggataccctttttaataaatggtgctgggaaaactggctagccctacgtagaaagctgaaactggatcccttccttacaccttatacaaaaattaattcaagatggattaaagacttacatgttagacctaaaaccataaaaaccctagaagaaaacctaggcgataccattcaggacataggcatgggcaaggacttcatgtctaaaacaccaaaagcaatggcaacaaaagccaaaattgacaaatgggatctaattaaactcaagagcttctgcacagcagaagaaactaccatcagagtgaacaggcaacccacaaaatgggagaaaattttcgcaacctactcatctgacaaagggctaatacccagaatctacaatgaactcaaacaaatttacaagaaaaaaacaaacaaccccaccaaaaagtgggcgaaggatatgaacagacacttctcaaaagaagacatttatgcagccaaagacacatgaaaaaatgctcatcatcactggccatcagagaaatgcaaatcaaaaccacaatgagataccatctcacaccagttagaatggcgatcatcaaaaagtcaggaaacaacaggtgctggagaggatgtggagaaataggaacaattttacactgttggtgggactgtaaactagttcaaccattgtggaagtcagtgtggcgattcctcaggggtctagaactacaaataccatttgacccagccatcccattactgggtatatacccaaaggattataaatcatgctgctataaagacacatgcacacgtatgtttattgtggcactattaacaatagcaaagacttggaaccaacccaaatgtccaacaacgatagactggattaagaaaatgtggcacatatacaccatggaatactatgcagccataaaaaatgatgagttcatgtcctttgtagggacatggatgaaactggaaaccatcattctcagcaaactatcgcaaggacaaaaaaccaaacaccgcatgttctcactcataggtgggaattgaacaatgagaacacttggacacaggaaggggaatatcacacttcagggactgttgtggggtggggggagcggggagggatagcattaggagatatacctaatgctaaatgacgagttaatgggtgcagcacaccaacatggcacatgtatagacatgtaacaaacctgcacattgtgcacatgtaccctaaaacttaaagtataataataataaaattaagaaaaaagaagttaataacggatgtcatcaagggcccaagttctttctatagttctgctctgtcatccttcctcttcagctttgcagtaagattgttttatttccaggcaccttaccacagtcaggttaaggaagacatggcaaggatgctgatgtccttttgatagggraagcaaaagctttaccgtctcattggccagaattctttcacatgccattctgagttgcaaagaaggctgggaaatcaaatgtcctgcctccatagcagagaaagataagggagaataaggttgggactatgtgctgagtgagcaaacatgcaatgtttaccacatctttatagtccaacatagatagaccaaaaaacaaacaaacaaacaaaaaaacaaaaccacacaatgaaacagacacagagagatagaagtagaaagagatgggaaatacaatattatttgtgtaaatttaaacatccatacacataaagttatatattcttgtagacgtatatagcatatgtaaaaaaagttacggaagtttaattggaaatgtacccattaactaccataagaagcagagaggggaatggaactgagaacagggaatatagactatgaaaacaaaaaataaaacaggcttttcatagactagtccaccagttaggaccatgattgattgtgtcagtctaattctgtgcacccaagacccagggggataaaagtggattggcttgggatgtgtgtgtgtgggttactcagactgtttgatttggcagggttatcatttgaagtaaaagaagtgtgattcattggctctatgactgaatttaattattttacctttctctgtgataagcttcattcttttgaatacaattgatgacctaataggaatgatgttatagttttaatttagtgactatagcagttatattttggaaaatttagggatattacaagttttgcaaaattgattttgtttttgtacatatatttcttttgttctattatgcaaaatcagtagaactagacttagagagtcaatgaaagacatgagtaaaatagacatggctgcttagtagtgaaatccatcactctctagttttctgttattatctttggaaacagagagtgtgggagaaaaggatttccttcctctctttctaatatagcctcagtgactgagtggctctctgctctggaatgaagcaggttggcacaactccacaagtcttatgtgggaacaagacacagaggtttctattttttcttagtgtcatttgtttgtgtttagttcggtattctatctttaaccattctatacccactcttccaaaaaatactcagtttattaatatgtgttagtgtccctttaatttattaagcatgttgcaactttggaagaagctctaaacatatttccatttcagtaccaggttttcttgctatccaattataaattattawcgtggatggagtagaagacttccattgatggcatggattcaatttgctaaataaagctgtgtggacataatcattctctatccatttaaaaatcaaaggggcaatctgtttgatgtgtttcacagcagccctctaaaattcaatggcattttggttttgaaaagcagaatttcacaaagagaaaagtatctttccacaaaataacaataattgataaatgaattatttggcatggtaattagcattccattatattctatgtgtaattttataagtaattactcttcatagaagttttataggtctcatttcacatcaggaaaacagggtaaattggggtcattgtggatgaggccaaagagggtaaagtgagtttgaatttgaacccagtttgttttgcatttcttactattcttattatgacatttcttctcatcatattcttcactgtacttgttttgtaatgtggctgcctcattccttctatagttaatcttgggagagctcatctactcttatggattagagtgtaacatggatggacaggttactatatctgtatctctaggcataatttttctccaaagttcatggattctgcatttccagttgctcatgggacataactatttgcatatgccactgcacctcaaacttagcatacctaacctatgtcagagtccgagcttgcactatacctgtcaattggtgtgaatattacctgctaagagcccactgctgtaatttaggggaataataagttgttttgaagataaatgaaatacaataggccctttgggaggccgaggcgggcagatcacaaggtcaggagttcgagactagcctggccaacatagtgaaaccccatctctactaaaaatacaaaaaattagccgggcatggtggcgagtgcctgtaatcccagctgctcgggaggctgaggtaggagattcacttgaaccggggaggcggaggttgcagtaagccgagatcacgccattgcactccagcccgggtgacagtgtgagactccgtctcaaaaaaaaaaaaaaaaaaaaaaaagaaacacagtaggccccttatctgtggttgcattttctgtggttttagatactcaaggtcaaccctggtctgaaaatatgaaatggaaattccagaaataaccaatccacaagttttaagtgtgtgccattctgagtagcacaatgagatcttgtgttatcctgttatgtctcaatcaggacacgaatcatctttttgtccagcatgtcctgctgtatatgctgcctgcccattagtcactcctagaggccatctagattttcaaatggactgtcgtggcctagccccaaagcgcaagagttctgatgcaagcatattgttataattgctctattttataattattattgttaatttcttgcctaacttataaattaaactttatcatagtttgcaggtataggaaaaacatatatagggttcagaactatctgtggtttcaggaattcactatgggtcttggaacacataccttgtctataaggggggactattgcctatataaaatatattgaaaattcagatacagcatatagtgtatggaggcrtttttgctaaaagtaaaaaggagtattttaagtaagtagtatctattcactgcttattcaatctctccctacccctaagcrttatccttaattttttttaatctacaaatagaattgaggctaataaggcctttagatgtaggttcttaaggcacctgcgaaaaccaaaaaccattgagtgagacatagttcaggagagcctgtgtcaggtaccaaactcagagctgaaaagtaaagtagaattaagtgggtaactagaaacaacaacaataacaaaattatttatatacatattccaaaatgtgtggatgattggcaaaaaggataagcaaattactggcaaaactgacttttcagttttattctgaatagtgggttatcctataagttaatttgagaaaaaagcccaggtatctattttatattacagcgaatgtatctgtttagaaaattgaagatataaaatttcataaaagaatataattaagaggtatcctattttatttccaaatgtaaaatatgatatttacmtggctattgttagttattacatgaggaaagaaactgccacatttgagtatgagagacgatcttatagagcagtttctttcaatgaagaacccaatgcttgtttttattattagaaatagaattcccctttaaaggaaaataacctataattttttattttgaatgacaattgaggaagagaattaacatttattttctctttggaaaatttagtactttagcatagaggatgtgccattagtggcaaatctgagagcaggaaaaagagattgctctttgaaattgctttttcacttttgccatagttaacttagttaacttgatgtttgtgatataattgcatcaaagaaacagaaaattttttatcttcagccaagataaatttgtggaagttaatgattttagctaattagatagtaaaatttttatttttagaataaatcaggcaaattgctgtccatgtctttccacactaagtgagtgttaagttgtgaaataaagaacctataaattgtaagggaactttgttagtcataataccgcatgtttatgagaaatatattaatgctgtaataacaggaagtatatctttaaaattagtctgtggcttctaatatataatgaaaatttagcaaatattaaacagggagttaaagaggttacaaatgtcatataattttgaagagagattttatcctgtaatttagttctgttttcttcaggatttgttttcgattttctaatggagcttagaatctttatgtaagattgttgttcatttgtttgtcccagaaaaatttaggattgtgggaagtctttctgatgattgaacccaattctgcttcttcttggtaattctgccacttcttggtcttctagtgctttttttcagaggatgcagctgttggagcagatagaggaggaaataatggtagtgtgatacagatgagaagcattaatctgggctctaaaagtcaaatttatatgggcaaaataaaatgggatatttctaagcacatttactaaggaaagttgagatgatgtgtcccagttcctagctgaagtataaaaatacatgtcattgggtgcaatatgtgggctttcagaatctaataataccctctgctggctaaatgaggaattgtgtttaaaaatgagtgacttggcttttttgtttgtttgtttttaaaatatggatgattgctctattataaaaggattgagcagtgcagagtattgtgaaataatataggaaaaaattgtaaatgtgaagaatgaagccaatatgttactaaaatgttttctaaagtgaaattaatgtagaaatatctataagtagaatttctgaatcttttggtctatattttaatcatgaagtaggtcatagggaaggaatgcagtagggggaaaatacgtgaatctctggcccctatcctcaataacaattcagattaattcaagatatttaaattaccttcattagttattcctaaattactgttgtaagagctattgacaaatatatgaaggtgagataagaactgcttttctcaccccaccactggacactacctgggtaacgggatcaattataccctaaatgtcagcatcatgtagtatacccatataacaaacctgtacaagtacttcctgaatctaaaataaaagttgatattataaggaaaagaaagaatggcttttctgtggatagcctgatttaatttctgttaaaaataacaggcatattcttaagtaacctgaaagcttgatcgcttcagggaagtatcatataacatgcctgttttatattttttctttctacttttacaaattctcaaaaattctactttgggatttacagtgttttgggtacataatgaccatgcaagttgtatttagaagttgatagtgggtaatgtattattatttcattgtaaatctgaaaaatagaatttcaggtctgattctgctgtttgatgttacccttcactggcatgttgctttaagagcacccatccccccttcttgcttgggccactgtgtcctgtcagtcatcctgaaatacactagggtgcttgtcaggctgtttgcttacagatgcatcataagccaaattgtgagccatgatagtggcactgaatttctaaatacaagaaattgcttagacaattggtttagtatctgtatatgggcaatactctgtcctgcagtaggtgagtggagtgtcaaacttttaaaaatcaaactttgctataaggcaaatcctagtaattatagattatctgttgctcggttagataactttgggggaaatgaaaggacattatttctataaaatgggatgaatagaaactattatgttgtgcaatttttacttttataactaattttcgttttagtaacactaaactctagactattttatgaaagctccaattttaaatgtctacttttccgagtatattagcaggcatttcagatttagataaaaatgtggttctcttacacatttttttctttcacaactcaggcagattcaattgagcagaggctcgagtctgctgtttattagtggttttaaaaatagcactaaaacagattctcatgtgccaatacccaagctatagtagtcttacatcagctcatttaaaaactcctactctgtaactgagctattactataatgattgagtaactgtatgcaaggcactagaaactttacatactttagacacaaaaattgtacagcgagtaggttatttgtgcaaataatttaattgcttttaattaaaagttatgggcttttaaacttaaattgtgcatggatttttccctgtagtttttgtgcgcagacttaaatatttttaaacagagaattggtaaagcaaaaaaggagaaactcatgatttttgatacttgtgtattcaatacggtagagcatagctaagaggcagcaagaagttaaagttgtaaggctttatctaaggtaaatgagaaaagattgctttttcagatacctagaatgactctttatttattccttgtcttgttctagaaaggatttaaggtgacttataaggctacatgaaattcaagataggataaattaaatgtggagtgaaagaagaaagaaaacaagtgtgggatataaaacagagccaggagtaagaaaaaaaacaataaaataaatgcagcaattctcaatgataactctggtgtattatggatagatgagagagaaaatatagggtttcagaaatcttatggtggagtttcatacaaaccagttgcctyctcttaccttggtggcagtctggaatgaggagagtatattagattataaatattaaatatgctttaaatgtcactcgtgttttggtgaaaaatagtgaagaaatgctgcccttttaacccacacactaacttatgtgaaagtaaatgtggccccaaatgttcagaaaaaaatttggttagttcagaagagagattaaagaagcttagttttttggaaacaccagagtgatctaaataagataaaatatctacataatagaacagacatgatcaagacaatgtttaaaataaaatatatttagcaattttgtataaatgtatgaatactmgtcctacaattttaaaaaataaattgttgtaaatgggattagctactttccttcttttcacacttttaatctagcagtaaatttaacttgaatttcaacttcagtaaggtcaaaattaactggattgatctaacttgtaaaaaaagttgttgggtagaaagaaggaaaccagagacaggactttataatgtactttcatcttcacatactcgcaggacacctactatgttgaagattctggactctgggccttgtactcactaaactgggcttgtctaagtgaactagcttagaaactcgctgctgtcagagagcagaattgaaaaaagacaagagggtagtagttaaaatttgcgaaggattttcagtgttgtcttctgatattaacatgatgagccagggacagtcatttggctcttttttattcrttgttaaaagtaaggtcaataagaaatgattcaccagggctgtggttgtgaagaagaccgagacccgcgatgggaagctggtgtccgagtcctctgacgtcctgcccaagtcaacagctgcggcagcccctcccagcctgcccctcctgcggctgccccagatcctgggagggaggccgttgtgcagaggagcacagggaagaggagacccacctgaggctcagccctagcccctcagcccacccacgggagagtttactgactggggaccgcacttgcccatgcctccagctacaaaacaattcaattgcttttttttttggtccaaaataaaacctcagctagctttaacacacacacacacacacaaagaaaaataaaaagaaatttttttttaaagcagtacaaaaacaaatactgaaagctcttgtttttgtagttttgtaaacacatagataggttgacttagagttcttgccagaaaaattataaatcaaatatataacacataactgatcagatgcacaggatgatattgagaataacctgaacacacaggtgtgaagcctgggaatgaatactattaagaagttaggtagggtttaggcaccaaatactgtaaattgacagatgtacaagaagggccaagacacttcgaaaaagtgaatcaacttttgaaagtattaattcagagaacttaaggaagagctcctggagccaaaggatatcagtggaaacttgtaattatatagtgaatgaaataatgtagaaatatttctgtgccactgggataagagatgaacacaaaagatgtttttaaaagtcaaatttaccgagaaataacttatatataccatattaaattcactcctttaaagtttacagtttgatgagttctgacaaccatatacagttatagaaccatcaccgccacaatcaaatagaatatccccaacatgctaaaaagtttctttgtgcccttctgcagtcaactgattacatcaactgttggcatctggcaactaccaatctgttttttgtccctgtatttttgtcctttcaaaaatgttatataaatggaatcatatagtgtgtacttatttatgtctgattctcactcagcaaaacgcttttgatattcgttcatgtcattgcatgtatacttggttcattctttcttcttgcataacatgtgatggtattcttgtgccacagattgtttatccattcacttgtagatgaaaatttgagttgtttctagtttctgactacagtagtcccctcttatccatggtttcacttttagcagtttcagctacccatggttcaaaaatatgacacaaaataagatattttgcgagagagaatgagtgagcacattcacataacttttattgcaatatattgctaaaatcattctattttattatgttattgttgttaatctcttactgtgcctaatttataaactttattatatgtgtgttgaataggaaaaagcatagtatatatagggtttggtactatcccaggtttcaagtatccactgggggtcttggaacatatcccccaaggattggggggatgactgtcttatgagtaaggccaccatgaatgtttgcatacaggtatctatatggacataagtgtttatttctcttggctaaatacctaaggagtggaattgctgagctatagagtgggtatatgtttaactttataagacacttccaagcttttctctaaagtggctgtaccagtttacgtttttgctagcaatgtgtgagatttccagttgtttctcatctttgctagctccagtatttataatctttcaaattttagccattctagcatgtgtggaggagtacatattttggctttaatttgcatttctctagtgactaatgatgttgaacatttttcatgtgcttatttgccatgtatatattttctttggtaagatgtcttttcaattttttttttgcccatttaaagagttgagttgtttttcatttaattattgagttctaagggttctttttatttcctggatacaagacctttgtcatatgtagattttcaaaatactttgtccccgtctatggtttgtattttcacgaagtttgaattttcatgaagtccagtttatcaactttttcgtttatggatcatgcttttggtgttgcatctaagaagactttgccaaggttacaatgatttttttcctatgttttcttctagaagtttaatagctttaggtcctacctttagctctgtgatccatttcaagtaagtttttgtatgtgatgtgaagaaagggccaacattccctccctgcctcccttcctccctgcctaacttcctgactttcttcccttccttccttccttctttcttccctccctccctccctcctttttctctttcttccttccttttctctctctctcttttttttttgttttagtaaaattgctgcaattaattgccttgggaatacatcactttttatttttatatttgtggtagagtcctaaaaactgaattgctgggtcaaagtttaaatacatacatatacatatacatgtattgcatatttgccctccatagggataatgttttaaatatccacaagcaaggtataagagtatttgtttctctgcagccttactaacagtttgttataaaaattttggtatttgccaatctgaaaggtgagaaagaatatctcaatgtattttaatttgcatttctctttttttttttttttgagacggagtcttgctctgtcgcccaggctggagtgcagtggcgcgatcttggctcactgcaagctctgcctcccgggttcaagccattctcctgtctcagcctctcgaatagctgggactacaggcacccaccaccatgcctggctaatattttgtatttttagtagagatggggtttcactgtgttagccaggatggtctcgatctcctgacctcatgatccaccgcctcggcctcccaaagtgttgggattacagtcatgagccactgcgcccggacttaattcgcatttctcttattatgaatgaggttgggaggctttttacatggttaagtttacatatttttccatgaatgagaaattgcattcaacctcaaatagtatctattaatctcttgctatgaaagatgagtgaagatgagtgtttgtggcttttccatcttttctttttttgctgtgtaattccacagcaaattgctagtctgcccaccatgtccccaaatgtgttctcagtccatgtgtatgggatacttctaatgttactaatgttttgttgcttgcttccatttgtttcttgaattctaaattgttggggagaagcaggagggtggtgttttgaagccaggggagaaaagtcatctatttcctatagagaggatatttaacatgtgtaataagaaacagttaagtagggttaataggtatttagctagtgttcctggagaaactttaagaaaatattgataaataatgaacttggatggttagatttaaagattctagcagagactttttaaaattctcttcaaggattatgacagaatggaaaactaggagacacagaagaagctgaaattccccagttacatactatttgttttcctaagtgtatttattgatttacagaaaaatgaatatagtgtttttcaaggactttggtttcattttatttattctgataagcaggcttttatttatttctagctgaacagagaacaaagaagaaatgggaattttttggcttcacattgaggttgatgagaattctactacctttgccattctctttttgttctctgctttttaaaaatatcagaccttacgagaattcatatacagttgagctgttttacaatawtatggaatgggatggacccataggctcactggacttgcagcaacagaagcctctgtcactttcaaagtgtatgtgaagggcacattacttctgccgtggttgcttaaagttgatgccttgtagctgaaggttattcttgttctggtgattcagtgaaagcttttctgttgtctcatatattagattagcttcttctttgacttcaatttgactaatttagttctatggcttttaaaaaatatgtaggtaaccttcatgctgggcttatataagatgggtctccattttggcatactttttatatggtacaaaatgtccttaagtagaaggcattgctacatagagtaactgaccatggggcatttctgttctttctctgtagctgcaattttgaaaatgtgtgccattgtggtgagcttttagtatgaactgacatgttataaaataactaaatggtatgttgtcagggtcataaagtcatcttgtggaattctcatgtacaatattacttttcaggtaagtcagaaattgaattatgactttttgctttttttaagagggagattagatttgaccagctattcatgatcagaaggacattgtaagacctaaatataagtagaatctgttgttttcctttgttttcatatttcatattggttaaagtaatttttttttttaccttttttgctgctttcattttggttgtatgtgtgaggaaacatgtttaattttggttgctctggctagagtaaacacattttttaatttaattaattttgtttgaatcttttcataaagaattcataaaactcatcatttttgggggaggctcaatttgatcatttttcaaaaacatcaataagatggctatctaaaggtttaataaagagaacttcaaatactcaagcttataaagtttgaattacaacatgctaatgatatttaccttttgttctaaaatgtaatattgttttgttctgttgaaattcagagattttggatgctaaggaaataaaaagtacagactcttggagttccccacacttagtgcatctaacagttgtagccctaaccctggggcataccttttatgtaccactctggaattgatttcaaagggctcaagatcctttaggaggctgttgtgcattaggaatgtgtttgtttgttttttttaagacagtactttaggcatgttgcatttctaattagtgcacatgtaggaaatatgccttattgattttgaagtcaagaaatccaataaaatgaggccaccggagggaagctttgttttaaagtcttttgttatgaaaacaatcaatgaaagcactcttgaataataattatgaggtctatagatgagggagaggtttaatctgaatgtagacaagtagattctgttctttcacttaaaaggggataatgatatcaactaatgtttgttgagcccctgccaggtgtcagagatattggctaagttaatggattttatatrgattttcttaggtaatctttaagatccttttgaggtaggtactcttattattctcattttatggattaggaaactgatgttcaggaaagatcagtaatttatctaaagtcaccagcgagcagggaacagagcctggattctcacccaggcagtccaactttaaagctgatgctgataatcactgaggcccaatagtggtgagaggtaagagaatttaagaactctttagcagacggtgggggttgcagggtgaagcgaaaggatgtctcacatgggctgctgcatattaccctgctaagggtctgagtggagatgaaatctagccctccctctgctgggcaaactgtgggcctttctgctaacacttgcagggctgtgtctactcagagagtggcacagttttcttttttttcttgtcttgwcttttttttttttttttttttttgagatggaatttcactgttgttgcccaggctggagtgcaatggcgtgatctcagctcactgcaacctccgcctcccaggttcaagtgattctcctgcctcagcctcccgagtagctgggattacaggcgcccaccacaattcccggctaatattttaaatttttattagagacaggatttcactatgttggccaggctggtctcgaactcctgacctcaggtgatccacctgccttggcctctcaaagtgctggaattacaggtgtgagccaccgtgcctggtcagttttctaatccatctgtccagaaggggcatatttttttaattcacctgaaggcaaatctcaattctacagtcatactctgaatatcactgcctgtatttccattcacttgcaatagtggacttcaacctacctctttctagtctacatgcttccttggtagtctcattgtatctacctttatgctgacaactccaaaagttatattttcatttcagatttctctttcaaaccctgctcttgtatatctaactgcctactttacatcttcactttgatgttaatatgcacctcaaatttatcatgtccccagctggactcttcttcttcctgctcctcttgcagccattcccacctcagttaatggcaactctatccttccagttgctccagatcgaaaaacttaaagatatcttgagttctctctagcctatgtttaatctttcatgaattcctgttgtctcaattgtcaaactatatctacaatctgaaccctgtgtccacttctgctaccaccaaccagttctaagccattattttatctcatctaggttactatgggaactcccaatggctgtccctattttttcttttgcccttcgtacttcgttctattcaccagagtgattcctctaaataaaacagttgatgttttagtgctcaaacatctgcaatagttcttatgatctgcagcctccatacmtttctgactttctctcttactatgctctttgtagctcactctgccctgcttacactggcctccttgctgttctgccactgcttttctgccttaggcttctgttgtgatgttacttctgcctgcagtgctcttcccccggctgtctgcttggctaattttcttgcctcttcgagtcttgctcagatgtccccttctcaatgaggctagtcttgaccttatttaatactgaaatctgctctgaacttccctatcacccagccctgcctactctattctgctttttcttttttaaaatggcatatgttattttctaatatacgaaatcatttactatttattatctttattgtttatggtcacactctcctcgtgattggcacagagtagatagtcagtaaatataagttgaaagaatgaataaatgaatgatgccctatagtctagggatacgtctgatctcacatcattttgctcttatagcctaccaaaaagctaggtgggagagtttatatagattattgccctctatgtaaacacatcaaaaatatttgtaaagtccaggaagagcatttgaaaagaatgagacccaactattccttcatcacttacgatatcaggcagtttcttgattttattgatctgacaaacctcagatccttttgtttaccaagagagtagaaggtgtatgtatttctttcttggtaggccaaacataccagcaaattattgcactggaaacatggaggtggggcttggaaaaccagtgtgtatagaaattgtagtggaagttttatattacagttgtcttctttccattttatttcactctagccaagactcaattgtataaaatcagctatgataatattgtatggcaaacttcccttgcctcsttttcctttacttaaatcttcttgtgatgatttagattttttttttcagttaacatctggtttcaatccttcacattattcctgactatattatactaatttttctgaggcatggtgatgggggagagcgaggcttataaagttcagttatgcattcaagataaatttttttttttttttttttgagacggagtctcgctctgtttcacgatcttctaatcttggctcactgcagcctctgcctcctaggttccagcaattctcctgtctcagcctcctgagtagctgggattacaggcacatgccaccatgcctgtctaatttttgtatttttagtagagatggggtttcaccatgttggccaggctggtcctgaactcctgacctcaggagattgtagtggaaggctggcctctgcctcccaaagtgctgggattacaggcatgagccaccgcacgcgacctcaagataaattcttaatgaaaatttttaaaatactcttttataacattatttcagtacttgacagtctttcactagttgctgatcctttcttctgatattttgggagacaggtattaggcaaaggttaacatttgtgatgatggtggggattggcacctactattaatacaaatatttctcttttatatttaactaaatagagtttcactaaatgagatccactgtgaatccatgaagcccaaagatacttttggtggaagacttgttgacatgatcagaatagtttaaacttgaggaagagacacttatttccagataaaaccatcaaacatatatgaatgtgcacacctgtgtgtatgtgttagtgttatgacaataatcagggcatagaaagaaccatgttaatagagatgatgtatagtacttatcaggagaaaacatgggagaaggtcgataataaataagaatagttacctgggagaacacaaattaaatataatcacagatatactaataaatcatgaatgttttttatttctgtgttttcgactatttaacctttaattatttactcatgaatggaattttgaatgttcacaaaataattttaataaaagaggtagagaaatacacatatagtgaatgcacactcttgcatggaaatcagaagcttaaggaaagaataataacagagagcatttggatggaggaaagagaagtaagagaagagatattgtcacacagcttaatacttcagtaactttactggtccagatttaaaaaactattacagtaacagatgacacattctaaaaattttaagaaaccttctcttagaagtggaataacagccaggtgtggtggtgcgygcctgtggtcccagctacttgagaggctgagtgggaggattgcttgggcctgggaggtggaggttgcagtggtgagctgtgatcacgccactggcactccagcttgggcaacagagtgaccckgcytccaaaaaaaaaaaaaagtggaataacatgacttttcaccttaactctttggcaattatatatcttggcatattgaggaaacaatgaaagaagcaaatctgaccacttggtgatatggagtgctagaaagtctgggcaggcctatctttaacgtttgtattgggaagtgtgagggtacagacggaggcctgcacaccatatgcctatgtgtataagttacaattctatgtaataggctgctaaagtaggctctactcgccaatctttctactttgagaaatataccttcaaataacccagaaggcaagattggttttagaatccttgggttccttttagaaggaggtggtggaggtggagctcacctctgtgtccctgacacatggcctgttctcttctcttcccacttctggctgtcttgcacttgaggggccttgagtgcctgcaagttgacagcccagcctgtacacccaaactcaatctgcactcattggcaaacagctgccttttggctacctctcaggtatagggttgggcacattgaatggttcagtcttggaaggatggattccacgaagaggccaacataggcactggaagtgggtttgcactcgttgagcagggagttgagacactggctaccctgggtaggataggatagaatagatgtgggctctgggtgggtgcatcatcttggccccatggacacttccaaagcatgaggatagggggtggggaagcttttgcccagggttatagagaaagtggccatttatttgggtgataatcccaaataagataatgttagacatgcctcctagactttaagagaagtaaatttcaacaatttcagattaacacgaaatatgattccaagggactatatatgacataaaaggaatgtgataaattaaacatgaagaaagaagatgcatagttggtagggcctgggctttactacattttctttcactggaacctaagattgtggctgatgtgtttaagtcctccataaatagttgttgaacaacaacataaacaaccccaaactccaatgtatctgtgtaggggtacaaatttgaaagaatatgaattaaagatgagaagagggacatatgtagtttggatatttgtcyccacccaagtttcatgtagaattgtgattcccagtgttggaggtggggtctggtgtggagtgattggactttgggggcggatttctcatgatggcttagcaccagcctcttggtgttgtcctcatgatagtgagtgagttcttgagagatctggctgtttaaaagtgtgtggcacctctctctctttctctcttgctcctgttctcaccatgtgagatgcttgctccccaccttgccttctgccatgagtaaaagctccctgaggcctccctagaagctgagcagatgccagcaccatgctttctgtatagcctgcagaaccatgagccaattaaatatcttttctttataaattacccaatctcaggtatttcttatagcaatacaagaatagcttaatacagggacacctgactgaaggcaaataaaagagaatggcagaaactaggaaaagtaaagttgggaaggctaaagcacttctcatttgctaggtctggcaggacatgctgaaggtaagaaaaacaaaaacaggaaggaatagatcctctacattagtcacatgataagggattaatagatgacttatgatacatctaaactatgatgtcaaattggcaagggtggaacaaagattaagggaattgaattgagtagaaaaacaaaaatgttataattcgtattaaatatataaatccatatgttctggtattatgtatgatatctctggaactataagagtaagtgcccaaagtagttgcctctgggagggaaattaggtggtaggaagacagggatgagagagagagagacttggtttcactatatacattattaaaccttgtattacctaataaaatgtttaattaattaaacaataattgaaactctagatgatgaaagtaaagaagatagcctagtctctttaaattagttgaagtacatacatccaaaaggagtatatccctgaaccctaaaatgatctttagatgtgataacagaaactttcttgggaatccctgagaaatggyagacctgccagaaagcagagtgctctggagtgaatgtttgtatcttccccacctgccactgcaaatccatgtgttgaaatcctaactcccagggtgatgatattagaatggtggagcctttgggagctaattaggccatgagtgtatagtcctcatcaataggattagtgtccttataagaagagacatgatgtgttctgctatctgccatgygaagatacagagagaaggcagccatctgcagaccagaaagctggccctcaccagacaccagatgggccagtaccttgaactaggacttcccagcctccagaactgtgagaagtaaatgtttgtcgtttaagccacccagtctatgatatatttgttatagcaccatgaactaatacatagagaagagcaaatattcttattttcaacataggtaaaaagatgatctctttaattagactggacatctaggtgccaatctgtaggaaaactaaaaacctaatttgtaaataaagggcagtaattactagcagtcagcatgaattcttcacgaacaagtcatgccaaactataaatatatattttttgagctcttaaacaggaaggtgtagaaagggtgtttctatttcattaaaacattgggaaaagcctcttcatgatatatctatatttttgacgaaatgaaaaaggtagattatttcacacaacagtgtttaataatattgaaaatcatgtctaaagtgtttattaattgatcattacatatctggaaagagatttgtaacagtatcaaaattaggttttatgtctggccttcacctgtttaatgacttaatagggaattctagaattcatactggacaaattaatggataaacagggaaatgggagggggtgttaatgtgttgggttctcccaaaccaatttttgactagcaggaataaaagtccatattctacaggataaggtgttaggaagacaaaataaaattctgcatttaggagtaaataaaaatcatttgtttaaagatgtgatgagagacttgagtttgcaataatctttgaaataaaaaagacttaaacattttagttgaaaagtgagtataaagttagactaattaggtaagtatgatgactgtgtcatggartttaataagcttaaaggagaatcagccatcaccttacaaactaattgtgttacaaaagttaatctttttttttttaaattaaatatttgatattagggaattttctataggaaccacattacagatggttaggtttccaagccatcccacaagaacatgacaacttatstaaaagaattgtagttttactaagaggagcctgagctctagagtgggtggtgaagagtggggaggcagtgggggagkgggtggtggttatgtgttactgtagggaggagaagtaggtgccaaatgttttctgtttaatatttgtgagggaatggcaacccttaggcaaattttggaaatgaatagttttccactggcctctctgtgcatctctctgatcttccatcatccctctcctttgctgccagggcacgatgaaaacacaacgtggttcgtgctgtaatagagacgtgcacagggtgtcaaatggcaagcaatgagctagttcatactaatgtgtgactgaatgtgtgcaccccatgacctctcagaattaactgcatttagaaatgaaatgtgtgttaaaccaaatgaacttaaaattgatataaaatgataaaagttcagtttccagcagggaataaagtggaatgaagaaaattgagtcattgcagacaaagatagtttggggagaagggaaggatccatatggttgggtttgccctgccttggtgtctttctctggagacatctatcaccactgtcaagagatttgttctccttcctttrattctgaaaactggaattttgttatagtctctctccaaatctgtacttttcttactttatttataaagcgtactttttcccctttattaagccatctcttttggataaaagtttaaaagtggcaggtttcaactcaacgagcatctaatggtatagtaagcttctcatcatttctattcatccaagcccagtgtgttggtgaaatgaaggttgtgtagaaggtattcttgaatcgtttgggaggtactgcctaactcctaagattttatagattacaaaatgcaaatgccggccagggtggtggctcacgcctgtaatcctagcactttgggagggtgaggcgggcggatcacctgaggtcaggagttcaagaccagcgtgaccaacatggagaaaccctgtctctactaaacatacaaaattagccaggcgtggaggtgcatgcctgtaatcccagctacttgggaggctgaggcaggagaatcacttgaacttgggaggcggaggttgtggtgagccgagatcaggccattgtactccagcctgggcaacaagagcaaaactcagtctcaaaaataaaacaaaataaaatgcaaatgcctcagaatgtaatacttacaacctagtaggatttttgttttggatttgcgttgtggtattgctatatctacaaatttgtcagattttgactttgcttcaatttcatttgcaaaattatgcagttttctgcctatgatagccctaatttccaatcagtcaggaatactgaccaggacatacaaaagagcaggaagactttttaaaaataagaaatagcatttatttaaagattaataattatatgaagccaagttctttaaggatttattttttttaagtaatttttaccatggaaaaatgaacttttgaaaaacttttacttaatttgtgttaaagacatgaacacagacttaaaagatactttggctaaattaggttgtcttttatctcttggctaaaaagcactccttttagaaagctccttctaggttgaaaaattcttctagaaggatttacatatgatatggataatttttgctctccttaattttttrtcttccttactttcaatttctggtggccatgtagctttggaaaccagtcgtgaatttcacggtgaaaatgacatgtttttaaaggctgcgaaggttcaccaaattttattttagttcacaacagtctcctctacttttgtccttcagatgaaagaacaaagcaatggcagaaatcttgacttgatttttatgtaggatagtacctgtcgtagaggagtaacaaataaattcttttgtgagcacttatttgatagaaccctaaggctatacactgaaggacatatcctrttgcacagattggctctgggctatgcagaaaggtcaccacaggaataggctatctgtcaatttagatttccctgtgttagaaggaatcaaagtggtaggtgaaatgattgaaaaagcaaaatcaaaaccaaaccaaactaaaacatttcagttctagaaatgcatttgagagaaaccatttggcaatagtgtttggagcctttcttgaagcgtgtctcttacattgcagctgaatcgctgagaaaagagaccatgtttctacttttagaaggagaatgaaatcaacgcaaaggagagagaaacaaggtaaaacagggctaaattgtagggctttgactttatatgttgatgtatcatatgccaataacagtaatttgaaactttgatttgagaagaaactcaagtaatatcttttcacttaatagaatttgaataattattttttcaaggcaaaatctttcaaaaagtaaaggaattgtagccaccctgtaartggcttgtgatagagttaagcacagactaggaacaaggacacacttggcaggtttgaaggggcaaatggggccctgggcaggccatttgggttattttcaataagagaaagagaactatctagaaatgtgctacatttcaggaagtgtgctctctctttgcaatcaacgatgccagtgggtttcatctaaaattcttaacacttactgtagtttttagtagattaataaataatatattatagctatttgaaaatatggctagagtttttgaacgttaatccgactatgacatgccacatatggtcatttggtataaatgtatattgttaggcaaaaatctcactgaattgatttttaaggataacgttaatgccttagagaatggcttgcaattcttttttttcttcttattttgtcttgaccaaatatcaatgccttctcaggggcttctctctttttacaacaactgtgcaatttgtattagtttcttttcctgtccaagaaggtaaattgcctttaaccttctccaatcaaaaccctcaaataaacaatctctaaatcaagtaaggacatatctttacttgttcccatgtctttcaaaggtttacttgttccttgtctaagtcatcattaacaagaagaagcaaaatatgggcataggctgcctcagtgctgtgatttcacagaagccaaaggacttgaatgctgtaagatgtgtcttacctttctgatcacttaagactactgatcaaatacaaacccaccccggatgagttgttaatttaatcatgaacatacttgtgtagattaatttgttacaggacctaagcccaggcagcatgacctcagggaacagttggggaatatcttctttctctgaaggtagaytttgtagcctggtcctctgagggctatggttgatatcaggaagaggtgctgaatacaagttttacctattccatgatttcataagtgttcttctttagaaaacagttttctttattaataagcatccttttgtgtttgtgcacaggcagcatgtcagctgaaacaccaatcacattgaatatygatcctcaggatctgcaggtccaaacattcaccgtggagaagctactggagcctctcataatccaggtattaataccatggaaattatgatatatagtaactgcagaagaatgaaaaatatgtgggaaaaatgaataatgaagaataaaagatttgatttttatatataaatatgtcatctaaaattgtcctttaaagagttgttaagatgtgaaaagtaggtatgtgtgttgttaagatgtgaaaaagtatgtattctgaaagtttcccccacattctcttttagcaagaatagcagtaataatatatatatatatatatatatatatataattttcagagtacctttatataaattatcttctttgataatcgtgaaaactgaatgaggcaggtaacatggttaaaaccatctttattacatagatgaggaaactgaggcctagagaatttcactaacttgcctcaggcacatggcatctcatttgccaaatgggaaactacctttaaaatactaaaatgtatgagaaaagcagctatttaaaggaattctgtgatgaagtctttcataaggtgaataatcctttgatgatatgcataatgattctctgactttttttattatgtaagtcgagatttcatgtattggattttcttagagcagggcttgaagaaacttatgcagtggtatagatttaaatttttgtcattaacccacaatttgtgagggaactcccctttaggcctgccttacatcttgcctcctaatacaagattcaagtcccttttcctagggactcaaagaacccaagggttacttgggtgaaaaactatgccgacctttcctcagataatttaaatatgttctgcttatcttttttgtgagatggatgtggggaggggagtagctctgagaatagactttgtatatatttttacaagtttacatatttttatcaatttgtacatgttgtacaagttgatatctgctactcgaaagacaattcaaaacatgtgcatccctgatgataccttaatagttaactttggcagtcttaacggcactaatatctggtgtgaaatttatactagatgactgtggagacttcattaaagtccgtcttagccactcactaaacagtttcatgttaaaaagaaaaaaggctgggtgcagtggctcatgtgtataatcccagcactttgggaggccaaggcaggaggatcgcttaagtccaggagttaaagaccagcctgggcaacatagtgagaccctgtttaaaaaaaaaaaaaaagaaagaaaaaccctcatttgtttttctaatgaagttcacaaaaaaattggaatgtcaaaaaaagttaaaaaaaagaataaaaacactcataattttaccaagagataaacattaatgttttggtgcgtttacttccagtacaataaagttgtgggagatttttatcatctttgtactttgtaatattaaagaatatatcttctttatatatatccttacaygtatatatattatatatatatatatgaagaatatatatatattaacaagtggagctagtactatatatgcagggtttaatcccacttttccattttaaatgatattttaataatttccctatttatttgtaagcatggtttaataaagctgctatttacttatatatgatatggctgcactacagtttttttaaagtagcctcacatttttggacatttagggtgtttctatttttttcctattataaatattgctctgctgaacatctttgtatatacatttttgtcatcaatttgtattatttcactagaattagttacaaatgtaaaagttaatggccaagatatgaatatttttatactttttcatacatatcaccaagttttttggggacagttttaaatgagttctcacaagtcatttaaggttttgttcctatccaattataaggagtaggaatagggaaatgaccttcatttcrgagatggctggtgaaaacaaatacattaatgctagtttataacccttatttgctctataacaatggaacattacagttggtcacttaaaacttgctaatcacaaaggttgctgacatattgcttataaacagagagagtatcatggggaaactactttttatattctaactgaaactaatagatattttgctttagtcaagtacattgctaaagaagttaatagaaagtattctaagtaaattcacattaaagggtaatgctagtcacagtgtgtgtgtgtgtgtgtgtgcgcgcacgtgcacattttatggcatgttctaaatagataataaccatctataaacatttattgagttcacctataaaattagaaggatgaaaatgacctgagtaatcttgtttgattggaaagaaatgtatctcttttaaaaagtgtgattatactagttttagagggcttttgatgttcttggattcaaacttttcatgatccacaagtagatgagtcacagaaatggaactcattaccttttacataccagacagttctgttacatgtaaatataattgctaattttgtcttccttaagattgatgtcaatgttttcaaaatagtcactgatttcttaaaagtactttggtataaaacatcaacgtctcaggtataaaaatgattttatggtcttagcaatactcaagtgatattaaattaaaatattaataatttatataatatcaacttatgcaataactatcttataaagcagaattctatttaactaaattatttgtatacactcttgtttttttaataatgggattctccttatcaaaaaccagtacatttcaaagtcaaagagttatattttaaaataactgatctttctggatttgatgttcagccttcttgtatctgtcactttgatcatgtataacccaccaacacaaataaaatatctcattaaattatattaaaggtttttttttctaggataacatcatgttaagtgtctcattacattcttttttgtttttcaaaaagtgtttatttttatttttttagataagaatagctgtttaaaatttacaagaaaaaacaaacaactccatcaaaaagcggacgaaggataggaacagacacttctcaaaagaagacatttatgtggccaacaaacatatgaaaaaaagctcatcatcactggtcattagagaaatgcaaatcaaaaccacaatgagataccatctcacgccagttagaatggtgatcattaaaaagtcaggaaacaacagatgctggagaggacatggagaaataggaatgcttttacactgttggtgggagtgtaaattagttcaaccattgtggaaggcaatgtggcaattcctcaaggatctagaaccagaaataccatttgacccagccatcttgttactgggtatatatccaaaggattataaatcattctactataaatacacatgcacacgtatgtttatgggagcactattcacaatagcaaagacttggaaccaacccagatgcccatcaatgatagactggataaagaaaatgtggcacatatacaccattgaatactatgcagccataaaaaaggatgagttcatgtcctttgcagggacatggatgaagctggaaaccatcattttcagcaaactaacacaagaagagaaaaccaagcgccacatattctcactcataagtggaagttgaacaatgagaacacatggacacagggaggggaacatcacatactggggcctgttgggaggtgggggctaggggagggatagcattaggagaaatacctaatgtagatgatgggttgatggatgcagcaaaccaccatggcatgtgtatacctatgtaacaaacctgcacgttctgcatatgtatcccagaacttaaggtataataaaagaaaaaaaaagagtaacctgtttatttgaaaagactaagtagacctcagtatttatttttcatcaacttttattttaagttcaggagtacatgtgcaggatgtgcaggtttgttacataggtaaacacgtgccatggtggttggctgcacagatcatcccatcacctaggtattaagcccagcgtccattagctattcttcctgatgctctccctcctcccacccctgctgacagaccccagtgtgttccccccatgagtccatgtgttctcatccttcagctcccacttataagtgagaacatgtggtgtttggttttctgttcctgcattagtttgctgaggataatgacttccaaytccatccatgtccctacaaaggacgtgaacttgttcttttttatgactgcatagtattccatggtatatatgtaccacattttctttatccagtctatcactgatgggcgtttaggttgattccatgtctttgctattgtgaatagtgctgcagtgaacatgcatgtgcatgtatctttataatggaatgatatatattcctttgggtatatacccagtaatgggattgctgagtcaaatggtatttctgcatctaggtctttgagaaatcgccacgctgtcttccacaatgtttgaactaatttacatacccaccaacaatgtaaaagcattcctttttctctgcaaccttgtcagcatctgttgttttttgactttttaataagcattctgacaatgagatggtagctcattgtcattttgatttgcatttctccgatgatcagtgatgttgaactttttttttttgagacagagtcttgctctgtcacccaggctggagtgcagtggcatgatctcagctcactgcaacctctacctgctgggtttcagtgattctcctgcatcagcttcctggtagctggatttacaggcacatgccaccatacccggttaatttttgtattcttagtagacacggggtttcaccatgttggctaggctggtctcgaactcctgacctcaggtgatccacctgcctcagtctcccaaagtgctgggattgcaggcatgagccaccgcacccagctgataaactttttttcatgtttattggccgcatgtatgtcttcttttgagaagtgtctgttcatgtcttttgcccactttttaatgttttttttttcttgtaaatttgtttaagttccttgtagactctggatattagacctttgccagatgaatagattgcaaaaattttctcccattctgtaggttgtctgttcactctgatgataatttcttttgctgtgaggaaactctttagtttaattagaacccatttgtctgtttttgcttttgctgcaattgcttttggcattttcatcatgaaatctttgcctttgcctatgtcctgaatgctattgcctcaattttcttctagggtttttatagttttgggttttacatttaaatatttaatccatcttgggttttttaattattattattgtttttttatttgctttaagttttagagtacatgtgcacaatgtgcaggtttgttacatatgtatacatgtgccatgttggtgtgctgcacccattaacttgtcatttacattaggtatacctcctaatgctatcactccccgctcccggctaccccacgacaggcccaggtgtgtgatgttccccttcctgtgtccaagtgttctcattgttcaattcccacctatgagtgagaacacgtggtgtttggttttttgtccttgcgatagtttgctgagaatgatggtttccagcttcatccatgtccctacaaaggacatgaactcatcattttttatggctgcatactattccatggtgtatatgtgccacattttcttaatccagtctatcattgttggacatttgggttggttccaagtctttgctattgtgaatagtgctgcagtaaacatacgtgtgcatgtgtctttatagtagcatgatttataatcctttgggtatatacccagtaatgggatggctgggtcaaatggtatttctagttctagacccctgaggaatcaccacactgacctccacaatggttgaagtagtttacagtcccaccaatagtgtaaaagtgttcctatttctccacatcctctctagcacctgttttttcctgactttttaatgattgccattctaactggtgtgagatggtatctcattgtggttttgatttgcatttctctgatggccagtgatgatgagcattttttcatgtgtcttttggctgcataaatgtcttcttttgagaagtgtctgttcatatcctttgcccactttttgatggggttgtttgttttttttcttgtaaatttgttggagttctttgcagattctggatattagccctttgtcagatgactagattgcaaaaattttctcccattctgtaggttgcctattcactctgatggtagtttcttttgctgtgcggaagctctttagtttaattagatcccatttgtcaattttggcttttgttgccattgcttttggtgttttagacatgaagtccttgcccatgcctatgtcctgaatggtattgcctaggttttcttctagggtttttatggttttgggtctaacatttaagtctttaatccttcttgaattaatttttgtataaggtgtaaggaagggatccagtttcagctttctatatatggctagccagttttcccagcaccatttattaaatagggaatcgtttccccatttcttgtttttgtcaggtttgtcaaagatcagatggttgtacttgtgtggcattatttctgagggctctgttctgttccattggtcgatatctctgttttggtaccagtaccatgctgttttggttactgtagtcttgtagtatagtttgaagtcaggtagtgtgatgcctccagctttgttcttttggcttaggattgacttggcaatgcaggctcttttttggttccatatgaactttaaagtagtttttcccaattctgtgaagaaagtcattggtagcttgatggggatggcattgaatatataaattaccttgggcagtatggccattttcatgatattgattcttcctatccatgagcatggaatgttcttccatttgtttgtatcctcttttatttcattgagcagtggtttgtagttctccttgaagagatccttcacatcccttgtaagttggattcctaggtattttattctctttgaagcaattgtgaatgggagttcactcatgatttggctctctgtttgtttgttattggtgtataagaatgcttgtgatttttgcacattgattttgtatcctgagactttgctgtagttgcttatgagcttaaggatattttgggctgagacaatggggttttctagatatacaatcatgccatctgcaaacagggacagtttgacttcctgttttcctaattgaataccctttatttccttctgcctgattgccctggccagaacttccaacactatgttgaataggagtggtgagagagggcatccctgacttgtgccagttttcaaatggaattcttccagtttttgcccattcagtatgatattggctgtcggttggtcataaatagctcttattatgttgagatatgtcccatcaatacgtaatttattgagagtttttagcatgaagggctgttgaattttgtgaaaggccttttctgcatctattgagataatcatgtggtttttgtcgttggttctgtttatatgctgaattacatttattgatttgtgtatgttgaaccagccttgcatcccagggatgaagcccactagatcatggtggataaggtttttgatgtgttgctggattcggtttgccagtattttattgaggatttttgcatcgatgttcatgagagatattggtctaaaattctctttgtttgttatgtctctgccaggctttggtatcaggatgatgctggcctcataaaatgagttagggaggattccctctttttctgttgattggaatagtttcagaaggaatggtaccagctcctcctcatacctctggtagaattcggctgtgaatctgtctggtcctggactttttttggttggtaagctattaattattgcctcaatttcagggccttttattggtctattcagagattcaacttcttcctggtttagtcttgggagggtgtatgtgtcgaggaatttatccatttctttgagattttctagtttatttgcatacaggtgtttatagtattctctgatggtagtttgtatttctgtgggattggcggtgatatcccctttatcattttttattgggtctatttgattcttctttttcttctttattagtcttgctagcagtctattaattttgttgaccttttcaaaaaaccagctcctggattcattaattttttgaagggttttttatgtgtctatttccttcagttctgctctgatcttacttatttcttgctttctgctagcttttgaatgtgtttgctcttgcttctctagttcttttaattgtgatgttagggtgtcaattttagatctttcctgctttctcttgtgggcatttagtgctataaatttccctctacacactgctttaaatgtgtcgcagagattctggtatgttgtatcttgttctcattggtttcaaagaacatctttatttctgccttcattttgttatgtacccagtagtcattcaggagcaggttgttcagtttccatgtagttgagtggttttgagtgagtttcttaatcctgagttctagtttgattgcactgtggtctgagagacagtttgttatgatttctgttcttttacatttgctgaggagtgctttacttccaactatgtggtcaattttgtaataagtgcagtgcggtgctgagaagaatgtatattctgttgatttggggtggagagctctgtagatgtctattaggtcctcttggtgcagagctgagttcaattcctggatatccttgttaactttctgtctcactgatctgtctaatgttgacagtggggtgttaaagtctcccattattattgtgtgggagtctaagtctctttataggtctctaaggacttgctttatgaatctgggtgctcctgtattgggtgcatatatatttagaaagctcttcttgttgaattgatccctttaccattatgtaatggccttctttgtctgttttgatctttgttggtttaaagtctgtcttatcagagactaggattgcaacccctgcctttttttgttttccatttgcttggtagatcttcctccatccctttattttgagcctatgtgtgtctctgcacgtgagatgggtttcctgaatgcagcacactgatgggtcttgactctttatccaatttgccagtctgtgtcttttaattggagtgtttagcccatttacatttaaggttaatattgttatgtgtgaatttgatcctgtcattatgatgttagctggttattttgctcattagttgatgcagttacttcctagccttgatggtctttacaatttggcatgtttttgcagtggctggtaccagttgttccttcccatgtttagtgcttccttcaggagctcttttaggcaggcctgttggtgacaaaatctctcagcatttgcttgtctgtaaagtgttttatttctccttcacttatgaagtttagtttggctggatatgaaattctgggttaaaaattcttttctttaagaatgttgaatattggcccccactctcttctggcttgtagagtttctgccgagagatcagctattagtctgatgggcttccctttgtgggtaacccgacctttctctctggctgcccttaccattttttccttcatttcaactttggtgaatctgacaattatgtgtcttggagttgctcttcctgaggaatatctttgtggtattctctgtatttcctgaatttgaatgttggcctgccttgctagattggggaagttcttctggataatatcctgcagagtgttttccaacttggttccattctgcccgtcactttcaggtacacgaatcagacatagatatggtcttttcacatagtctgatatttcttggaggctttgttcatttctttttattcttttttctctaaacttctcttcttgcttcatttcattcatttgatgttccatcactgataccctttcttccagttgatcgaatcagctgccgaagcttgtgcattcgtcacgtagttctagtgtcatggttttcagctccatcaggtcctttaagaacttctctgcgttgggtattctagttagccattcgtttaatcttttttcaaggtttttaacttctttgccatgggttcgaacttcctcctttagctcggagaagtttgatcatctgaagtcttcttctctcaactcatcaaagtcattctccatgcagctttgttacgttgctagtgaggagctgcattcctttggagtaggagaggtgctctgatttttagaattttcagtttttctgctctgttttttccccatctttgtggttttatctacctttggtctttgawgatggtgacgtacagatggggttttsgtgtggatgtcctttccgtttattagttttccttctaacattcaggaccctcagctgcaggtctgttggagtttgctggaggtccactccagaccttgttttcctgggtatcagcagtggagtctgcagaacagcgaatattggtgaacagcaaatgttgctgcctgatctttcctctgggttactttttrtatatggtgtaaggtaggggtccagtttcaattttctgcatgtggctagccagttctcccagcactatttattaaataggaaatcttttccccattgcttgttwttgycaggtttgtcgaagatcagatggttgtaggtttgtggtcttatttctgagttccctattctgttccattggtctacgtgtctgtttttataccagtaccatgctgttttggttactgtagccctgtagtatagtttgaatttgggtagtgtgaagcctccagctttgttctttttgcttaggattgtcttggctatttgagctgttttttggttccaaatacattttaaaatagttttttttctaattctgtgaagaatgtcagtggtagtttaataggaatagcagtgaatctataaattgctttgggcagtatggccattctaacgacattgattcttcctatccatgaggatggaatgattttccgtttgtttgtgtcctctctgatttctttgagcagtgatttgtagttctccttgaagaaggctttcacttcccttgttagctgtgttcttagatcttttattatttttgtagcaatcataattgggagttcattcatgatttggctctctgattgcctattgttcatgtataggaatgctagcaatttttgcacggtgattttatatcctgagactttgctgaagttgcttatcagcttaaggagcttttgggctgatacaatgggctttttctagatataggatcatgtcatctgcaaataaagataatttgactttctctcttcctgcttggatactctttatttctttttcttggccttattgtcctggccagaacttttgatactatgttgaataggagtggtaagagagggcatccttgtcttgtgcgttttcaaggggaatgcttccagcttttgcccatttagtatgatattggctgtgggtttgtcatagatggttatttttttgaggtatattccttcaatacctagtttattgagagtttttaacatgaagggatgttgaattttattgatgtccttttctacgtctattgagataatcatgtggtttttgtctttagttctgtttatgtgatgagtcacatttgttgatttgcatatgttgaaccaaccttgcatcccagggatgaagacaactcgatcatggtggataatttttttgatgttctcttcgattcagtttgccagtatattattgaagatttttgtatcgatgttcatcaaagattttggcctgaagttttatttgtttggttgtatctctgccagattttatcaggatgatgctggcctcatagaatgagttagagaggagtcccttcttttcaattttttgaatagttttagtagaaatgataccagtcctttttgtacctctggtagaattcakctataaatccttctggtcatgggccttttttttggttggtaggctatttattgctgcctcaatttcagaactcattattggtctattcaggcattcagttttttcctggttcagtcttgggagggtgtatgtgtccaggagtttatccatttcttctagattttctagtttatgtgcatagaggtgattatagtattctctgtggtgaatgagaagaatatatattctgttgtttttgggtggagagttctgtagatatctattaggtctacttgatccagagctgagttcaggtcctgaatatctttgttaattttctgtcttgatgatctgtctaatattgtcagtggggtatttaaatttcccaatctaagtatctttataggtttctaaggacttgctttgtgcatctgggtgctcccatattgtgtgtatgtatataggatagttagcttttcttgtcagtttgaaccctttatcattatgtaatgcccttctttgtcttttttgatctttgttgttctaaagtctattttgtcagaaactaggattgcaacctctgctttttttctgttttccatttgcttggtaaattttcctccatccctttattttgagctgatgtgtgtctttgcatgtgagatgggtcacttgaagacagcactgtgatgggtcttggctctttatccaacttgtcattctgtgtcttttaattggaacatttagcccatttacatttaaggttaatcttgttgtgtgaatctgatcttatcatcatgatgctagctggttattttgcagacttgtttatgtagttgcttaatagtgtcactggtctgtgtacttcagtgtgttttttagtggctgataatgctttttcttttccatatttagtgcttcctttaggagctcttgcaaggcagactgaatggtgacaaattccctcagcatttgcctgtctgaaaaggatcttatttcttcttcatttatgaagcttagtatggccagatatgaaattctgggttggaatttttttctttaagaatgttaaatattggcccccaatctcttctgccttgtagggtttccactgagtggtctgctgttagtctgatgggcttccctttgtaggtgacctggcctttctttctggctacacttgacattttttctttcattttaaccttgaagaatctgacgattatttgtcttggggttgatcttctcatggagcatcttactggggttctctgcattccctgaatttatatgttggcctgttttgctaggttggggaagttctcctggatgatatcctgaactgtgttttccaacttggttccatcctccctgtctctttcaggtactccaatcagtcataggtttggtctttttatgtattcctgtagttctcagaggttttgttttttccttttcactcttttttctctaatcttgtcttcctgctctatttcagcaagatagtcttcaagctcacttttaatggggtttttatggggtcttttttgttggtgttgtgttgttttctgtttgtttttcttttaacagtcaggtcactcttctgttgggctgctgtggtttgctgggggtccactccagaccctagttgcctcagttttccttacctggaagtatcaccagtgaaggctgtgaaacaacaaagacagcagcctgctccttcttctggaagctctgtcccagtgggggtactgacatgttgctgttcctaatgtgcctgtaggaagtgtctgtagactcctgttgggagggctcacttggtcaggaggaatgggatcagaagcagtctggatgctttctggtggagcagatatgctgcgttggggcggggagtgrgggatccttcttcatctggaccgtttgtattctccaaagctggcaggctagaatggctgagtccactgaaccacagagatggtgtggcaacccctcctcctgagagctccatcccagggagagatcagggctttgtctgtagagcccttgctggggtggctgaaacccccacagggaggtcccaccctgtgaggaggaatggattggggtcctacttaaagaatcagtctggctataatctggcaaggcagctgtgctattgtcggggacccttctttgtctggaccatttgtattctccaaagccatcaggctggaatggctgagtcgactgaaccatggagatggtggccgcccctcccgcaaggaacttggtctcatctcagcctgttgccattggctggctggaattccaatcagtgggtcttaacttgtggggtgctgtgggagcaggcctgcagaatgacgctgtttggctccctggttttagcccccttcctagggatatatacggacagatctctcgtcttgccagggatcctggggctggagtgtggaaaactcctgggtctctgtgtgtgcctggacggctgctttgccaacattctacacagttctgtgtatcagacccaacgccctggtggtgtgggctcacgagaggatctcctgatccacggattacaaagatccgtgggaaaagcgtggttttccaggtggggtctcacaatcacttactgctttacttggctsagggtgggggttcatttggctccgtgctgctcccaggtggaccatcgccccaccctgcttttctttgttcttcgtgggtcaaattgtttgcctagtcagccctaatgcaagaacctggatacttcagttgaaggtgctgaattcacttgctcctttccttcctctctgagtgcgcagacsgcagctgcttctaattgtccatcttggtgccggcagcgaggttggggctccaaatctagccgccgccatctaccccaggggaggaggagaaggagtgttttttttttttaatatatttaatggacaggtaatgaggcaaataaaaattctgtacattcagggtgtacgatgtgatgatttgatgtatgtatgcaatgtgtaatgattaccacagtcaaatgaattaacacatccatctctacccatagttaccactgtgtgtgtgtgtgtgtgtgtgtgtgtgtgtgtgtgtgtggctaasacacttaaaatctactttcttatcaaatttcaagtaaagaatacaatatgttaactatagtcaccatgctacacagtagagtcccaaaacttattcatcttaaaactgaaattttatatcctttgatcaacaatcttccccatttccccaattcgctagcacctggaaaccacccttttaccctctgcttctttgaatttaacttttttagatttcacatataagtgagatcatacagtatttgcctttctgtgtctggcttattccatttagcataatgtcctccaggttcatccatgttagaaaatggcaggatttacttttttttatgactgaatagtattcgattgcataaacaccacattttctttattcattcatctgtagatggttgttcccatattttggctactgttacaaagagtgtttaatttgaaatagttacatggtttaagtacatgatatagtctctgatttcactggaaaacattccaaaagaagttcatgtctttaagttcacattgccaccagctaaagttattaattcagtagtcccattaaaaatttcttcactttcctcatgatttatcttcatgttatattcctttgcttccagggttccacagaaattacttatcacctctgtatataactcaaagtcaaaattacattttaatttttggagtaattggtcatagatactattatgtcactctaacttctgaattcatttcttcataaatctttattctgctcttttatggttaccaaattcttccctaccaaacctgatttatctttaatgtattttttttttctcttgggcacagagatttttttctcttgggtcattttgcagggatatttagcctgggatatatttcaatcattcactttcagtttcttgtgtgataacttacacagttgcatccctctgtaataaattcttccaatggatcagaaataatttctcagcaattacatttttatgactgcaactgtaggcatctgcactttatcactttcaagatccaagtttggcaatgcaatgcagaaagtctatttatgcagaattgtgcttcaaagaatttacatctctatgttgtatactctctgaaggggatataaactgctagatcatgctacagtcattatataatgaaactgtctataatcttatttgctgcaaaatacagtttggtaggtgtcagatttatgttgaatgtgagttaaaagaattgacttactcaaaatcccttaaaataatagtaataacaaactctttataatgtgttatcttttgtaaagtttttttttgaagggcaaaggtcaaatgtattttctgactgtaaatatatcccatgttttcaagaagtaaatctagagttagaagaacagtaataaacattatttctttgtcgttcacctctaagtattgtaggacctcttggcctttttttcatttctacctccatagtgtctcccacctgtccccttggggatagcttttaatactcactggggcaagtttacctaccagcccctgtattagtcagcataagcaaggttgtgctgtgataagaagacaacccccaaatctcagaggcttaataaaatttatttcctgctcaagctacatgttcaatgtgagctggggtttctgcttgagacaggcactcagagacccaggctaatatagacttatctcaacatgtgcttccactgtcattgcaactggggaaatggaacatgataaatcatgcgagaactcctaaaatgttcacctggacatgacatatgtcaatcctctatttacattgcttttgtcaaagcaagttatgtggtcaaagtggatgttgggtatgtgatcctgccctgtgcccagaggacaatgggaatatttgtgaacagccttaataactattacattccctttgccttctttttagggkttccttttgttaagtctccataatgctctcaagacactttggcacccttgttacagctaactttatcagggtgggcaactgacttagtgacactcagttataggttggcaagaaccctgtgacgtgctctgccatgagagctctgcctctgggggatgattatgaattggtcccgttagcatcctctttttgaggagttgactatattctgagatttaagcagttagtacctagggttaaacagttctattaggtgcaaagctgaaagatacacagaaagtagaaacaaggggaagagttgagtcatagtgaatgtggcattttcaggtttggattcacaaactcctgctgttcaggaacaataagattacctagttgccagggttttaacagatttttttcagtttccaaactacattctattctcagaattatacttcagcctctgtgggactcattgttttcagttcccagaccactgggccatgtaggccagatgcttatccttatgtaatctgattccctggcctcctactctacccttgcaagttcaaaggaagtcccattagcagcagcaatccagagttcctgtaattgacctcacttgcttgtgctagagtggggattttcctataaaacctcttttctcttctgttcattcctgcatttccaaattttgaagtctctgaattatgactcacttgtgctyccaaaccagcgtatctgccgtgtattccagttttgtctggcttcagcttattgctggtggatggtgactgctgctggtggtactctgggaaactggaaatgaacatgccaaggtagccatgtcctagtggcttcaaagcagtgtaggggtgaaggccaaatttctcctttgccctctggaagttcgggtgaaaaatcaattgagaaaaggcagattaataggagaaaggacrtataaaatttatttcagtgtgcataacacaggggaattgtagcctttaaaaagttgttgttttttttttaactctggagaacaaaacataaaaataattagcctaaataaaaaatcataaataatcatttcagtcttttatcagttcagtcccatgtaattaattattgttctgcttgatggtagtttagcaattttatgagtccagtktttttttttattagagttctggaatttttacacagttcattgattcacttatacagtttcagagttgtcagaaacctttatttgtcagtgttattcccatgaacttctttgaagacccatacttcaggatttgggaagagctttcaagaaaaaaaaagcatcagaataaaacaattaactgtggacaatgggacttaaaatggccatggttaaataaacaattgacaaagatatttggtcttttttttgtggcctacaacaattcaacataacactcataattatgaatgacaacatataccaagatatatcatattttaagaaatctcatacagttttggaacacatactaacaagatagccatataaatataactcagaaaaaaggttaaacattatttgttatttgacagttcttcccatataatttaatatataaactaaacctgtttattatttctcttttggatacttcaggggtctttgggaaaatcccaaagttagtttgaagtcaaaaagacttactttagaatttgaaggttgattttgggaagcttgtcaagtatgtcaaacatttaaaatatttgatcaaaaattactgtgaaataaagtcattcatttagctggtgtaataaaggatttccaaaagccaaaacctttactctttgacagtttgacagagatgagacttagtttttcaaatactcaaaagacctattaagatagcatgaggcacacaaaagctgtttctcccctttttttttttttgcagtttactcaaaatgtgaaccaaagtcgtttactatttcttattgatactatatgaaaatcttgttcaaaggagaaaataaaattctagttttgtagactatttttgattttaaggctcagtttaaaaacaaatagtaaattttaaataaatttaatattaaatattaaatatttcattcaccttaattattttgaaattctctctttctcaactttctatacccatttagttttatttatatcatttttctcattttgaaacaacctttacataatctctgaactatatgaaattgctttttctcaacaaaagcacatcctcataccttataacattttacttcccttacatactccatacatagttgtttatcatatacagtagttttaattatatactaattataatagtaactcttagtaaccctagtttctactgaaaacctaggaagtaagtaattttgaactgttttatatcagtgtttgtaaatgaaaacaattttataatttttagaaagatgtttcatcagttttttgctcattaacagatacagatatatttagcttttctatgccatataagaacaagatgtcaaaattatctaaactatgcttaataattaatgttttagtattttaacttacttagaaatgactcaaacatttcatgattctctactacttaacataacatgtccttaagattttaaattattgaaaaatattttttaacagttatatttgaattattcatggaaaataaagctatttatttaggttattatgtattttttttgaaaaagcaaaaccagcatcagctaattttatcttaactaaggcctttgagatactggacacaggtccctccccattgtccctactctagttgtcctgggttctgagtacccatgtggcacccaggatgactacgaagggtaggacctgtctgaatcctggatttgcacacctaatatagggcccagggcagaggacggacttgtgaagacaatgttgggaggatctgacccctctcagcatgaccaggaggcagagctggaccagggaggatggggccatattgggcttggctcaacaagccacagtaggatgtgtgtaagacttttgggagcccagcagccagcacttacagttttagtttatatacaaatcaagaaaatatcaagaatatcatagaaacaacagttttatgaccttaaaacatctaacagaggtagcataaacctgtgtgaccagtagacctaggcaaaaatgtctaaattaaattttgaagacatttttattttactagcaattttaaaactagctttatttaccaaagatttattaaagtcaagggaacttgaaaagttttgggctagttatataatttatgagtactcatttatttttaagtcaatttgatatcatgtagataatatgcaaacacatgtatagacacatacatgtagacacaacatacaacacacacgtatacatgtatgtatacaaaagtcaaatagatgagggagtttaatgcaaaaaagagtagagatttcagacctgagaggaacccattcacgacttttgagtctccatgaggaaaacagagaaccccaaaacagggagtcagtggtacctttttgttgtggttctcaagaggcttcagggtcactcaaagtcccatctagatcccttcatgtgtatcagacgtagagaaaggaaggagaagtaaactttatttttttaaaactttatttatctgaacttcagttttttttcttttaaaccaaaggtaactaccaagtgattcagaaccaaaaaagccatttatgatttaaccaagggagcacaagacatctccaaagaggtacaaagaagcagtcttcacaaaatccagagccaccccacaaagacctctggaagaaaatagagacttagtgatgaacaggaacataactgtccatggaagggaaaaagatcaatgacaaatgggtaccccaaaaagtcaagggtcacacaaatataaattcaaaataagtaattcaaacttcttttttttttttttttgagacagggttttgctctgttgcccaggctaaagtgaagtggtgtaatcatggctcatagcagccttgatctctgggctcaagccatcctcctgtctcagtctcctgagtatttgagactacagatgcatgccaccacacctggctaattttttaaattaattttttgtagagaagggatctgtttcaggctagtctcaaactcctgggctccagcgatcctcctgcctcagcctctcaaagtgctgggattacaggcataagccaccgtgcctgaccctcaaactaatttttataaatgtttcctttttcccctgagttaaaggatttacatctccaaggggctggttccctgactagaaatcaaacctgagttgaggcaatgaaacagtggaatcctagccattagaccataggccagagtgctttttgcagatcctagatggatccaaagcaggcaattgagtgtacaggattttaagtttcctttgaatattatttctgctttaaaaatcttactaagagaatttctaaggctatattcctttaatatttttaaaaataggtacgaataagatagctgtttaagacaagcactctctaaaaagttttcttttaagtatagccaatttatttattccataaatgactcaagttaatgagccattttcatggagtctcagaggtagctttccaggtttagactatcatggacagtataagtggcagtataaaaatgggaagatgatgtagttctcatgatcccctcaaaattcactttcagaaaaagtctaatatagcaaaggacacttgtgacagatggttgaggaggtgtttgttcatatggtgcctccagtattgaggagggaggggcaccagtcatagatctgttaatctgtgacactgagtaggtcctcctgggattggactttccaggactatccaggcaacaagagttaggacaacaaaagccccttatggatgggatttcttatttaagaaaaactttgctgagagcttggcacatttggaacagagtgtgctgcttaatatcttaggtacctccgggttcctagtccttttaggctggccaccagacgtggcccaaaaatcatgcccactggatggcagagaccaagagatagggctcctacgtggtcaaaagtcaagctctcaaggacataaaacaagagggactcttcacagaaagacagagacaaaggaaaaaataaagactacttctgtgaggaaaaggatggacaatatgaatattcatagcaaaaatataccagagtcattacatctaagactagtcatacaaatgcttttctcccattaatcttaaatttggaaagaaaaaagagacaaactgatttttctcgtctgcttgaccagattmtgcagagagagagactgggagtctgactggtaagaatttcttatcattctgttcacctatcaggtcctgtgttcctttgactgcagcttctagaggagcagagcagttttggttatcccaccaacaatgccaaatctgtaaggtcaaagggattgcttcctctttgccctctgaagttttgctgaaaaatcaactgacaagaggcagattaacaggagaaaagacacacaaaatttatttcaatgtgcataacacaggggaatagtaggagaatgattacctcataacccaacgggtacagaagcttatataccctttttcatagaggaggggagataggggaaatgtgtcaacttggggtgtagtaaatgatttttaggggaaattcagtggacttggagaacatacagtggcctgggacaaagtttgttgggcccgcagagcatgatttttgacaaacgtctgtccaggtgtgttgacagacttcagtctacctgcctgtgattagagttattattaaattgatgaaaactcagggaagggaccagaagtaattatttttttctttggcgagtctggacattaggcagattagggagtatcaaagtaaagctccttccagtgtctgctggtccccaggggtgtttaatttaaaataatcggctgggcgcagtggctcatgcctgtaatcccagtactttgggaggctgaggcaggcagatcacctgaggtcaggagttcgagaccagcctgaccaacatggagaaacctgtctctactaaaaatacaaaaaattagccaggcgtggtggtgcatgcctgtaatctaatcccacctactcaggaggctaaggtaggagaatcgcttgaacctgggagacggaggttgcagtgagccgagatcgcaccattgcccttcagcctgggcaacaagagcgaaactccgtctcaaaataataataataataaacataccagggtaccatattttggggtgaaattctctggtctccttcagctgccaatcctcaatgtggtagaatggcgctaggctcctacaaaagaggggagaatgcctctcttcccaattctgtgctgcactctctcatatgggccccagtgaggcaatgattgcacctagagtcacacacaattcctatgaaaatgatccctttcagcttcttctctactctctccccgctccttactagagtcaaggccagtcctagtgactgcatggggagtagttagtcctagcttttccaagcaccatgtttttctttcctgcctggctcctatgaagaacctctctgctacaccccactctcgtcaaaattcctttctactctccttgaccacaaccccctctaaaggcagcaagcaatcatatatatcaatttatgcaaagagatgcctagatgcccaaagagttaattttccactgctctacagacagatttgattggctttcaggtagcagggagagaacatgtctgccccctttggcttcttagccttctagaagataatttcctttgtttctttcagaaaacagttcaagttttgtttgtggttgctttctgtcatttctataggtcattttgaataagcatgatgccatttacttatgctttcttggttttacctccaagcttcttttttgtactcttgctgattattctatcaatagaatttgtatcagaattaatcttgaagcttccaaggaaatctcaaaaggaagtctgcacacatagagtgttcttgtagggcacgttgtaagcaaatattggagttttgactataacctcaacgagtaaccttaaaagttagtaaattaagtgtcttttaaatactaataggcttaaggcttaataagtataaagatgttatttttatggtaggatgaagaaataaacttaattctgcctcagtaatgttttaaagtttaagatgattcagtatagctgagttgattctaataaagtgaattctccaatttctgcatgattttactgccagaaaactgctcccatgggaaaatggctaggctatagtatttcttaagacacaaatagtggagaaaaaggaagtcactcattacattaaaataaggataggaaaacccatagctaattgattaaaatagtacaagtccagtgggagcgtgcatggcaaggatacaaggaggcccccaccagcagaaactggtagctttgagatgatctgtgggtagctgccattcattgtatgtgcttcacctcttctcagcttgcttcctaaaccttttgtcctattagactgtgattttcttcactttaatgttgctcccctctttttcagggttctccaaccaaccccagttcactctgtttctgttaatactttatctttcaatcacagctcatcttttcctcaatgaattcagactgattccatwgatacccacttctaacttagctttaggatataattgttctcttataaactgattgtgtgggcagccaggtgatgcagactgataagccaagatacacctgccctcttagtggaaaatgatattaatagattgatagaagcaattgtgcttcagctggctgaaaggatagaagagtccatatctccccagatgtcgtcattttcactgctcaaggtctgactctacccttcatagactccccggggctatttcaggacatctaacttgtcttatgagatactgttgcagcttgaaaactctgactctagaccagtggttggcaaacttttactgtatgggtccagatagtaaatagtttcagttttggggaccatagcgtctctattgcaactactctgctattgttgtaatgtgaaagcaaacttagataatatgtaaacacatgggtgtggctgtgttccagtaaaattttgttatttaccaaaatagacaagaggccagatttggctcctacgatgtaaaatggtgccccttctatgtcttggaaggccctggttctagactgaccgttttcttttcttttcttttttttttttttgagatgatgtctagctgtgttgcctaggctggagtgcagtggctcgatcttggctcactgcaatctctgcctcccagtttcaagcaattcttctgcctcagcctcctgagtagctgggactacaggcgtgcaccatcatgcccagctaattttttgtatttttagtagagacagggtttcaccatgttgatcaggcaggttttgaactcctgacctcgtgatccgtctgcctcagcctcccaaagtgctgggattacaggcgtgagccactgcgcctggcctagactgaccattttctcatggagctactctgcactccctggttaaggaagggtaagaaatgggcattatctcacacacaattgagagcccccagtgagataaagtatgatggagtggtttgtggccaagccctatgggagatacagaaggcttacttggaggaagagtactaagtaggcaattcagaaaatccctgttattgttgagattctgttagcccagtggttttcaaccctggctgcacaataaaattgcctggggagctcttaaaagtcctgatgcccaggccttacacaaaaccagttaaatcagaatctctggaagtaggactagacaataatttttaaagctcccaggtgattaccatgtcagaactgttatgctggccatgatatcagccagtagtgagcatggttctgcctcttggtccaaagcttgccataaaatggtgccccttctatgcctttttaacctcattgtagctgaatttgaatacatagatatccacatttctgtatatatatatatatatatatatatatacacacacacacacacacacatatacatatatatacacatatatatgtacagtagtgaaagctctacaaattaaataaattaaggcttaataaatgtggtttttcagatgagttttttcttttaggaaacagtttgcattckcaatcttgatttgcaagataccatatttcgttaatttaaacacattttcccacattgtccacctcacattttttaccatttctgaaattaggatgcatcgtataatggaaataaacatttaatgtagctttcctttttgtacttgtaggggattacaagttttcccacagcacactttagtttatctttcgtaagtgatctgaccttcctcataaactcctacctactgggaattggaataaatgccttctgtttaagccaataagatggtaaactgatgtgattcaacaatataaacagtcccttttggtaaatgctcagtctttttagataaaatgctctaaaacaggagattgggttgagggtgttgcttatatgatttcacggtgggagatgcggcctttggacccatgtggtgacctttggacacttagtgcctgccgagtggctggtctggaatgctctctggactgtgacctttgagggagtgatgggtcccatgcatggtcatcttgtgggcacctctgtgcatttcttgatgtccttatatgctttgtggggcgttcttttgtagcttggctagggtctgtggtttctccaggatgctttaaccccactttggcccttgatggtgcttcagattcgaagtcccagctacatcctccatccagtatctggcattatctgtgtaccctcagactctgctagatcacttggctcttcaccatggtgaactcagggcaggcccactgcttttcaacatagcctcattttgattgtttttcatggtatctaggatgttctgggtttcatctaagcctcatgggaatcaagactgatttaagaaagctaagctgaccttctctctacccatttacattgttatgtattattgagcttcaagattgtgatggcaagattacactgtagctacccctgaagttttgtgcaggggagctcataaaacaattttctttcaaagtcttgaagataaatggaataaaaattcctcggctttctgtgtttcccaactaactgtgttagttgagagccattacagcttttaatctgggtgaagcccagagaagagaaataaaatgtgtctaacctgtttctgagacctttcttccaatagtccacacttctttttcctgtctgaccagatcttctttatcataaaactgtgatctagtctatcagatctagcttttgctaaatgagagccaaaaggatttagaaaatgattttctctttctgtgttttcttctactagtttcataatttttggtcttacatttaaatctttagtccatttgagttgatttttgaatatggtgagagataggggtctcatttcactcttctgtgtatggatatccagttttcctagcaccatttattgaagaaattgtcctttctccagtgagtgttcttggtgcctttgtcaaaaatcagttggctgtaaatgtatggatttggtattgggttctctattctattccattgctttacatgtctgtttttatgccagtgccatgctgttttggttaatatagctttatagtaaattttgaagtcatgtagtatgatgcctccagcttcacaattattttctttcttgagagcttaagaaagtcagctttgaaactcaaagatgatcaatggtatctttgttctgtctgctgtctttattcctagacaataagtctcttggcttcaccttggttatggaaggttcaatattgacaaaatatccatatttacacttttaagagaagtgattacattggtggtttgtgttgtagttgatagtattttagaattgagagactatggtaatatcaaagaagggactttgggacattaaagatcaagtgctggccaatgagattcaagatgggtgactggtatttaatttttaccccaaacaatgagacaaaatgactattgacttagagagagttctgacaaatgaggtggatacagcctaatcaatcttaractgaatataagtatttaatttgctgatgagctatatttaaatcatattttggttgctataaaatcttcagccctgcaaatctaatcactatctttgatgatcttttttgcttaatgtttattatctctcatattcatcatgatgagcaagtagctatgtatattttctcctggatatcgtcaataaaatggagttttgtgttagaagagaacaagaaagagtaaatctgaccatctaaggtagatgtgaaaaagggaatccggcagcagatagtgggagggaaatgcagataaaactttctaagtttatgttggtaaagcaaacacaaatgacaaaatattggcatagtttattcaatttatggttgatagggttgtaaatgattatcaaacaattctggaatacgtaagtaggagtcataaccatattctaccatcagtcactgctggaagtggaatgcggggctggacggaccaagggattatgtgaacatatctaagctattacatgtgcagtcaacttatttattttagagtcttctttggtatgattggattttttactttttgttttgcttcctttaagcagtcaaaggttattgatggaaaaaggttgactttttgctttttcttattcaacatttctttgaatcagtactgtcctataaactatggattattgatttactggaattactagttgtttgatttaggaataaattacagcatgaatataatttctctttagtttgcttaatttaatatctttatagtttttcttctcattttttgaaatatttatttgtagaaaaggagactatatgattaacattacatttttaaaactgaatttgtctgaatttttgttctgtataaaacaggcatttttccaacaagcatatgagaaaaagctcaacatcactgatcattagagaaatgcaaatcaaaaccacaatgagataacatttcaaaccagttagaatagctattattaaaaagtaaaaaaaaaaaaaaagcagatgctggagaggtcgcagagaaaaaggaatgcttatacgctgttggtgggaatgtaagttagttcaaccattgtggaaaacagtgcggcagttcctcaaagacctaaaaacaactaccatttgacccagtaatcccattactggatatatacccagagtaatataaatcattctaccataaagacatatgcacgtgcctgttcattgcagcacaattcacaatagcaaagtcatggaatcaacctaaatatacatcagtggtagacaggataaagaaaatgtggcatatatacaccatggaaaactatgctgtcattaaaaaaaaatgagatcatgtcctttgcaggaacatggaaggagctggaggccattatctttagcaaactaatgcaggaacagaaaaccaaataccacttgtgtgctcacttataagtagaagctaaatgatgagaacacatggacacatagaggggaacaacagacactgggtcctataagagggtggagggagagaatcatgaaaaataactattgagtgctaggcttcatacctgggtgatgaaataatctgtacaacaacttttcatgacgtgagtttacctatttagcaaacctacacatgtacttctgaacttaaaataaaagttaaaaaacaactattaaatttagtttcaaaaaccaggcatttcctctaaataatagtaatgttcgaaatgacaaaatctacatatcctagaattaatatgttaacggttgggtttcctgagaaatactacacctaattgttggggtttctcaaagctcagtcctgtgacttcttctccagttatacatcgtttttaagagatctcattcaatctctgattaaaaaaaaatttttccccaaacgtctttgcaattttggtaagatcagcaaaactactgacaagtgaacaattaaattgaaaaagtaacctatacgaaacatatctccaacttttacctctttcaattccagaattgtatactagtctccactttaaaaactctaaaaggcaaatttaacatggctaatgccatggtaatccatcaactcttgatttcccttcctactcatgtccctttactttcctcaactagtaaatattacctccatttactcagctgctcaggccagatgccagagtcatccttgatgccatattgctttcataacccatattcaatctgtcagcaaaccttgttgacactttagaatataccaaaattttgtcatttcttaactccgccactgcttcctcaaagaagccagtgtggtcttcacttgggctacagcaacggactcctaactgctttcccttcttctattcctcatcccatccttgcctagtctgttttgcatagagctgtctctagtctgttttgcctagagcatttagaatgatgctttaaaatttggggtcagatcatgttactttcctgtttcaagcacttcagtaacttccagtcataagaatagaattgagagcattagtggtgatctacaagtcctgcacaatttggtgcctccataccagccttcctattgctcctggaatacaacagtcaagctcttgttttggaacctttgcgcctgtttcttctgtttgggatgttttcctccagatatttaaatgtcttattcttctgtttccttggatccttcttacttaatcagagatgctttccctaatatgcagtctaaactagctcttctctttcactctttattttcttaccctttttcactttcctcatagcatctgtcaatacctactattggccaggtgcagtggctcacgcctgtaatctgagcattttgagaggccgaggcaggtggatcacttgaggtcaggagtttgagaccagcctggccaacatgggtgaaaccccatctctactaaaaacacaaaaattagctgggcgtggtgacaggcacctgtaatgccagctacttgggaggctgaggcacgagaatcgcttgaacccaggaggcagaggttgcagtgagccaagatagcaccactgcactctagcctgggtgatggagtgaggctctgtctcaaaaaaaaaaaaaaaaaaaaaaagaatacctgccgttgtgttacacatttacttatgtatttgtttattctctgttcccccaccttcttagaatgaggctcattgccatgttctggcacagtgtaggtgcaccatcaatatttgttgaataaatgaatggtaaagtccaaactcgtttgtttttggatggtaagtggttaagtgaaaactagaagaaactaatttggtattattctcagcatgtggtcttttcctagttgtgtttagctttatatttatccaggagtaagtgcacttcttggattaggatatttagctacaactgcttatgtgtttgacacgtaaatctctttgctttgttatgccatctgtgtggcacagagggctggtggaattggagagggatctacatgtgctttgttactgyccctcaatagttcggagtaatggcttatgttagcagtggttgtttatctaacaaacaaacaaaaccctaaattatatttttaaaaaggttatggttattttacactttttgtatcacttgtggtaaagattgttatggattgaattgtgccatttccaaccccaacattcacatattgaagccctaaccccagtttctcagaatgtgaccgtagttggagacagggcctttggatatagaagtaattaaattaaaatggggtcatttgggtgggccctaatccaatatgactggygtccttatcagaagagattaggatgtacagggaaagacatcattgttgtgtgcatacatgtgaggacacagagagaggacagccatctgatagccaaggagcaaggcctcaggagaaaccaaacctgttgacaccttggtcttggacttctgacctccagaactgtaagaaaataaatttctgttgtttaacccaggggtccccaacccctaggcctccagtgccagtaccagttgagtaccccaactggtgcatgtccatggcctgttaggaactgggccacacagcaggagatgagcagtgggtgggtgagcaaaagaaacttcatctgtatttacagccaacccccatcgcttgcattactgcctgagctctgcctcctgtcagatcagcagtggcattagattctcatgggaaagtgaaccttattgtgacgtaggttgcctactccttatgagaatctaatgcctgatgatctgccactgtctcccatcacccccagatgggaccgtctagttgtgggaaaacaagctcaaggctcccactgattctacattatggtgagttgtatagttatttcatatatattacaatgtaataataatataaagtacacaataaatgtaatccacttgaatcatcctgaaactgagaggtgaagccagctggacttcctgggtcaagtaggggacttggagaacttttttgtcttacgaagggattgtaaaatgcaccaatcagtgctctgcagctagctagaggtttgtaaaatgcaccaatcagcgctctgtaaaatggaccaatcagcactctgtaaaatggaccaatcagcaggacatgggcggggacaaataagggaataaaagctggccactccagccagcagtggcaacctggtagggtccgyttccttgctgtggaagtgttgttctttcacgcttcaaaataaatcttgctactgctcactctttgggtccatgccatctttaagagctgcaacactcactgcaaaggtctgtggctccattcttgaagtcagcgagaccacgaacccaccagaaggaaccaactccgggcacaaaaacgtctacccccactccacccctgggtctgtggaaaagttgtcttccataaaatgggtctctggtaccaaaaaggttggggaaccgtggcttaagccacccagtctgtggtattttgttatggcagccctagaaaactaacacaaggattgaaaaaaatgaaaaaatcagtaataaaaaggatgtgccagctctttttatttgtagtttgaaaatgaattatgtaacgtgtctttgttggggggggcaaaaaaagactggatataatatacttgatcctagattacattgaactgatcagaccccaactaaactagacaggagatatggcagaaaatcccacattaaggacttccttttaatgaaagctgctatgtgttatcactaaactttaattttgctgtagcaacccattcttttggtaacctcgtatgaatcactgaacattgtgactcttgatttaaaggcttctaaaatgtagggttttattcttttttttttttcatccagtaaaccactgtttgtttatttttcacagtacgctggctctgtgttttcaggatgagtcaagcacggcccctgtccttattgagttcgtggtagagcagaggaggcaatatgtgaacagctaattacaagacagtataatgagtgatacaagagctacgaacaaggagctgtgaggggagggagtcaccccaggttgaggttgctgaacatttcctgttctgagcctaacaagtagtttgtggtcagattccacagatagaagatgagaatgaaaatttagtgagcagtgagatcaaaattgcctcaaaagctacgctaaagagtttggactttgcttgtaggcagcaggtagcctacaggtagtgcaaatatgagagatttacattttcaagagacggctctagtgggaatgtagggctggtgcagaggcagtgagacctctcagaagacgcttcatgaaagattcaacgagggcagaatcattgcacacacttttcataatgatagattggtgaatggggcagagaatgatgccccgtttctgtgtcttggatgacaaggacttggagaggaagatgagagagagactagcccagatgacctctgggtttctgcttcaggttagaggtgttagccactgaggtaaaaaatacagatggtggagaggcaggttgatgggcaaaggcttctctactttgggcatgctgtgttttcattttctatcacctattacattaaatattaactctttctttgacttttataactttttatttaagatgaaacctatttcttggccttctcaccctattgcctgtgtttaccccacagtttgctaagtttggctatctgctattttcagacaaaataaatttttttctctgcccctttgcacacaattttctttccctggcttacatacctcccttttatctcttctggtagaaaattatctgttcttaaaggctcttcttggaagtcctacttaatccttgtgaatgtttgcaattttggcagcactttctttgtacttatataagtgtaaacagttatcattctgcctttaatgttgcaactagttgtgtatttctcttattgccatattggagcttattcatatttatttcctgaatgcctagggtattattttgaacaaaatataagtgtttattggcttgaaaggaactaaaagaagattgaagttggtttgggggggtgttgaatgttatctagaggcattttttgggttctcaaccctttaatcttcctctgtacttttgttaatccagtaagggttgttttggtagaagtaaaagaatagttgaaattatcaatgacttgaagaagggacaccccctctcctccccgagactggtttgtaccttttactttgaaagatcacagtttttacttatctataggcagttttatttttctacccttctaatttctttcagaaccctgttgaagttttagctaattaacatagcttaaatgtcttatattttatttcatacattaaaattaactcaagggagcaaaagtagccctgaaggctcctgtgagctattggaggaaggttgaaattcaaagtgttttagctaataaacaagaaaagagatggctgttaacagggcctttttatactacaatgagggtagaattaaaaaaaatcagaactatattgggaaggaacaaggttatagaatataattgtgttacccaagttggcattaaaaaagacatttcacggccaggcgcagtggctcacgcctgtaatcccagcactttgggaggctgaggcgggcggatcatgaggtcaggagatcgagaccatcctggctaacatggtgaaaccctgtctctactaaaaaatacaaaaaaaattagccaggcgtggtggcaggtgcctgtagtcccagctacttgggaggctgaggcaggcgaatggtgtgaacctgggaggcggagcttgcagtgaacggagatcgtgccacggcactccagcctgggcgacagagtgagactccgtctcaaaaaaaaaaaaaagtcaacatattctacagtgttcatattgtgtgccagtgtggctctatataatgacagttgatggcttggttcattaagcttatcaatttaattttcagcatctttagagcatttagagaagcacacctaaatttggaaaatctataaaaaccttttttatactcttaattttaatatataaatatttttacacaccattgaaaatatgtccggttttgtggaatgttaaacttgcagaattaatagagtgggaatttcttctttataaattacttgaaacttttaatttagcaccattcccatggaagttccttcctgtatctacgatgaaggtgtgtctttatagcctagcacagatttacagactaaagaaagtaagcaaacccaagctctctaatgctgcaagcttggagattttctatatgagagggacccctgaagtctgagaaagaggggaatgggagggttttgtatctatggcaaaaggtaaagttagcaagacatgggcttaaaccctacattagaatcatctttgttgcaagttgttccaactaaacttccttacagaaatataactgatttagtactgaaaaagaaaatgaggacacaggatttattttacaggataacttgaaagctaattttactggttgctggtattccttcaagaggtgggagaccttttcaaatagcgccctcctatcctccgccttggtgagaatcatctgctatggtgagtcacagtcactgataggagtaagttaaatctcttaggtgagttagggttaaaaaaaatagtttcagctttctttttttccacaggattgccaagccatatttactttctgaaataaaaggaatcattgaaaacctcacttgactttagtttaatcaatatcaaataactgtattggagtattttaaaagaagacgtaggtacaaacaacttataaaagtgaataacttgcaagttgcaattgccttttttgatggaagcatgatgttcttatacaaagttcttttcacatttcttacttctctggcatttattataaggaacaaagcatttctggaacgctcattttaatttcaaagcccaggctattctatggaaaacatttggcgcatggaggatctgaacaatagaggaggaatgtgcagtgggaagcatcatgaattgcagcacttaaaatacattccgagggaacacttcagacaatgatacttattctttgttttaaacaaagattttaaactggtagttataatttgtcttaatctggacaaatacctttcaactctcaatatataaattagactgacaagagtgagatatttgccttttggaatttgtgaaaacccatgtaataaatcaggcttattattattcttatataatccatgatgaagacacatgatcttatttagctgcttgtaaagcatatagaatgagctttgctaactgccacatttagcatggggggccccaagagcaagataaacttagatccagagagaatacctttgttaaagattcctataaccaattttctgcacctacatggggaacaaactagaaaatayacatgaaatgccaacaaatatttgtgtcatattatgcattttccaaaatactttaccttatttgaccttccccagtcttgtaggataacaatgattgtttttattttctaagagaggaaacaaaggcctgccacaagacattccactctgggtgatgaacatggaaataaagcaaattagaatgaaacagaggatctattgggtaaggggaggagggtaggagggcagatgaaaatgattttcatccgcatatttcccccataacttcttaagttttttttttagttcatggataaaaactgggtccagatatccaagtaaacaaacatcgaatgctccataaacaaacaacaacgaaaatctctagggactactgagcaggaagcattatgtagtttgctgtcaaagatgtgatgcatgattatcatgagcctccactgtttcatgacatgcagcagattagctttcaagaggagtttcaggtcttctattttaaatattagatacaagttgtttttttcctttctctcattcctctacgatggtgattttaaagctttgtttataaaaatttaatccaaaacttgtaattgtgatccaagatttaattaagaaatgggttgttttttttttttttttttttgagatagagttttgcccttgttgcccaggctggagtgcaatggcgtgatttcggctcaccgcaacctctgcctgccgggttcaagcgattctcctgcctcagcctcctgagtagctgggattataggcatgcgccaccatgcccggctaattttgtatttttagtagagagggggtttgtccatgttggtcaggttggtcttgaactcccgacctcaggtgatccacccgcctcggcctcccagagtgctaggattatgggtatgagccactgcccctggccagaaatgggtgttttttaataatgtaattcagtatgatgtttttgtttccaaatacagaagcttaatttttatcttcaaataatgttcttattatgagtttgttcttgtatttgttaagattcatttctttctttttttccccaagctttattaaattaaaattggcgaataaaatttatatatatttatggtgtaccctgtgatgttttgatatatgtatacattgtaaaatgattaaatcaagctaattaacacatttctcacttcatatacttgtggtgaggagtttgttcaagttttgctactcgaagaatgctctagaaggctgtgtatgtgtgtattgttttaattacagaaacttcatataaaaaatacagaactttgataaaacagtcaaaaatgagagtagaaaattatgtatctccaaaatatcaaataattataaaataaaatttataccacttttaagccagcaatctacattaagagggagccaaaaataattataattaagtcagtattagtctatttaggctgagaatagagataactaatattaggagagggagaaacattctgaatcatatagaacagtggttgcttcaggggacaaagtccaaatccttactatgacctactttcttgccctttgtaacctttcagatctgtcttctaccctttcccctaactcatttggcctctcaaacaggtctcactcaaagtcccctgtcaagaggcctttcctgaccaccccgatccccactctctctcactgtattccctccgccaactttatttttcctcaaaacatttactgaaccttacatttttaaatttgtttatatgtttattgtatgctgccgatattaagaatgtaaactccatgaaagcatgaaatgcatttcttttccatcatccagaacaatgtaaaaaataggtgttcagtaaatatttaacatagaaatgatttgatgactggggtagttgaagagaggacattttaatgtctatattttgaaattcaatcactaagactcccacttccttcctatttttagttgggaactccacggtggctgctgttgctgttcttggtgccatgacttgacttttgtaggtgtaccaacagcactggaaatgagtcatgttactatgaaatacagttgacctttgaacaacactggtttgaactatgcaggttcacttttaatcagattttttttcaataaaagttacatcaagtgtgcctgcctctcctgccttcccttccacctcctccatctcttctgcctcttacacccccaaggcagcaagaccaaccctcctcttcttcttcatcttcctcaggaatatgaatatgatgaggatgaagacctttatgatgatccatttctacttgttgatttatttaattatgttttctctgccttatgattttcttaataacaaataacactatcgtctctctagctcatcttattgtaggaatatagttatatagtacatacagatacaaaatctgtgttaattgactatttatgttatcaggcttctggtcaacagtaggctattcgtagttatgtttttgaggagttgaaagttatactcagattttcaactgcacggtgggttggcgcccctagcccttgagttgctcaagtgtcaactgtactgtcttttgttctggtctgtaatatcccaggactgtgttctccttacaatttgtcaatttagtactttgtatttttccaattttaggttaccacacttgtaaactgtccccagaacccttccagcaggaaaaaaggacgttcgaaaagagccagtgtccttctagcttctgtggaggaagcaacttggaatttattagacaagggagagaagattgcccaggaagctacagttttaaaggatgagcttacggcttcacttgaggaagttcgcaaagaaagtgagtactccartcctggtcaggagcaaactgcatatctttagggtgttagtcacccaaattagatttgtgagtgttttgtttttgttggctccagttttttagtcttttgcagagctgtgaggagctagctgtgggaggcagagtggctcattagacagctccaaggctcagtcccactccaggctcttctttttagttgctcggtccccccaggcaattcctcttcctcccctgccttgccatagcttttccataataaacaaagagaagagtacccttttttggtcttagaatatagtgagaaatgactaatgaagctgaagatttatttgtctatacataaataaattatgaagttccttgaaaacagctgggaaatagaagtttcagacctgaccatctcagaagtacatttttaaccttgcaaatttctggaggtttagacttcctaaacttttcaaaaaatgctttgcataaactgtgaatgagccaagttgctgctttgttaatattacataataaaagcatatatttcatctttttgagatctttacttatgataatacagcaattttctaatgaatataggtctcaactgtaggacagtttaaaataattgctgaatattctttggttagtggaatgatttcgtatatatcagctttctgcaagtatctattttgggaggaaaaggaaagttaaattttcttgttcagctttgtaaaagagacttgggatttttaaatatttttctccctcaatcccccaacgtaactttaagaaaatcaggaagcctttgctaattaaataattaaaatgaatatactagtaacaataagctttatgtcacatgtatgatacaggggatttaaaaaaaatttttggccgagtgcggtggcccatgcctgtaatcccagcastttgggaggccaaggcaggtggattgcctgaggtcaggagttcaagaccagcctggccaacatggtgaaaccccatctctactaaaaacacaaaaattagctgggtgtggtggcaggcgcctgtaaacttgggaggctgaagcaggagaatcgcttgaacctgggaggcagaggttgcagtgagccgagatcacaccattgtactccagcctgggggacaagagcgagacttcgtctcaaaaaaaaaaatttttgtatttatgtgaatttatttttaaaataaattttactgtgtatatttaaggtatacaacatgatgttatgaaatacatataaatagtaaaatggttgctgtaataaagtaaattgacatattcataatctcacagttacccatttttttgtgtgtgtagcaagagcatctaaatctactcmtttagtaaaaatcctgaatacagcattattaactatagtcttcatgttgtgtactagatttctagagctcattcttcataactgcaactttgtatcctttgatttgcactgacccatttcctcactcctgcccccagcccctggtagatactgttttattctctgtctctgtatgactttcttaaacaaagattctacatataagtgagatcctgcaatagttttctttctatgtctagcttattccacttagcatgatgttcttcactttcatccatgttgtggcaaatgacaggwtctccttttttcctttgtatatatagaccaatttctttatcgattcatctgttgatggatgcttaggttgttttcatatcttgactattgtgaataatgatacagtgaatatgggagtgcaggcatctttatgaagtggtgatttcctttacttcagtgttatacccagaagagggattgctggctcttaatggtagttctatttctaatttctttaggaacctccatactgttttccaaaatggctacactttgttatgtatgttatatacaatttatattttataggtattcttcagacaataaatagaaaacataatgtgcaaaataatttgaaatatatttgttgtttttccctgctccctaccaactgagaccctctctttgtccttgttcttgatcatcatcttagtcaccaagccagtttagactcttcctttcattccaccctctcttccaattaatgtctaagttcaatgaacttttaaaaacttttctaaaacttttattttaggttcagggtacatatgcaggtttgtcatattggcgtcatgggggtttggtgtacagattcttttatcagtcaggttcaatgaattttttctccttgttgtctctcagatctgttccttctactctattcctaacattgcttcatgaattcaggattattgcattagccttcctccatagtaaaatcaaatagatcttttaaaaatgaaaatatgctcattttacttctctgcttaaaatcatttttagtagctgttggaggatcagggggactatctttttcaataaagttcaaacttttaaacctacctcccaaagcatttcatgatttggcttctaccattatcttgcacctctttcctgtgatgcacctccctcatatgttcctccaaacaggaactcrcagtttcttgaatgttccgwgttgctttatgcctctgtgcatgtgttatcagctacagtcataccttacttaacaatggggacatgttctgagaagtgcatccatatgccattttgtcattgtgtgaacatcatagagtgtacttacacaaacttagatggcatagtctacaacacacctaggcatcctaggctacaaactcgtacagcatgttactatactgaatgctgccagcaattattaatataacatagcggtaagtatttgtatatctaaacatagaaaagacacagtaaaaatatggtataaaaaattaaaaaatggtacacctatgtagggcacataccatgaatggaacttgcaggactggaagttgctctcagtgagtcagggaatcatgaatgcctaggacattactgtatatcactgtagactttataaatactgtacacttaggctaccctaaatttatttaaaaatatttttccttcttcaataataagttaaccgtagcttactgcaactttttaactttataaacttaaaaaatttttaactttttgactcttttgtagtaatacttagattaaaacacattgtacagctgcacaatattttcttttttatgtccttattctataagtttttttcttttttacatttttaattatttttttttttacggtttaaagttttttttactaaaatctaagacacaaatacacacattagcctaggcctacacagaatcagggctatcaatatcactgccttccactttcatatcttgtcccactgaaaggtcttcaggggcaataacacgcatgggaattttcatctcctgtgataacaatgccttcttctggaagtgttaccaaaacccacaggcgttgcactacaatgttactatggctatgaggtcactaggcaataggagtttttcgactctactatattcctatgggaccaccgtcatgtacgcatctgttgttgaccaaaatgttgttatgcaaaacatgaccttattcccgtcacttggattgcttttctaattcagccagtttttgctcatgtagcaaagctgagcccaggtcatcttttccaggaagtgtttactgaccccgtatgctgatttagatgactgtcttctgtgtccttacagactgagcacctctcgttcatgacactaaccaccccatacagtaaacattgatgtacttgtttagtaaatcatgactgttagttaatttattgagcgtggcaggtaccaagtgttatttgattaccaatgcctgacacatcacagacacctgttaaacgtttgttaaataaattaaaaagttgaagcatccttttgtcactttatattataaaattttgtaatagtcttatctttgcttttacggaaaattaactctcataattatagtttctctgttgattctttggtaagggatatgagccctatcctgacattgtttctgtaggaaaatgtgatctatttgacaacatagtttccataaactgtctggtaataagtatgtacgtcatcagtcattctcagaagggaacaataattgccatgagatggtatttccctttgtttttaagtaagttaatctttttagttcaaaaaaaagatgttattttaaagagaagttctcaaagagaagtcttgattctaggattatgctgtacagggtatatccttcactgtgttctattataatgtgtgaaatacctctacatgtcatatgctgtatacacaacagattcatttggttaaagatcaccaaatgctttactgtgtgatttatttgacaaactgccaaaatgagctaccgccagcaacttcagtgtgggaggaaagcaatgcaatggcacatcgttctggaatttggggaacagccaatgattatcctatggatagtagggatagtgacagtgaaagcactgttcccaaaagcttggaaggaattttaagctcagtggtggggttgaagtataagaagaatggattctgatccaataaactctacaaaatacttgaaacatattttaagtagtttcctgctttgagttttttttttttttaaaggtatttgtccagtggcataaggtgaaggactaatgaagaacaactaataaggttaaagtatttggaaaagtgaaaatatattgagagtacagatagctttattatatatttattgacttatttttaagaattttgagaccaatttagaaaacttttccttccaataaagacatactataatttatgtagccttactacaagattctgttttattgctatccgtggctttatttacagacttgaagtgataaataatgtgggtattttggttacctaaagaacctgcccatgaaaggtgaaacaggggtagtataaaggagagacggtgaaaggaaaggtagtatgtgtagtatgtgggtagaagtgtagagattcagcagaggtggttcacattgtaagtaatacttatagttactcatgatcttatggcttactcctacactaccaatacaatgrcaaagtattaaatttgacattttctttaaatagttttagaatattcgtatagcagttacccaggaattaggtaagagttgtttataatgtctagattacatgttttgcctgtagcatatatactacctttatatagtttctattaccctaaaatctctagacattgcttctaagccaggggtccccaaccctgggtcgtggaccggtactggtccatggcctattgggaaccaggccgtacagcaggaggtgagtggcaggcaagtgagcattactgcctaagctccacctcctgacagatcagctgcggcattagattctcataggagtgtgagccctattgtgaacagcgcatgtgaaggacctagtttgtgtgctctttatgagactctaacgcctgatgatttgaagtggaatggtttcatcctgaaaccatycccattccccccatccaccatctgtggaaaaattatattccatgaaaccggtttctggtgccaaaatggttggggacaactgttctaagccacacaagtggttatttttaatgttttaaatggtttattgaagaataacatatatacagaaaagtgcacacattatctctaacaacaatacatatccacatagtgaacacactcatgtaacctccacccacgtcaagaaatagaatattattagaaccctaagagggccccttgtccccgctaccagctactactctstcactatcctgacttctaacaccataggtgagttttgcctctttttgaacttcaaatactgagactatacagtatgttgtattttgtgtctgatttcttttgcttaatgttgtatgtctgtgagagctcaccatgtagtagttcattcattcattgataataaaccataatttatctatctgttctattgctgatgaacattygaattatttctggttttttctttaatgagcattgctattatatacacatttgtgtattactttcagtgcattaatgtagactttcttttggactaatacctaggaatgaaatttctgggtcataaggtatacatatgcccagctttagtagatattaccaaacagctttccaaagtgaattttctaatacgagctccaactgctccacattcttgtgaacttggtgaacttggtgttggcaagtgtcagtgtttttaattcaaatgtatgtagtggtattatattgtagttttaatttgtatttctgtgataactttttatatgttctagatatgagtccttttgttagttgtaggtattacaaatatcttctccctttcataatattaaccattttttaatattcagaagttcttaatttaaataaattccaaattattattttgttcctttatgggtagagacttttatgttctgttaaaaaaaaactttgttaacataactacttcaaagtcaagaagatattttcttacgttactatctggaagctttattgttttataatctacctgggaataaatttttatgaattgtgtgaattagaggtcatattttttttgaaatacagaaatttaattgctccagtaccatttataagcatttagatgtttagtttttccagtaccacttattgaataaactgtttttttcttttgaattactctttcacctttgttgaaaaccagttgaccatatatgtatgggtctacttaggtgctcttacatgaatatgaatctttgatttatatatctattcttacaccaatgccacaatagtcctaattactgtacctcatagtaattgaaatacaaattatttttattaggttattctaggtgccttgaacctcatagaaattttagaattagcttgttaatttttacaaaaaagtccactgagattttggttaggastagattagatctatggatcaatttgtgctgaactgacattttaacagtgatgagtcttctgattaaaaacatggtatatatctctacatttattgtggatacaaatcttgcacatattttattaaatttgtccccaagtatttcatatcttctgatattttaaatggtactttataacatttaatttaaatatatcacaataattctttctgccctctccagtctattttaaaatccatccagtgaactttttttttactttagttcctgaattttcatttgttttttgaaaatagtttccattcctgaaatgtcctatctattcatccattaggactagcctcttttaaaatctatttatgatagttgcattacaccctttatttgctgactacaactgggttttgtttctgttgactgatttttcttttactatgggtgacattttcctgtttcttcatatgatagtaagttttggttatatacttgacagcatagaaaatagactataagtattttggattcttgtttgggtgaaatggtagagatggaaaaagaaagagatgtttcggattcttttattttccttggaagagtgttgagttttacttcagcaggtggttaaattactgatgaataaccaggagtttgtgtagcctttttaacaggttgattcggtttttattcttacagagaattcttagtcctgggacatagtcttttattctatagtgtggccttggtggagtttcagtggacagtttgatgtgtttacaaaacccatctaacttgcaggattcaaactttaaactctgttgttcctgaaatgaaatgggcagcaattgaaatcacagcacagatttttatttttattttttttccttatgagtattggtttctattgggttcttcagcatctccccaattttagaaaaattcatgtgtacctttagggctccccagtctgtagttttctcttttatgagatttttttaccttcagtttttgctcattctgtcctttcccagactctgtcctgtgacatcttaaatcagtaagatggtagctttctacttgagttctaactgccctatgctgtcccagtggagagtgtacttacaggaaatgccatataaatgtaactctcaaccactacggtttctagtatttcaagagtcaaattctctccagtttcttttttctttctgtccttgtcaggtgccttgaaatagttgttttgggaggagccaagatagctgactacagggttcaggaagagcttctcccaccaagagaccacaccgtcaaaatcagcacattctgaacagtacttcggaaggaaggcattgaaagtggttggaaggagaatgcagatcctgggctgaagkggggaggaagttgggaaccctgcatggggttgccaagcaccaggactcattcctggccctgagaggctcccagggaagggatgagttaaataggcatagagtggcctgctctcaccagggacctcaagaatcctaggtgcaggagaccccatgatccccatagacatttgaactgacaaggagagctgtttggagagctggcaaagacaggaatccagcctgcatggaacccagaaggtttggaacaagaatgatcacagtggcacatggccagggatgcccagcccccaaggcttgccatactcctctaggtggttttggcctttcttaactgtcagatctagacagaacagggctatctaactgtagggtggagccagtctgatgagtgctcctctgtctgcccagcctctcccaaggtctctgtctggctgcatccacttgcagtacagcctcagacgcccagctgatatactttcctgtagccaccaccataactctttggctggtagatccaatataactgtcagataacttttgcagatgggccctcaccagtgtgcaccctctcacagcttccacccaccactttgctggtgtgcattcacctgcagcctcttcctataaaccttgccactgccaccctggtgccactggagcacatgtgcatgcacagcccccaccgccctaccactgccctgttgctgcaggtgcacacatgtgagcatgaaccccactgacaccaccctgatgaagggcttttgtcagcaccctccatcagagtattgttgccagtggaccaggaaaatcttggtctctccagtgtagcagggccagagaacaaagctgtgggcttggtcccagcccccacagggttagagcatgcagcacagaagtgatgagctgagycttgaccttctgaaatcatccagaaatgaagccagttgaccaaatccaacttataccacagtcaaaccaccaagggcatcaaagaatataaaagcaaaaagctcgatccaaaggagaacaagctcaaagatttaagggaacatcaacccacacagatgagaaagaaccagtgtaagaactctggccactctaaaagtcaatgtattcttacttccaaatgactgcactagctcaccagcagtggtttttaacccaactgaaatggctgaaagacagcatagaattcagaatttggatggcaagaaagattatcaagatttgggagaaagttgaaacccaatccaaggaatctaaggaatccagtcaaatgattcaagagctgaaagataaaatagccattttaagaaagaaccaaactgatctgatagagctgaaagactcaccaaaagaattttgtaatataactggaagtattaaaagcagaatagatcaagctgaggaaggaatctcagagcttgaaggatggttctttgaaacaactcagtcagataaaaataaaggaaaaagacaaaaaaggagaaaacctctgaraaatatgggattatgtaaagagaccaaatctatgactcattggcatccctgaaagagagggaaagagagaatgccttggaaaacatatttgaggatattgtccacaaaaatttccccaatctctgtaaagaggttgacattcagatacaggaaattcagagacccctgtgacatactatacaagatgactatccccaagacacataattatcattctccaaggcaaatgccaaagaaatagtactataggcatctagagagaaggggcaggtcatctacaaagggaatcccatcaggctaatagtggacctttcagcagaaaccctagaatctggaagagactacaggcctatattcagcatgcttaatccttgaagaaaagaaattccaaccaggaagttcatattcagtcaaactaagcttcataagcaaaggagaaataaaamcctttttagaaaagcaaatgctaagggaatttgttaccactagacctgtctttcaagaggtccttaaaacccatttacacctagtgttccatcattggaacaataagcatatgggaattatttatatcctaytactcaaggtcatcaccaaggtctgattgtaaaaattaaaaaaattgcaacctcaggtataaatgggttaagggagtgctaaacatggaaacaaaagactattaccagccaccacaaaacacttaagtacatagatccaatgcactataaagcaactacataatcaagtctacataaacaccagctaacaacatagatggcaggatcaaatctgcacatatcaatgttaaccataaatgtaaatgggttaaatgccccacttaaaaggcatagagaagtaagttggataaagaagcaagatccaactgcatgctgtcttcaagagacccatctcacctacagtgacacccatatgttcaaaataaagggatggagaaagatttaccaagcaaatggaaaacaaaaaagagctgaggttgatattttttatttcagacaagtcagacttcaaaccagcaatgatgacaaaagacaaagaagggcatttcataatgttaaagggttcaattcaacaagaagacttaactattctaaaaatgtatgtactcaacactagagcatccagattgataaaacaagttcttacagacctataaagatagataaccacactataatagtgggagacttcaacaccctactgacagaattagacagaccatggaggcagaaaactaacaaagatattcaaaacctaaactcaacacttgactgaatagacctaacacatctacagaagactccacccaaccacagaatatacattcttctcatctgcacatggcacatactctaaaatcaaccaaatgctcagctataaagcaattctcaacaaattcaaagaaactgaaatcataccaaccacattccaggtcctcagtgcaataaaaatagaaataaataccaagatggtctctcaaaaccatacaatgacatgaaaattaaacaatgtgctcctgaatgacttttgggtaaacaataaaattaagggagaaatcaagaaatactttggaataaatgaaaacaaagatacaatgtaccagawtctctgggacacagctaaagcagtgttaagaggaaagtttatagcaccaaatgcccacatcaaaaaggcagaaggctctcaaattgacagtctaaattttagctagaggaactagaaaagcaagagaaaaacaacctcaaagttaatggaagaaaagaaataaccaaaatcagagctgaactgaataaaattgagacgtaaaacacattttggtgtgtatatgcatgataaaattctactcagacataaaaggaacaaattaatgacattcacagcaacttggatggagctggagactattattctaagggaagtaactcaggaatggaaaaccaagcattgtgtgttctcactcacaagtgggagctgagctatgatgatgcaaaggcataagaatgatacaatagattatggggactcattggaaagggtgggaggtggggtgagggataaaaaactacaaactgggtacagtgtatactgctcgagtgatgggtgcaccaaaatatcacagatcaccactaaagaacttactcatgtaaccaaatgccacctgttcctccaaaactcatggaaataatttttttaaaaaataaaaaatcaatgaaacctaaagtttgttttttgaaagaacaaataagattgatagactactacctagattatgaaaaaaaaatagagatgatccaaataaacacaatcagaaataaaaatggggacattaccatcaacctcacagaaacataaaaaaccctcagagactattatgaacacctctatgcacataaactagaaaacctagaagaaactgataaatttccagaaacatacaagctcccaagaatgaaccaggaataaattgaaaccctgaacagatcagtaatgagttctgaaattgaatcagtaataaaaaaatccctgctaatcagaaaaagccctggaacagatgaattcacaactaaattctaccagacatataaagaagagctggtacccatcattctgaaactgttcaaaaaatcgaggaggagggattcctccctgattctacgaggtcagcaacactctgacaccaaaacctggcagagacacaatgataaaagaaaacttcaggccaatatacctcatgaacatagatgcaaaaagcctcaataaagtacaagcaaactgaatccagcagcacatcaaaaagctaattcatgacaatcaaataggccttatccctgggatgcaagttccgttcaacatatacaagtcaataaatgtgattaatcacaaaaacagaactaaaagacaacacacgatcatctcaatagatacagaaaaggctttcaataaaattcaacatcctttcagtttaaaaaccctcaacaaactaggcatcaaaggtacatacctcaaaataataaaagccatctatgacaaagtcacagtcaacagcatatgaataggcaaaagctggaagcattctccttgagaactggtgcaagacaaggatgcccaccctcatcactcctattcaacatagtactggaagtcctagccagaacaatcagtcaagagaaagaaaaaaaaatgtatccaagtaggaagagaggaattcaacctatctttctttgcagacgatttaagcctatrcttagaaaacctcatcgtctctgcccagaggctcctagacctgataaacaactttagcaaactttcaggatacaaaatcaacatacaaaaatcascagcatttctatacagcaataacatccaagcaaagagccaaatcaagaatacaatccattcacaatagccacaaaaagtacaaaatacctaggaatacagctaatcagggaggtgaaaggtctttacaaggagaactagaaaatgctgctgaaagaaatcagacatgacacaaataaatggaaaaacattccatgctcatggatcagaagaatcaatattgttaaaatggccatactgcctaaagcaatttacatatatatccaaaagaaaataaatcattctaccaaaaagacacatacactcatgtgttcactgcagcactatttacaatagcaatgacatggagtcaacccaggtgcccatcaatggtggattggataaagaaaatgtaccatgtatacaccatagactactatgcagccataaaaaagaatgaagtcatgtcctttgcagcaacatggatgcaactggaggccattatcctgagtgaatgaacacaggaacagagaaccaaatatcacatcttctcacttatacttgggagctaaacattgggtacatatggacacaaagaagggaataatagacattggggcctacttaaaggtggagggtaggagaagggttaggattgaataactacttaccaggtactgtgcttactacctgggtgatgaaataatttgtaccccaaacccagtgacatgcagtttactgatgtaacaaatctgcacatgtacccccgaacctaaaataaatgttggaaggagaaagttaaaaaaagtagttggtttatatattttgtctgttatttgtgagaggattagtcatatgtattctatcttattattgctagcagtggaaactgccactttctgttttgagtttattttttcctctgagtaaataattttaagttggaaatcagttctttttttcttttttaaagcaagttggagaggttattcttttgcctctggattccattgttgctactgacaaattaactataagtcattttgcaacttccttgaaggtactgtgccttttttctctgacttgtttaaaccatttttaaaatcttttgtttttagaaatattgtggcttttttgctcccatagttcggcgagtggaagagagtggtgtccagcagcttcttctctccctttgtttggtgagtgggagggaatgttacagcaattttactcctgctgcccccagcttggtgaggaggaatgttacagctattttgctccagcagttcagcaaattcttgtcctgagaccaagaggaataaggtacatggacattggagattgagtaagacaaagtaaaattttattgagtgacagaaagaaaactctcagcaatgagaggggtcctgaaagtgggtaaggctgtgaggctgagtctggggtttttatgggcttagaatgggggactgcatgctgataggtccttgagtggtcttggaaaaagcaccattcaattggttaaaagacatcattcagaaggaaccagttgagagagagggggtaagatagggatgaaagttctcactccagtcgtggactctaatgctgaactggcagttcgattttcaggttttagactttcctttgcttgaaggttgggtttcactggggacccatccctgtctgcagaggaatttgtctcctgttgctgtcagtaatattattataatatgccttcatgtggttttcttggtatttatcctgctaggggtttatagcacttggaagtctatggtttgatgtctttcatttattttggagaattcttgatcattttctcttcagatatcccttttcttcttctcttacatgtcttttcaaattatgattatgcatttaatattttttcatcatgtctcataggtctcttatgctcttttctgtattttgtacatttgtttttctcttcatgcttctatctggacattttctattaacatattatggttaataatcctgtgtttagctatgtctatgtgacattgaatccaactgtttcaatctttattatattacttggttcaagaatttccacttaatatgtttttacaaattataatttcctgctgaaattttcatcatgatataatttttcttgatcatctcatttatacttaatatccatatctaatttgtgtaatatggctctcttgtaggtttgttcctattgtctatttttccttttggtttcttaagtatccaatattgtctttggtatgttggataattttttattggatgctggatattgtgtattaaaattatagaattaatttttaaagtttggtaaagtaccatttaaaatgtggaatgttggctagacatttcttcctaggtaggcccagaactccaattttaccttcctaacttgctgagaaaaggcttaaaattatttgcccagttcctctaatcagctgcaacattcttttgacttctttgttgttcagtctctctaccacttggcttctcataactatagacaaaaagtcaactccaggtagacttaggatctaaatgtcaaaaacaattttaaatactctttaaaaaataagagtttttttttacgctttgggagtagagcaagatttgttaaacatgaaacaaaaagctatgaaaagacatacattttactagctcaaagttaactagtttaaattttactaattcaaatcttactasttcaaaattaagaactttgttctgtcaaaaaatttttaaaagaaaatggaaagatacactgagaraagatattggtataaatccaacaagggatttgtaacaagaacatatagcgaaccttcacaaatcaaaaagaaaagcaaaatgaacaaaaggaaaatggcccgaaaagaatttcacagaagagtatacacatgacatcaataagaatataaagagatgtctgtcctcattagtgagatagatatgcaaatgaggtatcattttatgcaattaaactggcaaaaattaaaaagtctgacaataccatatgttagaaagactttgaagcaataggatcttttaaacattgcttgtgggaatgtaaattggtacaactactttgaaaaacagttttggtatgtcacgtttgtcaaatgccaaagttccatatatgcatggctatgtttcttgactcagatcaattccatttctggtggtggtggtgtatagaaatgcaatagacttttttaagataggtacttgatgagatgttttctctgaaatgaaacatttgaatggtaattttaaaaagcagaaaacatttgaattatgcaaacacacatggcctgtccctttgggatcccctaggatagtaaagccttagtactttgtttggcttatgtgagtaaccagttttgcaaaagtgatgtaatgtagtatatgatacttgctgcttatacatgatattgcaaagaacagagtattgtaacagataattaatatattttgtattcataaacatttaggaatattttttctaagatagagaaaaatgtatacagtgtagtcagcatagtgatacatgatctattattatggtagctgggataacttgactttgagatttttttagcatcatgagttgtctttcagaataaattctagagacaaatagtaagcaaaaatattatttagttttgttgttggggaaaaagataactaatgatctgtgtgtaacaagtcttaaagatttgtcagtcaaatttagagttgtagagcaaacttggttgaaatttacttgaaaggtggcttagtagtactatgagatccccacagagggtaaggttctcagttatccaggttttagcttttgctttcaactactaaaaacttttcacatggaattatagattttaattgcaatagaaaaggcattctcttgttttttcattaatgctttgatgaatataaaaagaacaggaaaaaatagtggaatataaaataagcctggctcagcatttgttctaatcagaaataagagtttataatgagagagaaagattatggaaaggaagtgattagtcagtataacagtgggtgttgttaggagagaaagaagaggatcacaaaagaaactatttatactattttcctatgcctttttcctattaatttgcaaacatttattgaatgtctactgtttacctattttggttaaatatttagtgcctatatttggtactattttgggccctgggtatataaaaataaataagatatgtcctgggcacccagagtatattgggaaaaatagatatgcaaatagctgtaataatgtctgataaatgacactgtaatggtatgaacaaaggctgtggaggsacataggaaaaagcaatcaaatagcgtttccaaatagtgtttccaaagttctttcattttccattattaagtaggggaaagtgaatctccctcatatgaatacagataagtattatctgtatactatctgtctttccccagagccttacatttctttctctcttttaaaaataattatttattgaaacctttttgtgggccaggctctgttatatatgctgggctcgcaaaagtcaactagatagataaggcttgccctcactgagctgactaacattttagtgggagacagacaggaaaaaaagtaaagagatttgcttttaattcttaaagtgtatagattctttcttcttgaaacgtttaaaaatgatattagtataaaatagttttctcattagatttagatatctaaaaatgtgttagatttctaaaaatctaacacatttttagattcctagtaaaataaaatgaatataatggttccttaacttataagtggataattaacttaaaatttcaagagtgttcagggaaagattaaggctcaactttttgtatactactcagagaagccaggatgcctacaaaggtggagcacagcactaatcaaacccatgcatactttaatgcttagcccaccactactaccactaaagcctgacgacaggtccatctgccaatccagtcccccccccataaattcaatacagtctccactaataactttacctaatgtatcaaggaaaccgcagataccactaaggtttatagccaaagaagtcatacttcactactgcacacacacacaagcaaagccaaagggccccacccaagcaataccagagacacagcttcaggaagaagcaccctccatgaaaaaaagtaaattcaaaaatagaaacaacggttacaccagatgtggagatatcaatgtaaagattcaggaaacctaaacctaaaggaacacaataattcttaattattaataattaataataagatagatcttaacaaaaaagaaattatcagaatcccagatgaagaattcaaaatactgattttaaggaagctcggtgagatgcaagagacatctgaaaccaatgtaaagaaatcaggaaaacaattcagaatatgaatgagaaatcaaggagacagatattaaataagaaacagaaattctggaactgaagaatttattgatggaaatagaaaatgtattcaaaagcttccacaatagactagactacgtagaaaaaagaatttgagaactggaagacaaatctttaaaaataatccagtcagacaaaaatatataaaaaatatgaaaaggaatgaacaaagcctttgagaagtttggcacaacataaagtaactgaatttacaaattattggtgttcataagggcaaaaagggatcaaaaggtttagaaagcccatttaatgaaataatagatgaaaacttctcaagtataacaggagatttagatatccagatacaggaagctcagtgatccccaaataaatacaatgcaaaaaggactttgctatggcacattataatcagactgtctaaagccaaagtgaaaggcacattctaaaacagcaagagaaaagcccctagtcacaacagaaactccatcaaactatcagtggacttctcagcagaaactttacaagccagaaaagaattgcatgatatattcaaagtgctgaaagaaatcaactatcagccaataattctatatccagcaagattaaccctcataaatgaaggagaaataaacactttccagacaagcagatgctaagagaattcatcaccaccagaccagacctacaagaaattcccaagggaatcctgaacttargctgagcatggtggctccaatctatgatcccagcactttgggaagcctaagcagtagcatcacttgagtccaggatttcaagaccagcctgggcaacatagtgagactctggctctacacacacacacacacacacacacacacacacacacacacacacacaagttagctgggtgtcatggtgcatgcctctggtcctagctacttgggaggctgargtgggaggatcacttgagcctgggaggtagaggctgtagtgagttgtgatcaggccactgcactccagtctggacaacagagccacagcctgtctcacacaaaaaagagagtactaaacttgaaaggaaaaggacatttaccatcatgaaaaacattaaaagtgtaagtcattggtagagcaagctcacaaaggaggaagagaaagaaatcaaatggaaccactacagaattacaccaaaccacaatgataaacaataagagaaaaagaagggtacaaagaatttttttaaaaactagaaaacaattaacaatatgacagaaaaaatcccttacatatcaataataactttgaacataaatggactacctgctccacttaaatatgtagactggctgaattaatttaaaaaagatctaagcatatgctgcttataagaaacttacctgaaaagacacatatagactaaaaatagggatggggtggggagatattccacaaaacagaagccaaagcaagcaggagtacttgcatcagataaaacagaatttaagtcaaaaaccataaaaaagacaagatcattatataatgrtagagggatcaattcaggaagagaatagaacaattctaaatacatgcatccaatcctggagcacccgtattcataaaacaaatatgactagatctaaagagagagagacagcaatatggtaatattaggggacttcaacaccctactcctggcattacacagattattgagatagagaatcaataaagaaaagttgaactttaggccaaatggacctgacagacatttacagaacactctacccaacaactggagaatacacactctttacattagcaatggaatgttctccaagatagaccatatattaggctgcaaaacagtcacaacaaattaaaaaaaattgaaatcatatcaagtatcttctcagaccatagtggaatagaactagaaatcaataccaagaggaactttggaaagtatacagacacatggaaattaaacattatgctcctgaatgaccactgggtcaatgaagaaattattattgaaataaaaatttttttgaaacaaatgaaaattaaaacacaacataccaaaatctgtgagatacagaaaaagcagtgctgagagggaagtttatggcattaaatacctacatcataaaagtagaagtattacaaatttataatctaataacacttcaaggaactagaaaagtaaaaacaaacaaaaccccaaattagcaggaaaaaagaaataacaaaaatcagagtagaattaaatgaattagagactaaaaaaaatacaaaagatcaacaaaacaaaaggttggttttttgaaaagataaacaaaattgataaactgctagctagaccaaccaagaagatggaagactcatgtaaaatcagaaattagaatgaagagattacaactgataactacagaaatacaaatgatcatcagagacgattataaatattgatatactcacacactagaaaacctagaagaaatggagaaattcctggaaacataccacctgccaagattgaascaggaaagaatagaaaacctaaacagaccaataattagtagcaatattgaattagtaataaaaaaactcccccaaaagaaaagcccaggaccagatggattcacagctgcattgtaccaaatatacaaagcactaattctaatcctcctgaaacttttacaaaaaattgaggaggaaggaattctccctaactcattctttgaggccagtattattctgatacctaaaccagaggtgacacatataaaagaaaacagatcattatccctgatgaacagagatgcaaaaatcctgaacaaaattctagcaaactgaacccaacagcacatcaaaaatatattacactggattaagggttccaagatggccaaataggaacagctccagtctacagctcccagcatgagtgacgcagaagatgggtgatttctgcatttccaactgaggtaccaggttcgtctcactggggcttgttggacagtgggtgcagcccatggagtgtgagctgaagcagggcggggcatcgcctaacccaggaagtgcaagggcttggggaattcactttcttagccaaggaaagccgtgacagacggtacctggaaaatcaggacacgcccacccaaatactgtgcttttccaatggtcttagcaaacggcacaccaggagattatatcccgcacatggctcacagggtcccatgcccatggagcctcgctcattgctagcacacagtttgagatggaactgcaaggtgacagtgaggctcagggagggacatctgccattgctgaggcttgaataggtaaacaaagtggctaggaaacttgaactgggtgaagcccacygcagctcaaggaggcctgcctgcctctgtagactccacctctgggggcagggcatagctgaacaaaaggcagcagaaacttctgcagacttaaatgtccctgtctgacagctttgaagagagtagtggttctcccagcacagagtttgagatctgagaatggacagactgcctcctcaagtgggtccatgacccgcgagtagcctaactgggagacacctcccaggagggtctgactgaaacctcatacagctgggtgaccctctgagatgaagcttccagaagaaggatcaggcagcaacatttgccgttctgccatatttgctgctctgtagcctccactrttgatactcaggcaaacagggtctggagtggacctccagcaaagtccaacagacctgcacctgagggtcctgactgttagaaggaaaactaacaaacagaaaggacatccacaccaaaaccccatctgtacgtcaccatcatcaaagaccaaaggtagataaaaccacaaagatgggaagaaaccagagcagaaaagctgaaaattctaaaaatcagagcacctcttttcctccaaaggaatgcagctccttgccagcaacggaacaaagctggatggagaatgactttgatgaattgagagaaaaaggcttcagatgatcaggaataacaaacttctccaagctaaaggaggatgttcaaacccatcacaaagtagctaaaaaccttgaaaaaagattagacaaatggccaactagaataagcagcatagagaagaccttaaatgacctgatagagctgaaaaccatggcacgagaactacgtgacgaatgcacaagcttcagtagccgattcaatcaagtggaagaaagggtatcagcgattgaagatcaaatgaattaaacgaagcgagaagagaagtttagagaaaaaagagtgaaaagaaatgaacaaagcctccaagaaataggggactatgtgaaaagaccacatctacgtctgattggtgtacctgaaagtgacggggagaatggaaccaagttggaaaacactcctcaggatattatccaggagaacttccacaacctagcaaggcaggccaacattcaaattcaggaaatacagagaacaccacaaagatactactcaacaagagcaactacaagacatataattgtcagattcaccaaaattgaaatgaaggaaaaaatgttaagggcagccagagagaaagatcaggttacccacaaagggaagcccatcagacaaacagtggatctctcagcagaaactctacaagccagaagagagtggggaccaatattcaacattcttaaagaaaagaattttcaatccagaatttcatatccagccaaactaagcttcataagtgaaggagaaataaaatattttacagacaagcaaatgctgagagattttgtcaccagcaggcctgccctaaaagagctcctgaaggaagcactaaacatggaaaggaacaaccggtaccagccactgcaaaaccatgccaattgtaaagaccatcgatgctaggaagaaactgcatcaactaatgagcaaaataactagctaacatcataatggcaggatcaaattcacacataacaatattaaccttaaatgtaaatggtctgaatactccaattacaagacacagactggcaaattgggtaaagagtcaagacccatcagtgtgctgtattcaggaaacccatctcttgtgcagagacacacataggctcaaaataaagggatggaggaagatctaccaagcaaatggaaaacaaaaaaaggcaggggttgcaatcctagtctctaataaaacagactttaaatgaaaaaagatcaaaagagacaaagaaggccattgtataatggtaaagggatcaattcaacaagaagagctaactatcctaaatatacatgcaccaaatacaggaggccacagattaataaagcaagtccttagagacctacaaagagacttagactcccacacaataataatgggagacttaaacaccccactgtcaacattagacagatcaacgagacagaaagttaacaaggatatccaggaattgaactcagctctgcatcaagtggacctaatagacatctacagagctcttcaccccaaaccaacagaatatacattcttctcagcannnnnnnnnnnnnnnnnnnnataacaaactgtctctcagaccacagtgcaatcaaactgggaactcaggatcaagacactcactcaaaactgctcagctacatggaaaactgaacaacctgctcctgaatgactactgggtacatgacaaaatgaaggcagaaataaagatgtcctgtgaaaccaatgagaacaaagacacaacatactagaatctctgggacacattcaaagcagtgtgtaagggaaatttacagcaataaaagcccacgagagaaagcaggaaagacctaaaattgacaccctaacatcacaattaaaagaactagagaagcaagagcaaacacattcaaacgctagcagaaagcaagaaataactaagatcagagcagaactgaaggaaatagagacacaaaaaaccctgcaaaacaatcaatgaatccaggagctggttttttgaaaggatcaacaaaattgatagaccgctatcaagacaaataaagaagaaaagagagaagaatcaaatagatgcataaaaaatgataaaggggatatcatcattgataccacagaaatacaaactaccatcagagaatactataaacacttctacacaaaaaaactagaaaatctcaaagaaatggataaattcctggacacatacaccttcccaagactaaaccaggaagaagttgaatccctgaatagaccaataacaggctctgaaattgaggcaataattaagagcctaccaaacaaaaaaagtccaggaccaggcagattcacagccgaattctaccagaggtatgaggaggagctggtaccattccttctgaaactattccaatcaatagaaaaagagggaatcctccctaactcattttatgaggccagcatcatcctgataccaaagcctggmagagacacaacaaacaaagagaattttaggccaatatccctgatgaacatcaatgcaaagatcctcaataaaataagggtgaaacaaatccagcagcacatcaaaaagcttatccaccgtgatgaagttggcttcatccctgggattcaaggctggttcaacatacacaaatcaataaatgtaatccatcatataaacagaaccaaagacaaaaaccacattattatctcaatagatgcagaaaaggcctttcacaaaattcaacagcccttcatgctaaaaactctcaataaactaggtgttgatgggacatatctcaaaataataatagctatttatgagaaacctacagccaatatcatactgaatgggcgaaaaccggaagcattccctttgaaaacgagcacaagacagggataccctctctcaccactcctattcaacrtagtgttggaagttctggccagggcaatcaggcaagagaaggaaataaagggtattcaattaggaaaagaggaagtcaaattgtctctgtttgcagatgacatgattgtatatctagaaaaccccattgtctcagcccaaaatctccttaagctgataagcaacttcagcaaagtctcaggatacaaaatcaatgtgcaaaaatcacaagcattcctatacaccaataacagacaaacagagagccaaatcatgagtgaactcccattcacaattgcttcaaagagaataaaatacctaggaatccaacttacaagggatgtgaaggatctcttcaaggagaactacaaaccactgctcaatgaaataaaagaggacacaaacaaatggaagaacattccatgctcatgggtaggaagaatcaatatcatgaaaatggccatactgcccaaggtaatttatagattcaatgccatccccatcaagctaccaatgactttcttcacagaattggaaaaaactactttaaagttcatatggaaccaaaaaagagcccgcatcgccaagacaatcctaagccaaaagaacaaagctggaggcatcatgctacctgacttcaaactatattacaaggctacagtaaccaaaacagcatggtactggtaccaaaacagagatatcaaccaatgaaacagaacagagccctcagaaataataccacacacatctacaaccatctgatctttgacaaacctgacaaaaacaagaaaggaggaaaggattccttatttaataaatggtgctgggaaaacttgctagccatatgtagaaagttaaaactgaatcccttccttacaccttatacaaaaattaattcaagaatggattaaagatttaaatgtcagacctaaaaccataagagccctagaagaaaacctaggcagtaccattcaggacataggcacaggcaaggacttcatgagttaaaaaccaaaagcaatggcaacaaaagcctaaattgacaaatgggatctaattaaactaaagagcttccgcacagcagaagaaactaccatcagagtgaacaggcaacctacagaatgggagaaaattttttcaatctacccatctgacaaagggctaatatccagaatcgataaagaacttaaacaaatttacaagaaaaaatcaaacaaccccatcaaaaaatgggcgaaggatatgaacagacacttctcaaaagaagacatttatgcagccaacagacacatgaaaaaatgctcatcatcactggccatcagagaaatgcaaatcaaaaccacaatgagataccatctcacaccagttagaatggtgatcattaaaaagtcaggaaacaacaggtgctggagaggatgtggagaaataggaacacttttacactgttggtgggactgtaaactagttcaaccattgtcgaagacagtgtggcgattcctcaaggatctagaactagaaataccatttgacccagtgaccccattactgggtatatacccaaaggatcataaatcatgcttctataaagacacatgcacacgtatgtttattgtggcactattcacaatagcaaagacttgaaaccaacccaaatgtccaacaatgatagactggattaagaaaatgtggcacatataccccatggaatagtatgcagccataaaaaaggatgggttgatgtcctttgtagggacatggatgaagctggtaaccatcattctgagcaaactatcgcaaggacagaaaaccaaagaccgcatgttctcactcataggtgggaattgaacaacgagaacacttggacacagggtggggaacatcacacactggggcctgttatggggtggggggaggggggatggatagcactgggagatatacctaatgtgaatgatgagttaatcggtgcagcacaccaacatggcacatgcatacatatgtaacaaacctgcacgttgtgcacatgtaccctagaacttaaagtataacaactgtatatatatgcatatatgtgtgtgtgtgtgtatatatatatatatatatatatatatatatatatatcactatgatcaggtgggttttatatcgtgatgcaaggatagttcaacatggccaatcaataaaacctgatacattacataagcagaatcaagggaaagaaacatatgttcatctccatagatgcagaaaaagtatttgagaaaatacagtatcccatcatgatacaaactctcaacaaagtgggcatagaaggaatctccctgaaaataagaaagaccatatacgagaaacctacagttaacatcatactgaatgggaaaaagttgaaagcattttctctaagaactggaacaagacaaggatgcccactttcgccattcctattcagcatagtaccagaagtcctagccagagcagtcaggcaagacgaagaaatgtaaggcatccaaattggaaaagagaaagtcaaattatccctgtttgctgatgatatgatcttatatttagaaaaccctaaagactccatacaaaaactcttagatttgataaatgaattcagtaaaatttcaggatacagagtcagtgtacaaaaatcagtggtgttcttatacaccaataatgatctatctaggaaagaaatcaagaagtaaatcttatttacaatagctacaaaaagatatgtagaaataaatttaaacaaggaggtaaaagatctctacaaggaacactagaattcacagataagaaattgtagatgacacaaacaaatggaaaaacatcccatgctcatggatcaaaataattagtattgttaaaatgaacatactgcccaaagcaatctacaaattcaatgcaatccttatcaaaatactaatatcatttttacaggattagaaaaaacaatcctaaaattcatacagaaccaaaaaacagcccaaatagtcaaagcaatcctgagcaaaaagaacagaatagctattattttttttcccacacagttcactgatgtatagaatggctattattaaaaggacaaaaaataacagatgttggcgaggatgtggagaaaagaaaacccttatattctgttggtagaaatataaattagtacagcctctatggaaaactgtatggagatttcccaaaggactaaaaatagaactaccattgcatccagccatccactactgaatatctacccaaatgaagccaatatataaaaaagataccttcacttgtatgtttattgcagcactatttacaatagcaaagatatgcaatcaacctcagtgtccatcaatagatgaatggataaagaaaatgtagtatatatayacacacacacacacacacmtatgtgtgtatatatatacacatacacacacacacatatgtgtgtatatatatacacatacatatatatacaaaacctaggcattaccattcaggacataggcatgggtgtttcacgtctaaaacaccaaaagcaatggcaacaaaagccaaaattgacaaatgggatctaattaaactaaagagcttctgcacagcaaaagaaactaccatcagagtgaacaggcaacctacaaaatgggagaaaattttcacaacctactcatctgacaaaaggctaatatccagaatctacaaggaactcaaatttacaagaaaaaaacaaacaaccccatcaaaaagtgggcaaaggacatgaacagacacttctcaaaagaagacatttatgcagccaaaacactggccatcagagaaatgcaaatcaaaaccacaatgagataccatctcacaccagttagaatggcgatcattaaaaagtcaggaaacaacaggtgctggagaggatgtggagaaataggaacaattttacactgttggtgggactgtaaactagttcaaccattgtggaagtcagtgtggcgattcctcagggatctagaactacaaataccatttgacccagccatcccattactgggtatatacccaaaggactataaatcatgctgctataaagacacatgcacacgtatgtttattgtggcactcttcacaagagcaaagacttggaaccaacccaaatgtccaacaatgatagactggattaagaaaatgtggcacatatacaccatggaatactatgacaccataagaaagatgagttcatgtcctttgcagggacatcgatgatgctggaaactatcattctcagcaaactattgcaaggacaaaaaaccaaacaccgcatgttctcactcataggtgggaattgaacaatgagaacacatggacacaggaaggggaacatcacactctggggactgttgtggggtggggggaggggggagggatagcattaggagatatacctaatgctaaatgacaagttaatgggtgcagcacaccagcatggcacatgtatacatatgtaactaacytgcacattgtgcacatgtaccctaaaatttaaagtataataataataaaataaaataaaataaagaaactatctgaatgcaagagaacactcttataattactaatttttgaaagcttaccgtgtaccactcatggaactaaaaactttagattttatacaacaattatagtagagggggtaaggaaaactattaacaactatacaataatgcctcctctcattatatttgtatgtggccatttaaagtagttaaataaattcccagatacttyagataattcatctatttacttaggtcaaatgactctcaaggtcaaggcttaaaattaaacctgaaatgtaaaagtaaacaactgtttactttttacagaaacctgcccaggaaatggccttcagaagcttcatgcttttaaataactaagcccagcctgctaaagtctatgtataataacacttggctgcttaagaacttaaggttgctccctgattcctcacatatcaatgcaatcttttctgtctaagggtgggttcaactttgaatcagcaagtcctaaagtgtttactttcacttgattcattctctgtttcaggtgaactatttaccataatccttttaactctactaatctatctttgctcagaccattcccttgactaggaggtccactgggtgtatcagtccttttcaaaatggcaccccgagctcttttaatcaagtctttctccagacttcacagagacagaaatagagaaactacagcaaaggaatacaaccataacaagattgttaaggggagccaacagtagctgagagccttctgaagaaggaaagctaacagaagggtgttgacagatgaaaacaagaagagaaagctacagtttagaatatgatatgaggagtctgcagaggatgtcagagtcactctgcccactagaatccaaagaatctctggcttggagtaggcaagtatgatacaaggcagaaatgagcagtgggtctgaaaactgaggtgatcacttgaattcctatatgtgaaatgctgtgctccctgtcactttctctattactgtttgccaacagctcaacgcttaaccccaagtcataaaatgagggctttttttcacaacataatttgaggaaattatctggggagtatggccccagagaaaagctgttttatggcaagaaagagggaaaatgccagaaacagaaagacataggataaataaaatggtgtgcctaatccagagatgtctcaaaacacacaattgaaaggacgacatacggtttcagaagaaatatctctatgggggaaaaaaagaagaagacttcacaaaatagttattatgattgaaagagagaccaaatttaggctatgatcaagattcagaacctccagagaaaacaaaaaatatatataggaaacgcataacccaaacataaactagatcagtgtagcacaactttaagcaatagaaaagagaatctatttgaccttcatcataaatcattcccctctgagtggcccaggggttgtgacattgggtccttggagaagaagatatgatttcagtatcctacatcaccctgtactaaataaaatgtatagagtcacagtaacattaatggtgcactgtgattttcaacttttactattagctaacgaacaaatgcagatgacttcattatggttgcatatcagaattaaaatgttaacaaccttggtcaggcttggtggctcatgcctgtaatcccaacactttgggaggccgaggcaggtggatcacctgaggtcaggagttcgagaccagcctggccaacatggtgaaaccccatctctactaaaaatacaaaaattggccgggcatggcggtgggtgcctgtagtcccagcttgtcagaaggctgaggcacgagaatagcttgaacccaggaggcagaggttgtggtgagcagagatcgcaccactgcactccagcctgggcgacagtgggagactccgtctcaaaaaaaaaaaaaaaaaaaaagttaacaaccttgtcaatgtaagaatacaatttgaagtgacagaaaacagaagggaaaggtggaatgcagaagtaaagggggaggaagtggaatggatgctgttagtcttactatacacaaagagtggtcaggacactaattaaaaatgatagaatacaaaacagagggataataataaaacaaaaaataattcaaattatcaaacattggaaggaagaaagggtaaggacacagaggtaggggaacaaaactttcatatttcattgtagggagtaaatagataattccttaaataaatcaatcaaagaaaagagatataagcatacgacttaaagttatgaagtaagcaccagaagatctaaaatcaaacctgcttcctccagattgtgggactggaagcaaaggaggtttttcctagggtgttggattgaaagtagcaaggagcagggcaaaagattattgcttttcatcataagctcttctgctctgtttaatgttttatgatatgcatattttgatctaaaatttttatagatctgaactgaacttcaactcctggaaaattatcaattagccttcttcattcttaccattccacatgtactctcttaacacttttatatttaaaggtactataacatcttgaacattttcatctgctataattattctcatttactttcctaaaactaagttatactgaagttccttgaagtcagtaatcagaacttatttttaatgagattatcagcatttgatacatagtacaatatatttttaattgtgataatgtattaagtgttgagggaagggaaggatagagggagggaaggagagagggaaggagggaggaagggagggagggagagaggaagggaagggaaggaaagggaaggacttgactttcaactttcttatctaatataatacttgattttctgtagtctatctaaccttctgtcttcatctcatatgccagtgttttattcttcttttcagcttttacaaatgtttctgaaattattttttaggagtgctgagatattcccgggaatatgtgttcaatcctgtcagttcacataagatagggagatggcacctgttctctgtctcatagtctgatttcaagggggtgaaaaaagaaaacataagctatggaatgttgtctcttccatgtacctcaagacttatcagtcacccttctccaagcaagttttgcacttgcttccttttctgtccaggctgcatgcttgcaaactgaaagaggaarcaaattttatctctggttttgaggaaattttttttgggggttggtcgtagggacactgggcttttcccatttctttgaatgccaatgaattgactgtatcctaatcccatcattgtctatacaccaattcrtaatgatgtcatgataatcacatcgatctaaaaggcgtaggagagcagcatagcttttattctatttatttttttacttttatttttgacacagggtctcactctgtcacccagactggagcacagtggtacaatcacggctcactgcagcctcaacctctcaggctcaagtgatcctcccacctcagcctcctgagtagctgggactgtaggtgtgcaccaccatgccaagctaactttttatactttttgtagaaacaaggttttgccatgttgcccaagctggtcttgaactcctggactcaagtgattcatctaccttggcctcccaaagtactggcattacaggcatgagctactggggcccaacatagctttcgatcataaaattctccttggggcacctaatctagaagtctttctcaagagaaatcaaaattattgatagttgtttagcacttaggtaactcagaaacaagcatcagaacagatatgctaaatgttgctatttctgtgtagtgagtttcatgcttaactgcctgagaaaggcagacatcttaggaaataaaatattacatagaaaatcaatggagtttggtgatttccatcctttgagacttactgattgtatggtggtctcatcaaatccaatatagcacacaacaggctggtggtaaagtttatgaaagaatctctcgaaaattccaaactgcattaggcctggaagttatgcttcgaggggataaaggatcaaccaatgactggctgaccctgggacacaaaagactgacctgttgccttaaggggagatcattctggtgcgattcactctccagacctcctatgggatcagttagagctatactttagctcagcactttccagtagaaaagctaatgtgagcctcatatgtgattttaaatattttggtagtcatattttaaaaattattagcatttacaaaaaaaatttaagtaaatagaaaaaaatcaaatatttaaaatgtaaaaaaaggtaaaattggttttaaaactgtattttgattaatccaacatatctaaaatatatcatttcaacatgcaatcaatataaaaagattattgacagtttacattttcccatacaaagtatttgaaatccattatgtattttacccttataaaacatctgaattcagatactaaattttcatcagaaatacttgatctgtatttagatgtcataaaaacttatagttgaaaaagatgattcacatactcataatttaaagtttttcaatagctgaatgaagtattggtttttaaaatttaagttacaattagataaaattagaaattcagatcctcagtcacactctgcacatttcaagtgctcagcggccacatgcagtcaatgtttgccatcccgtacagtccaagctttagttcaacttctctcagcttcttctctgccctctcctgcttccctcaccccctcgtagatttcacttgacgggactccagtaaatcagttgcacaagaacctccatcttaggttctgctacttgggcacccagcctgtataaactatagtctattataatctactcgcagagatttgcaatacaattcagcattttaagaatgttgactgagaagttatctagtaatgaacccatgcttagaatttttaattgagttttatgaatttacttaatgtttttcttacagaagagttcttaacatttctagaaacacttgttttccaaggatcacagtttgaggctgtactagagaattattctcaagcaatttcaaagatacttagagtgaccagagtaacatatattaaatgacagaaaaaataaagggaaatggagatacacaattatcaaacagtcaacaaatatttctttagtataaacttgaaaggcaatcccaactctgtgaataactaaccaggtagctctaggcaaatcattttttctttctagatttgagtctccttatttgccttatgtgcattatctcatcaagacacataaatacaaatcagtattattgtagttattattatcatcattaatattagagaggcactgtggagatgtaacctatcttccacatattaatgccagataaatcttcctaaaacatagacttagtcctgttactgtttgactaaaaaattttgtaaggatgccccagcatccttatcttgccattgaaggatctccaaggtttattccaaatttatcattccaagtttatttccaacttcactttccatctatcccacataatgaaccagctttgaggagttccagcactggatggccagtatgaaaatgatgaaccaaaaaggagattgaaaagaaattaccaaagatgtgaaaaagaaaccaggactggcagtgctccattagtcaaggaaacagtatttcaaaaagagaaaataatcaactatgtcaaatatgctgagagttcaagtcagatgacactagagatagcaaagtttgtaaagaccttgtgaagaagatgctgagttcagtttatacatggtgagtatgtaataccaaaacagccaggtggaaccacctagtaaaaggttacagcagtaatgttgtccacagtatgtgtcactactcactggggaagaaatgaacagtttcaactagtatgttgaacatcaaacattcccaagagtggccattatttgtgggagtgagatgagtatgattatctatgtattaatgtagaaaaattattgagaagcactcagaatttggcagtggaactttacatgagaactaaaagttgtcaatatagcaactgtaattcaaatcatgagaatgaagaagctctcccaggaaaggaaacaagaagtgacagagaggaccaagactaacactaaaaaaagagacaagaggaagaagtcaatgaggaaagagaaagacgatgtggggaagtaatagaagaatttcatatataatattctaaaagaaaggcggaaagtttcaggatgagtaaataaatgtcgaatgcagcacaggagttgaagagaattaaaattgttcaaaagtaattggattaaacaacaaatacaccaagcagaacaggtcaggtaaaacaggattaggagtttaagaaaagagtagactaaaagaaagtggaattgttattgaatatttgccagttgtaaagcaggggcaagctaatatgtgtgaagaaagaactaatgaaaaggaaggtaaatgaacatgctacagaaaaaaaggtaattgtagaataaaagtctctcgagaagagaagagaagggatgagctaagatccagataatgattggaaagattagttttaaagagcaaaaaggaacaccacttcttttgaaacttaagaaagggatgagaagaaacagtcaaggacagaaattcttaagatttttattcctccccctgagcaactgcaatagcttaatgcactctttaatgctagaatgtgcaacacaacaataattttcagacccatcttctgtgaacataaactttaggtcactctgttacctttgcacacatttatgaaatggctacgctgtggtgccatcgctatagctgtgaaggagagcagagccatggctaatataagaatcacacctctgatttcagactctttaccagctgagatttcaggccacattttagtttctaggactcattacttacaaatcaacctgttaacatgcattaaatctttgctcccacctttgaattatacttcaaagtaaatggtacacagcttacagaatttctcrtactttmaaaactggaattactgttatttcttaaatcagcttgtctatatgtccagcatatcaagtaactcaaattggaatggctatgcacacatattaagtacttcccaatcatccgcacacctcataatggttgacactgaggagtttgctgaaaatatcaaatgcactaaaagaaaagtctgctgaagatttttcaagagaacattatggaataccatgttgaacgtttttttagcaattagtagtttacaagcaatgtagctaattatctcatcagtcttcaatggaaatgtttccataaactttctgccagctacaggacacaatgcatgcatgttaaaatgtgttagaacaagagttcatcattctctttcaaatgaagaacgaactgcgtctcctgaagcatgctataccaagttgaaaagaatattgcatttgtgtcttaatgcttatctaaggacattgttaagttataataacagttaaatgcacacaacaccaacatagtaagagatggaagtaatgagggcagcagctgttgcctttgaaaccatatataggctgtgagcaattggtggtaaataccaaacatttcacctaagtcctaactgcaacattgttgaacaagtagatggagctgacccgttacttaggaatcgttaacaaaaattgaactgctattttcttttataaataaatattcaatatagctgagtttcaaaagctctttcaatacaggtaacccaaaatggacaccagtaaaaatttttctaatctctagttccctaggacaaaatttatttccttgcatatatatatatgtgtgtgtgtctgtgtgcatataaatatgcatatatatatgtgtgtgtgtgcgtgcaaggaaatatgtactgtactatacacacacacacacacacatatatatatactggaacaatcagggagaagataggtaacattttaaatgttcaatattgaaaattctataatgccatttgttgtttaagtacctaagtatactgataggaagattaagtacacttccaggatgccactttccaagaataatcatttctggaagtaatggttttctctgactaatatggatggtggtaagccttgactcctaattcctactgcaaaaaaaaaaacagtctgtagcctggagtcttgcaaacattgagatgaagaactatgaaaatgtagaaagagagataaatagaaaaaatacacaagtacatatgttatgcacatgaggtatgtgaacattttttaacccaaagtttactactcacaagggagagagaaagtcccctagtttctggctacatccactaccctgccagacatattcatgagccatgcaaagtggggcaagttgtcaactactgtaggcctaagctctacaaacatgcagctgggaggctcctgcattaatatactaaataccatagcatttcttttaatacaaaataccataaccccatatttaggaaggagagctatagttagcttctgatagattcgaaagctccacattaatcttcctagccctccaactgactcttgatgaccttggtggaggcctacaattaaaaatagatgggaggcagtttagcagtggcaagcttccattaatttgcaagacctctcccagtaaacatacatgaacatgaagcccgtggtatctgtttggaattgctacctctggtaggcataactaccgaggctatagacattagactgcacattcaagctccagataattcacatgaaaggatacagatttttctttgtacaaatatatggggtacacctgtaattttattacttgcatagattacatagtggttaagtcagggctttcaaggtattcatcacccaagtaacgtacattgtacgcattaaccaatttctcactatcctctccgctctaaccctctcacccttccaagtctccattatcaatcattccactttctacattcatttatacacaatttttagcatccacttatgaaagcatgcaatatttgtctttttgtccctggcttgtttcacttatgataatgatacccagttctatccaatttgctgcaaaagacatatttcattcttttttttttttgccattttctcatttcttatttttattgtcttgttttattggaaatatagttgttgcatctgtttctttttttattttattattattatgctttaagttttagggtacatgtgcacaacatgcaggttagttacatatatatacatgtgccatgctggtgtgctgcacccattaactcgtcatttagcattaggtatatctcctaatgctatccctcccccctccccccaccccaaaacagtccccagagtgtgatgttcccctttctgtgtccatgtgttctcattgttcagttcccacctatgagtgagaacatgyggtgtttggttttttgtccttgcgatagtttactgagaatgacgatttccaatttcatccatgtccctacaaagggcatgaactcatcattttttatggctgcatagtattccatggtgtatatgtgccacattttcttaatccagtctatcattgttggacatttgggttggttccaagtctttgctcttgtgaagagtgccgcaataaacatacatgtgcatgtgtctttatagcagcatgatttatagtcctttgggtatatacccagtaatgggatggctgggtcaaatggtatttgtagttctagatccctgaggaatcrccacactgacttccacaatggttgaactagtttacagtcccaccaacagtgtaaaattgttcctatttctccacatcctctccagcacctgttgtttcctgactttttaatgatcgccattctaactggtgtgagatggtacctcattgtggttttgatttgcatttctctgatggccagtgatgatgagcattttttcatgtgtttttggctgcataaatgtcttcttttgagaagtgtctgttcatgtcctttgcccactttttgatggggttgtttgtttttttcttgtaaatttgtttgagttcattgtagattctggatatcagccctttgtcagatgagtaggttgcgaaaattttctcccattctgtaggttgcctgttcactctgatggtagtttcttttgctgtgcagaagctctttagtttaattagatcccatttgtcaattttggcttttgttgccattgcttttggtgttttagacatgaagtccttgcctatgcctatgtcctgaatggtaatgcctaggttttgtatatatatatatatatatatatatatatacacacacacatatgtgtgtgtgtgtgtttgtgtgtgtatatatatataatatatatatactgcattttctttatccattcatctattgatggacactgagtttgattgcatatctttgctattgtaaatagtgctgcaataaacatacaagtgaaggtatcttttttatatattggcttcatttgggtagatattcagtagtggatggctggatgcaatggtagttctatttttagtcctttgggaaatctccatacagttttccatagaggctgtactaatttatatttctaccaacagaatataagggttttcttttctccacatcctcgccaacatctgttattttttgtccttttaataatagccattctatacatcagtgaactgtgtgggaaaaaaaataatagctattctgttctttttgctcaggattgctttgactatttgggctgttttttggttctgtatgaattttaggattgttttttctaatcctgtaaaaatgatattagtattttgataaggattgcattgaatttgtagattgctttgggcagtatgttcattttaacaatactaattattttgatccatgagcatgggatgtttttccatttgtttgtgtcatctacaatttcttatctgtgaattctagtgttccttgtagagatcttttacctccttgtttaaatttatttctacatatctttttgtagctattgtaaataagatttacttcttgatttctttcctagatagatcattattggtgtataagaacaccactgatttttgtacactgactctgtatcctgaaattttactgaattcatttatcaaatctaagagtttttgtatggagtctttagggttttctaaatataagatcatatcatcagcaaacagggataatttgactttctcttttccaatttggatgccttacatttcttcgtcttgcctgactgctctggctaggacttctggtactatgctgaataggaatggcgaaagtgggcatccttgtcttgttccagttcttagagaaaatgctttcaactttttcccattcagtatgatgttaactgtaggtttctcgtatatggtctttcttattttcagggagattccttctatgcccactttgttgagagtttgtatcatgatgggatactgtattttctcaaatactttttctgcatctatggagatgaacatatgtttctttcccttgattctgcttatgtaatgtatcaggttttattgattggccatgttgaactatccttgcatcacgatataaaacccacctgatcatagtgatatatatatatatatatatatatatatatatatatacacacacacacacatatatgcatatatatacagttgttatactttaagttctagggtacatgtgcacaacgtgcaggtttgttacatatgtatgcatgtgccatgttggtgtgctgcaccgattaactcatcattcacattaggtatatctcccagtgctatccatcccccctccccccaccccatgacaggccccagtgtgtgatgttccccaccctgtgtccaagtgttcttgttgttcaattcccacctatgagtgagaacatgcggtctttggttttctgtccttgcgatagtttgctcagaatggtggttaccagctccatccatgtccctacaaaggacatcaacccatccttttttatgactgcatagtattccatggattatatgtgccacattttcttaatccagtctatcattgttggacatttgggttggtttcaagtctttgctattgtgaatagtgccacaataaacatacgtgtgcatgtgtctttatagaagcatgatttatgatcctttgggtatatacccagtaatgggatcactgggtcaaatggtatttctagttctagatccttaaggaatcgccacactgtcttcgacaatggttgaactagtttacagtcccaccaacagtgttaaagtgttcctatttctccacatcctctccagcacctgttgtttcctgactttttaatgatcgccattctaactggtgtgagatggtatctcattgtggttttgatttgcatttctctgatggccagtgatgatgagcattttttcatgtgtctgttggctgcataaatgtcttcttttgagaagtgtctgttcatatcctttgcccattttttgatggggttgtttgattttttcttgtaaatttgtttaagttctttatcgattctggatattagccctttgtcagatgggtagattgaaaaaattttctcccattctgtaggttgcctgttcactctgatggtagtttcttttgctgtgcagaagctctttagtttaattagatcccatttgtcaatttaggcttttgttgccattgctcttggtgtttaactcatgaagtccttgcctgtgcctatgtcctgaatggtaatgcctaggttttcttctagggctcttatggttttaggtctgacatttaaatctttaatccatcttgaattaatttttgtataaggtgtaaggaagggattcagttttagctttctacatatggctagcctgttttcccagcaccatttattaaatagggaatcctttcctcatttctagtttttctcaggtttgtcaaagatcagctggttgtagatgtgtgtggtattatttctgagggctctgttctgtttcattggttgatatctctgttttggtaccagtmccatgctgttttggttactgtagccttgtagtatagtttgaagtcaggtagtgtgatgcctccagctttgttcttttggcttaggattgtcttggcgatgcgggctcttttttggttccatatgaactttaaagtagttttttccaattctgtgaagaaagtcattggtagcttgatggggatggcattgaatctataaattaccttgggcagtatggccattttcatgatattgattcttcctacccatgagcatggaatgttcttccatttgtttgtatcctcttttatttcattgagcagtrgtttgtagttctccttgaagagatccttcacatcccttgtaagttggattcctaggtattttattctctttgaagcagttgtgaatgggagttcactcatgatttggctctctgtttgtctgttattggtgtataagaatgcttgtgayttttgcacattgattttgtatcctgagactttgttgaagttgcttatcagcttaaggagattttgggctgagatgatggggttttctagatatactatcacgttatctgcaaatagggacartttgacttcctcttttcctaattgaataccctttatttacttctcctgcctgattgccctggccagaacttccaacactatgttgaataggagtggtgagagagggcatccctgtcttgtgccagttttcaaagggaatgcttccagtgtttgcccattcagtatgatattggctgtgggtttgtcatagatagctcttattattttgagatatgtcccatcaatacktaatttattgagagtttttagcatgaagggttgttgaattttgtgaaaggccttttctgcatctattaagataatcatgtggttttgtctttggttctgtttgtatgctggattacctttattgatttgtgtatgttgaaccagccttgcatcccagcgatgaagcccacttgatcatggtggataagctttttgatgtgctgctggattcagtttgccagtattttactgaggatttttgtatcaatgttcatcaaggatattggtctaaaattctcttttatggttgtgtctctgcccggctctggtatcaggatgatgctgacctcataaaatgagttagggaggattccctctttttctattgattggaatagtttcagaaagaatggtaccaattcctccttgtacctctggtagaatttggctgtgaatccatctggtcctggactctttttggttggtaagctattgattattgccacaatttcagatcctgttgttggtctattcagagattcaacttcttcgtggtttagtcttgggagggtgtatgtgtccaggaatttatccatttctttgagattttctagtttatttgtgtagaagtgtttatagtattctctgatggtagtttgtatttctgtggcattggcggtgatatcccctttatcattttttattggatctgtttgattcttctctctttttgtctttcttagtcttgctagcagtctatcaattttgttgatcctttcaaaaaaccagctcctggattcattgattgttttgcagggttttttgtgtctctatttccttcagttctgctctgatcttagttatttcttgctttctgctagcgtttgaatgtgtttgctcttgcttctctagttcttttaattgtgatgttagggtgtcaattttaggtctttcctgctttctctcgtgggcttttattgctgtaaatttcccttacacactgctttgaatgtgtcccagagattctagtatgttgtgtctttgttctcattggtttcacaggacatctttatttctgccttcattttgtcatgtacccagtagtcattcaggagcaggttgttcagtttccatgtagctgagcagttttgagtgagtgtcttgatcctgagttccagtttgattgcactgtggtctgagagacagtttgttataatttctgttcttttacatctgctgaggagtgctttacttccaactatgttgtcaattttgtaataagtgcgatgtggtgctgagaagaatgtatattctgttgrtttggggtggagagctctgtagatgtctattaggtccacttgatgcagagctgagttcaattcctggatatccttgttaactttctgtctcgttgatctgtctaatgttgacagtggggtgtttaagtctcccattattattgtgtgggagtctaagtctctttgtaggtctctaaggacttgctttattaatctgtggcctcctgtatttggtgcatatatatttaggatagttagctcttcttgttgaattgatccctttaccattatgcaatggccttctttgtctcttttgatcttttttcatttaaagtctgttttattagagactaggattgcaacccctgcctttttttgttttccatttgcttggtagatcttcctccatccctttattttgagcctatgtgtgtctctgcacaagagatgggtttcctgaatacagcacactgatgggtcttgaatctttatccaatttgccagtctgtatctgttaattggagcatttagtccatttacatttaaagttaatattgttatgtgtgaatttgatcctgtcattatgatgttagctgcctattttcctcgttagttgatgcagtttcttcctagcctcgatggtgtttagaatttggcatgtttttgcagtagctggtaccggttgttcctttccatgtttagtgcttccttcaggagctgttttagggcaggcctgttggtgacaaaatctctcagcatttgcttgtctgtaaagtattttatttctccttcacttatgaagcttagtttggctggatatgaaattctgggttgaaaattcttttctttaagaatgttgaatattggcccccactctcttctggtttgtagagtttctgccgagacatccgctgttagtctgctgggcttccctttgtgggtaacccgacctttctctctggctgcccttaccgttttttccttcatttcaactttggtgaatctaacaattatgtgtcttggagttgctcttctcgaggagtatctttgtggtgttctctgtatttcctgaatctgaatgttggcctgccttgctagattggggaagttctcctggataatatcctgcagagtgttttccaacttggttccattctccccatcactttcaggtacaccaatcagacgtagatttggtcttttcacatagtcccctatttcttggaggcttcgttcatttcttttcattcttttttctctaaacttcccttctcgcttcatttcattcatttcatcttctatcactgataccctttcttccagttgatcgcatcggctcctgaggcttctgcattcttcacgtaattctcgaaccttggttttcagctccattagctcctttaagcacttctctgtattggttattctagttgtacattcgtctatatttttttcaaagtttttaacttctttgcctttgatttgaatttcctcctgtagctcggagtagtttgatcgtctgaagccttctctcaacttgtcaaagtcattctccgtccagcttcgttccgttgctggtgaggagctgtgttcctttggaggaggagaggcactgtgctttttagagtttccagtttttctgctctgttttttccccatctttgtggttttatctacttttggtctttgatgatggtcatgtacagatgggtttttggtgtggatgtcctttctgtttgttatttttccttctaacagacaggaccctcagctgcaggtctgttggagttttctagaggtccactccagaccctgtttgcctgggtatcagcagcggtggctgcagaacagcgtattttcgtgaaccgtgaatgctactgtctgatcattcttctggaagttttgtctcagaggggtacccagccgtgtgaggtgtcagtctgcccctactgggggttgcctcccagttaggctgctcgggggtgaggagtcagagacccacttgaggaggcagtctgcctgttctcagatctccagctgcgtgctgggagaagcactgctctcttcaaagctgtcagacagggacatttaagtctgcagaggttactgctgtctttttgtttgtctgtgccctgcccccagaggtggagcctacagaggcaggcaggcctccttgagctgtggtgggctccacccagttcgagcttcccggctgctttgtttacctaagcaagcctgggcaatggcgggcacccctcccccagcctcgctgccaccttgcagtttgatctcagcctgatgtgctagcaatcagcgagactccgtgggcgtaggaccctccgagccatgtgcgggatataatctcctggcgtgccattttttaagcccgttggaaaagcgcagtattagggtgggagtgacccgattttccaggtgccatctgtcacccctttctttgaccaggaaagggaactccctgaccccttgcgcttctcgagtgaggcaatgcttgccctgctttggctcgcgcacagtgcactgcacccactgtcctgtgcccactgtctggcacgccctagtgagatgaacccggtacctcagatggaaatgcagaaatcacccgtcttctgcgtcgctcacgctgggagctgtagaccggcgctgttcctattcggccatcttggctgccagccgcattcagatagtttcatgctttttcagaacactttgacatatatcaatggcaagatctttatagcaatctcagtgaagaatagaattgatattaaaagcctatttttaagcatggtagaactgagagaaaaaggggtgggtggaagaggtgtcaaacatgacacagttttaaaagtgttttaagcagtataatagttttaataaggtaagattcacttgacctattccagctcctttctagtggagtatatttgggagggaccatactacagaggttggaaagataaaaaatacatttccaaggctcttcttgcatctgggactatgactcaggttctgcaaaaaagatgcatacctgtgagacttgtaaggatgaggtaagcagtatgagagtggccatgtttagaaaggttggaaagataaaaagatacatttccaagactcttcttgcatttgggaatatggcttaggttctgcaaaaaagatgcatacctgtgaaacttggaaggatgaggtaagcagtatgagagtggccatgtttagagagatagggtcttgttgcaatctagtggcagaagcatttgttcttttagggcagccctgacagagtttctcaggcccagttcctagtatcataggtgttgagtaatgagtggtggtagtagtggggtttctacctaaaatagagctatggtggcattagaagttgttcttggttgatgttcctgccttaatatcattcaaacctggcttttctgggccttgcagaaattctgtaaacaacccaataaccctgaacaaattcctttaccttttaaattagttagaatagattctgttatttgaaactgagatccctttcagatacatatgccaagaccagatttgtctctcaggagtatactcacattaactaagatcatgaagctaagatgtaaaatcagaacctattttaaatttataatgaaaaagttatgcagaacaaagtacacccacacaaccaatatgttctctcactgtagatggatcaatataggcaacataaataataatcagaagattgcttagtgagcatagagatagaacaaaggaggctggataaattgaatgcttaatggtgaaagttaaaaatcatcagattcatctatcctttctgtagagataatcttaccaatggggttctactatgtatggtttattatataaagctcttactctgttggaaactgtttggatgaatatcacmaactttcttttttccatggttgacacagtccctttttgattgataattcctttttttagatataccaaaacttttagttaatttatagtcaaggttagccattgaagcctgggatccattctgttactttaagatgactggtcacagtgcaatcaaactagaagtcaggattaagaaactaactcaaaactgctcaactacatggaaactgaacaacctgctcctgaatgactactgggtacataacaaaatgaaggcagaaataaagatattctgtgaaaccaatgagaacaaagacacagcataccagaatctctgggacacatttaaagcagtgtgtagggggaaatttatagcactaaatgcccacaagagaaagcaggaaagatccaaaattgacaccctaacatcacaattaaaagaactagagaagcaagagcgaacacattcaaaagctagcagaaggcaagaaataagtaagatcagagcagaactgaaggagatagagacacaaaaaacccttcaaaaaatcaatgaatccaggagctggttttttgaaaagatcaacaaaattgatagactgctatgaagactaataaagaagaaaagagagaagaatcaaatagatgcaataaaaaatgataaaggggatatcaacactgatcccacagagatacaaagtaccatcagagaatactataaacacctctaagcaaataaactagaaaatctaaaagaaatggataaattcctggacatatacaccctcccaagactaaaccaggaggaagttgaatccctgaatagaccaataacaggctctgaaattgaggcaataattaagagcctaccaaacaaaaaaattccaggaccagatggattcacacctgaattctaccagaggtacaaaaaggagctggtactattccttctgaaactattccaatttatggaaaaacagggaatcctccttaactcattttatgaggccagcatcatcctgataccaaagcctggcagagacacaacaaaaaaagaggattttaggccaataaccctgatgaacatcgatgcacaaatcctcaataaaatattggcaaaccgaatccagcagcacatcaaaaagcttatccaccatgatcaagtgggctttatccctgggatgcaaggctggttcaacatacacaaatcaawaaaygtaatccatcatataaacagaaccaaagacaaaaaccacatgaattatcttaatagatgcagaaaaggcttcgacagaattcaacaacccttcatgctaaaaactctcaataaattaggtattcattggacatatctcaaaataataagagctatgtatgaaaacccacagccaatatcatactgaatgggcaaaaactggaagcattccctttgaaaactggcacaagacagggatgccctctctcaccactccttttcaacatagtgttggaagttctggccagggcaatcaggcaggagaaagaaataaagggtattcaattaggaaaagaggaagtcaaattgtctctgtttgcagataacatgatagtatatctagaaaaccccatcgtctcagcccaaaatctccttaagctgataagcaacttcaacaaagtctcaggatacaaaatcaatgtacaaaaatcacaagcattcctatataccaataacagacaaacagagagctaaatcatgagtgaactctcattcacaattgcttcaaagagaataaaatacctaggaatccaacttacaagatatgtgaaggatctcttcaaggagaactacaaaccactgctcaacgaaataaaagaggactcaaacaaatggaagaacattccatgctcatggataggaagaatcaatatcrtgaaaatggccatactgcccaaggtaatttatagattcaatgccatctgcatcaagctaccaatgactttcttcacagaattggaaaaaaactacttaaagttcatatggaaccaaaaaagagcccgcattgccaagacaatcctaagccaaaagaacaaagctggaggcatcacactaccagacttcaaactgaactacaagactacataaccaaaacagcatggtactggtaccaaaacagagatatcaaccaatgaaacagaacagagccctcagaaataataccgcacatgtacaatattctgatctttgacaaacctgacaaaaacaagaaatagggaaaggattccctattcaataaatggtgctgggaaaactggctagccatatgtagaaagctgaaactggatcccttccttacaccttatacaaaaattaattccagatggattaaagacttaaatgtcagacctaaaacgataaaaaccctagaagaaaacctaggcaacaccattcaggacataggcatgcgcaaggacttcatgtctaaaacaccaaaagcaatggcaacaaaagccaaaattgacaaatgggatctaattaaactgaagagcttctgcacagcaaaagaaactaccatcagagtgaacaggcaacgtatagaatgggagaaaatttttgcaatctacccatctgacaaaaggctaatatacagaatctacaaagaacttaaacaaatttacaagaaaaaaatcaaccccatcaaacagtaagtgaaggatatgaatagacacttctcaaaagaagacatttatgcagccaacagacacatgaaaaaatgctcacaatcactggccatcagagaaatgcaaatcaaaaccacaatgagataccatctcacaccacttagaatggcgatcattagaaagtcaggaaacaacaggtgctggagaggatgtggagaaataggaacacttttacactgttgggactgtaaactagttcaaccattgtggaagacagtgtggcaattcctcaaggatgtagaaccagaaacactgtttgatccagtgatcccattactgggtatatatccaaagtattataaatcatgctgctacaaagacacatgcacacgtatgtttattgtggcactattcacaatagcaaagacttgaaaccaacccaaatgtccaacaatgatagactggattaagaaaatgtgacacatataccccatggaatactatgcagccataaaaaaggatgggttgatgtcctttgtagggacatggatgaagctggaaaccatcattctgagcaaagtatcacaaggacagaaaaccaaacactgtatgttctcactcataggtggtcattgaacaatgggaacacttggacacagggtggggaacaccacacactggggcctgtcgtggggttgggggaacggggagggatagcattaggagatatacctaatgtaaatgatgagttaatgggtgcagcacaccaacatggcacatgtatacatacgtaacaaacctgcacattatgcacatgtaccctagaacttaaagtataattaaaaaaaaaagaaaagaaaaaaagatgactggtcatttgaccctcaaaatataattcatttctattgtattcttgaatgtgagaagaaaattctttttctttttttgtatatctcttccatccattgtgtaagtgatgactgcagtttaattcccagagaataatcttatttcccgtatttttaaatgccattcctcaaatgctgctaataagtaaaatgcaggtttcttaatgtccagattactattatttctcccacactaataggagacgctttgggctaaagactctctcagttaattagtaacattttaagaggactttaaaatgtttagatttcgatagtgactcaagatgtttttccaggatcacagcttatgaactcatttctaataaaagaagcatttagaaagaatgacttgacttcaaagtaccagttagtatgtataaacctaggtaaaatgaattaaattttgtacataatatattattattaaatatagatttaaggggtatagttacaaaygatttttaggagctagtgtgtctaagtgcctgagggtctattatggagagaaaggagttgttgaactttattgaagagcatgttctttacagcaaaactgtttttatcacacacacattccatactaaattcctgctcaaattgaaatcacagttgaaagacaaaactaaaaggtgcaccagtgcccccaaatcagtgaaaatttaagatcacagaacaagagaagtttctggcaatgaaagagattgggtggtaaaaaaacggggttaaaaaagggccaaagaaaaaaattgatgaagaatccactcaaaatagtattgcatccattaatgacagactggatgaagaaaatgtggtacatatacatcatggaatactatgcagccataaaaagaaatgagatcatgtcctttgcagggacatgaatggaattggaagtccttatcctcagcaaactaatgcaggaacagaaaaccaaacactgcatgttctcacatataagtgggagctgagtgatgagaacacatgggcacaaggcgggaacaacacacactgggtcctgtcaggggttgggttggggagggagagcatcaggaataattgataatgggtgctgggcttaatacttaggtgatgggatgatctatgcagcaaaccaccatggtacacatttacctgactgtcctggcctgccactccccagtcctgtgcctataaaaacccccgagactctagcaggcagacacacaagtggctggatgtggagacaaacacatcttggtggaggaatacacaagcagctgaacattgagagggcgtcgatgtacaggtaacaaacctgtacatcctgcacatgtacccctgaacttaaaagttgaagaaaaaaaatagtattgcatgaaaatcatataatcattattccaagttggctcaaggatttggctggttcaggtctaacctctaacaacgaaaaaaaacctataagaaactataaaataaggaatgattgtacttaaatatgcatggacctgtaatatcaaatgcatccttgaattgtcgtattgtattcttgaatgtgcgttgttatccttttctgtgtgctagcacattatatgagataatacttctcatttttctttgcttttggacactagcggctatcaatgagatctcctgttttatcttcctcatcaaatattcagtctatactgataacccaaaagaaagaattagcaactcttattttcccttacttgcttcaccgtttcctccttctattccaaaatttttcattgctcctttttttacccaatatttttgacctcttctttcctctttagtctatggcatttacccagtttaataaataccagtttcaaacatccctgagggaggcatttggaagtgagagtttctattgatagtccactggttatggacagttgaacccctaaaatagtgtgattgatagtgaaacgggaaaagttcccttgtcctcctcagggggtgtgtgatgggagtgtggctcgcttcttcagtgccccgctgctcacatctctaggggagcatacagacgggcaggctgtggggctccaaccccacaacagtgtctaggggcgaatgtttacagctctgaagccccagtgggcatgtgttacagggtgctcttttagtttagccatccgtagacggcttgcgttagctcaatgagacccctgccttatctcaaggacagggctttttgtatcctggggttcttgccttggtgtaccagaagaattggatcacacatgggcttggagaatgagttcaagcttttattgagtggaagtagctctcagcaggtgggggagacagaaaggagatggtttcccctagaaaactgcctgactcttctccgactgcccagtaaaactccacgtcgttccaccggtcgatggcctgcgggtctgctcttgatgtcctcttcacgtccagccacttgtgtcttcttccaccgatctcctcctctcgacgccctctcaatgttcagctgcttgtgtattcctccaccaagatgtgtttctctccacgtgcagccgcttgtgtgtctgcctgccagagtctcgggagtttttacaggcacaggactggggagtggcaggccaggacagtcctgggaaatgcaacatttgggtgcaaagtcaggagtgcctgtcctcacctaggtctgtgggcacaggcctggaggtggagccctcgccaggaaccacaccctcctctacccagctcttctctgcctcctttccctgtcaatagcaagctgagatttatgatagactgagacacgaaagtttgctgaagctccatgggaaattcttctgtaagtttcatgggagtagccttgattttgacgtgataaatcttcacactaaaatatataaaatatgaacacagcagtgaggatacttttgccttttaaaaactccatgtttatttagtatgtttctctgagaactaaaggctttcacctattttctttatttcacctatttctttattctatgaataaagaaatttctttattctacggtaaagaaatttctttattctttaataaaagaatttctttattctttaaataaagaattcttaatttaaataatttattctttaaaaaaagaatttctttattctttaaataatttctttattctttcttcatttcacctttatttctttatttcacctattttctttattctatgtgtttccataatctttgtgtttgcataataaggatattgataccaaaaaattatgtgacttgctcaggatttcattgaaaggtagcgaacaaggtagatgagctggctgttgactcctgcagtatagtttttcactattatgctttggggtgaggagaaaattcatacctccttttgatattacactgggagcattatttagagctggctgagtattcttcggggaactatttaactgaggcatatgggaaattcctgagatgctaatattattagatatatgaatactgaagctgaaagactgctgggtcaaattttattcttttaagggataaactcaactttatgttgtctgggattttcaggcaaggtccatgtattcagcttaagatatgaaagccaactaaataatttttgaaaaagaatttttagggccacatttatatatatcaaaatggagacccttgttagttgtatgaactttttaaaaatgaagtgctttttaaaaaaacagattatgaattttattagttcatttatctcagatgagggatcagcaaacattctctgtgaawggccagaaagtaaatatttcaggctttgtgggccgtacattgttgcaagtatttaactctgtgtgttgaagaatgaaaatagctatagaaatatgtaagcaataaacaaaaagttatggttgtgttccaataaagctttatttatgtatactgaaatttacattttatataatttttcatgtcataaaatattattcttttgattttttcccaacctttaaaaatataaaaaacattcatagcttgtaggctgcacataaacagggcaggctggatttggcttgtttccatagtttgccgactctgtctgaagtaaaggaactaagaatacaaggaatttcaaaaatatttgacctcttacttgttaagaatctcaagtttctcagactgaatgtatcattggtgggaaaagtaaaaagaaaggacaattaaagctactgttaatttttgtgcaaaagacaactaatatttatagctcagagtttgcttttagctacaaaatgagctctatggggtctccagggatttccgagagagatgcattctgctcatggttttggggcagcatggtgaacaagatcgacaccctctacccccacccttttaatgatcttgatattccccccaaggagagaagttagctgcaatgtatgtaaatgttacttttctactgcttcattataataattactcactagtttttacagttattaaagtgacagtttccagtacatatacatacacattgatttttttttggtcccctctgcaggtatgtttttagccttgtgtttttgactacacaagaaatgtgcctatttttaaataataaaaaaaacttattcaaaggtccttactaaaacctctgtacatctttaattatgctttaataatttagattatatttatgatagaatgtcattttatgtgcttattgaccatttgtattttttctttggagaaatgtctatttagactcttcgcctattttaaaaacaggattgtctttttattattaagtagtaagtttttttttaatagattctggatataagccccttattggatatagggtttacaaacattttcttccattctgtgtgttgtctttttaccttcttaatgattttttttttggagtccaaaaggtttaagttttgattgtccagttcatcaattttttttattgcttgtacttttggtgttatatataagacattgttgcctaactcaagattataaagttgtattcctgttttctttttctaagagttttatagttttagctcttgcaagtaggtctatgatctaccataaacgtaaaggtttatttctgagatagcaattctattggttattatagcttcctagtaagttttgaaattgggaagtgtgatttctataactttgcccctctttttcaagattgttttggctattctgggtcccttgcatttctgtatgaattttaggatcagctggtgaatttctttgaaagagccagtaaggattttgttaaaagtgttagtccatttttgcattgctataaaggaacacctgagactgggtaatttataaagaaaagagatttaattggcttatggttctgcagattgtacatggagcatagcaccagcatctgcttctggtgagggcctcaggaagcttccaatcatggtggaaggcaaagggggagctagcattgtcacatgacgagagtgggagcaagaggagtgcgaggtcccagactcttttaaacaactagatctcatgggaactgagcaagaactcacttgttatcatgaggacagcaccaagacattcataagggatgcaccctcatgrcccaaacacctcccactgggtcccacctccaacactggggattacatttcaacatgagatttggcggggataaacatctaagcgatatcagtcagggattattgtgaatctgtggaccratatggggagtattgctatcttaayaatattaagtcttctaatccatgagcatgagatatgatcatttatttaggtcttctttaatttgtcagcaatgttttgcagttttcagtgtacaagtcttacacttctttgttaaatttattcctaaatgttttatttgttggatgctcttgtgaatggaatgtatttacttttgtaatggttcagaatcctggatgtttatcttcactaaatttttatgctcctttgggtttcactctgtactttcagtatgtacagttggccacattgacttccttgcaagttttgtgtgagcttgtgaactaagactttataatggggccctaaaataacttctgtcatttctgcataaggagcatatcaatagggccaaatttgaccttactgattaacagctgtagtactctgaatggggtgatatatgaaagaataaatttgttaaatatttattgctctgatcacagctgtgggacttgaatttctagtaaggtgaagcctgaattctactttattacttaacctcttgatgaatagaactttgttgaggctgattataagtgataattgataactggtaattttattttaaaatgattgagtgatcctttgatgtagtcactctcgtttttcattttttctcagagaacttttaaatcatacataaaatattgaaatctaggaattgtgcatatgaagaattattatacttgtattttttgggggggaggtgctatggaattatgtcttaatatactttaaggtaggtgtatctgaagatgctgacatttaaaaccaaacagaagaatcttctcattgaagtggttcattttcctatttgagggtacctggtggagaccatgttataatcgttgttgtataccccatagtgctttgcgtattttagtgctgaatagttgatatatgaatgaatgaactgtttgtaagggttaggtatcatttattaaaaattaactttcaacttcaaagcactagaatgagattcttttagcagatgtcaaaaaagcaaagatatcagtttttgccaattcatcatagtataatttaagtgtattcatggctaagcttactacatttagccataaaaggaaatattagaaaaaatgataaattaactttagtcggaaatcttagttataaggtttattttttcacctcaaaagaattaaatttacatcaagaataatataaaagtgtttattggtgggtggcatatcagtcaataggttgttgggaaagaaattcaatagagaataattatgggcagctatttcagctcaaagtttaaacatttatttaagttataaatccatactattttctttttattgactggtttacaatatggattgctttgttcctttgtcagtttgttttactgtaaaccactttaggtatatgaaacttctaaccccaggagatgataataatgttgcaggaatatattttgkgtattttattatcttaaaattattgtcaaatttagctcagtggggtgggtcatggctataatcccagcattttgagaggccgaagagggaggatcacttgaggccaggagttctagaccagcttgggcaacaaaaagagaccctatctctataagagatacaaaaaattaattgggtttggtgatgcatacctgtagtctcagctccttggaaggctgaggcaggaggattgcttgatcccaggagtttgagactgcagtgagctaagattacccctgtactccagcctaggtgacaaagtgagagcctgcatagaaaaaaaaattgtcaaatttaaatatgacatgaaattacttggtcaattttttgaaaattaaaaaatttcatttttctttgaaattctgaagagatgtttagctctattttaaaatcttccttaatattgaaatttatttaggtgcatagtttatagatacattgtacaaaatattttgctcataaaaagatattaataaagttttaagttaggagttgtgtacttttacatacaagtacataattaaagtttgactaaatgtgactgaaagttatttccagtgttttaaaatatagcagataatttttgcttcaagatatatttgttctcattattagaagtaaaaagttcattagttcattagttgtacacacacaaacgcataacttatatagtcgttttgaccgaaaccacaaccaaactatattgactaaaatttccagttttgstgtcttcatggaagaaaacttaatgacacttgcgaagctacctaactgcagaatctttcttgatcttttataatccttttccttgccttgccctgctccaacttttaccattttttccttccatacccaacttaacaactcatctttactgaatgtctctaaagcattaaaaattagtttttaaagaattaatagatatttttacacttatatttgataggtttatatagttaataaaactatataattataattacaactcacatgaaaagattggggagcaagccttttcaacttcttgattaacttcaattattggaagcagaaggtcttcagtatattttacataccrgaaaggagataccattaatatgttgctgagaggaataaaaagtttattaatctagagaggtggttaagaggaggtcttttaagacagcttctactatatcctatctatgatgttgggagatgtttctattacttttatagaaactarccccatcaaattttatgttttataaaacattttatataattttaccaacatggcacatatatacatatgtaacaaacctgcacgttgtgcacgtgtaccctagaacttaaagtataataataaaaaaacacagattagttatgaaaaaattttttttaatagaatcagcccaatcaaagtatttcccagcttattttgagagttcccaatggtgcagcgctcagtgactggctgctcatgtccttccattttcattaaatcattatgctagtctgctgttgcctttacctggctatctctcttctctgatgcatgaatgctgctggtcttgaaattgggaattctgttttctctgaattgctttgttagaaggcactagggcaatgttcagtctaaggctaattcttccccactattgaggcaagactcttctttgtattctatccaatgtcccatgagttatgaagttttccagtctggtggttggacaagcattattcccagtcctgtgtgagtggcaagtacagttacctcaaatccttttgggtggttctttccctagccttgggtggtttcctccagtatactggttgatcagtattcagctgaatactcaagagggagcatgtgcagattatcagtgttctttctctgtgtatctcttccctttatcattctctattctgttttatacatttactgccttgatctcccaggactctcagctttgtctccccagctcagagagtttgccaggctctgccttggtttccccttcctgtatcattgcctggaaagtctctcatggtggtaagctggggctatcaaagggctcatcctgttttttttggtccatttctcagggattactgtccttcactgcctaacatccagtgccttataaccatttttgcatttatttggtctatttttttgtttcaggtaggaaaggaatctggtctctgttattctcccttgactggaagcaaattataacttttaataagactttactgagttcgaagataataaaatggaaataagacatagccaatagtttacaatagcaaccatatgcagccacattcctagtctataaccctgccgtagcacccaaccttgggtccacacagcagtggctagctttgctgcccttccacctgccatgataaggttttcttttatcatacaaaacatgtttgctcctagtagtcaaactgtcttgaacattttaaaggggagtctttactatttttttttaacatctgtgtaagtttaggatcgaattgaggtcatcctcctctcttccctgccaaataaaataattgtctgctaaaaagttaaattcaagcttctacctcttcagagttttcaaattcaaaatggcagtttcccaaccaaaaacaaataaaaccaaaccctgaatgttgagtctcagtctgtgaaccctattatatattgaatcaatgaatatgtactaatgcatgttatatgtgtatgatataaaccttttaccatgatgtatttgtatcacttggmcagatgcatatattagaaatcttaattgaataataaacataatgtcaagtaaaagtttgggaagttttttatctttagtacctgccccttttcattttggttattctctttttcctctggatatttttcttatactatgttttccttgacttttaagtttataatcaatataagcacttttagaaagtagaattatacttttaaatgaagcaaaggaacttgtaaaataaccatataggaagctttataaaataaagaatatttggtaatatgtgtatttggccaacaatttttttgtacttctggagtttatttatttgatcatataaaaagtttatcagccagatttttgtatattcagaaattgtcatctcttacacttatataggtgtgtaaaagttatctctatagatatttgtagactatatactctagtacctaggcatttcataactgattttttttaacgattaaaaaaaatcccgtttttaggaaaggaactaaatggactcagtagaaagaagttttctaaacctagttcttctggcattttcaagacctttagtaaattatttttatgtatagagtgggatttcttgaagaaaaaatgtagttatttttatttgtatgtattttaaaagtgaaatttcctattcagcaaacttcaaagtaaaagcattataagcaagattgggaatgatatttcaaaagagtagactctccacatgtagactttataaaacatagatgctaatattctagatggaaaggaaacctgtacctttttttctatttaattaggaaaataaccattttctcctgtcagaaatcaatatgacagtgaactggctaaattctataaaccagctgtcgttgtcaataccttatcaatagttggaacatgtttcttttacctagaacattcctttgtatatcttctgacacctcaggcagaggtagatcctcctctgtgtctcttagtactttgtacaggcctgtaccagaaacctgtatcagtgtttgttgactttcacttgatctgaacttcttgggctgcaaaaatactgtttcatactgatatctatatcctggatacctaggatacagctgttttatagagggaacaacaaatgtttatcaaagaaaagttgaataatgttcattcatatattcatttggcagtagatagtcaatgtattgaatatctgcaacagagtaggcactcttctagatcctggaaatgctgtggtgaccagggccaatgcagctcttgcacttactagttttatgatccagaagaaaagacaggttttgatacaatttgttataataaattatgatgaaggttatgctagaaaacatagaatcttattgtaagacctatcttggtaatggggggtccaagcttcccataggaagtgatgtttaacttaggaccagagtgtgggctgaaaccagctgaaaagggttaggaatattggggaaattagggataagtccagcaataagaatttaagttgtagcatctttattaatgtattttgggagtgacttttctcttcccaacagagctacctgactggctgtttatattcctttaacaaagacaagaatatactaattgtttaaatgatctctttctgaatatggctctccagccagttgttcaacattccaacatttttagagtcaaaaatacataattttttgatatatatttagttttagtatgtgaagtcaaagacagtattctaaaaaggctattataactttccaactcagaatcacaaaaagaaaaaattaatcttttttgtgggcattcatctgctctctaaattctggaagtcagtttaacttttcacagtctcatagcagcaattctgacttgcagagaagcagatgaaaatcacccacttattggcattaaaaatttaccatctctattagaaatttcctccaaaataacagttaatctttgttgagtgctttccatgtttaaatactgtgctaaatatatgaatgctgtcatctaagcatccaagaaacactatgagataagtcatatttttacccctttcctatagataaggacattgaaggcatttactgtccaagttcccagaactagagggggaatatatgaatttgatctcagaagtgtctagagtcctagttcctaacttggtattgctaaagagatctaaatgagacatactaacatgttgagacagtctcagaccctcctcacaagttttgtctattataagaaacagtattctttattttatttaataaaataactgactcagttttctttatgttaaggttcatgagtcaatgaaactaaaatatttatggatgtaatccataaatggataagacagacccttttgtatatttttgatgggatgactgtattttggagaattttggggcaatatataacaaaacttaaaattcatttgccccttgactcaggaattctacttttaggaatttatcctaaagctaaacttgttcatgcatgtaaagatatatgtcctggacgttctttatagtattatataaaataggaaaaagttggaaatgacttatgtgttcaataggggcctggtaaaataagttacagtgtatcaatgaaatataacttatgtactcttatttaatactcataaaatagtaggtttattattttatattattaaaaaaagaagaaaacgaagagtaatgatgttaagtgacttgattragatactaggacagagacattgaagcagtctggctccagagtacacactgttaattactgtgctatattgcctcctggtcatctgtttcccagtatgaaaggaaaataaattgaaaagcaaaaagaagaaattacagaaaatctctctagtaggatactacttgctaaaggctctatatttttacattttcttcttataacatataaaatatgttttcttataaaatctgtctttataaaacatatttgtatatatgaatgtatatgaatatattcataaaacacatacatgtataaaacatacatatacatttatgtatataaaacatgtatctatatatgcttatacacataaatcatacattcatggaaaaatttctggacagatatgcaagagctgaatagttggtgctttgggggattagtttggagacttttaaaatttttacttgatgttctttagygtggtaaattatttaaaagtaatggacacgtattatagtacttttataataaaaagaagtttagatttaaaaacttaaaaaatagtggatgtggtaattatcaattatgttgttggatgggagtaaagagagttttttattaaatattttcattttatacccttttgaactgggaacttaaaacaatgaaagaatacatatttcttttataataaaatatattttaaatgaaaaggcattaaaaatagtggacacaatattctctaacaattakgtactatgaagtactatttctgtgactaaatttaggatatagtttattcattatattgatagtttagaataaatttgcctatgttaaacttttatcagagagctgcagtcctaacatccattgatttggaaagtaactcaataaagatttaccttgtttttataagcaggattgtttatgattgaagctttagtaataaaaccttttacaagaaaygagattcagcaaatgcagaagttggcagcaattttactagatgttcctagtcagttgagcacaactttcttgcaggaaaatgatattatgcttcttaattccaaaatatttgtgaaaaacaaatgttaatttgaaactgcattgtttattgagagagaaaattgtcaactgacaatatttttatattatgcttagtcttggaatttacttggaattaggttagctgataaatcctgaaataggcatagttgaaacttaaagtataacttatwtggggttgtatttttcaggtgaagctctgaaagtatcagctgagagatttacagatgacccctgttttctcccaaaaagggaggctgtggttcaagctgcccgtgccttgctggctgcggtgacgagactccttatccttgcggacatgattgatgtcatgtgcctcttgcaacatgtgtcagctgtaagtaaaagatggcttagtttaccttggcattgtcttcacttctaatttcattctctgaacctggcrtcgatcctagtgcatcttggcttcactctcatttcttaacatcaccccttcagaagcagactagactgggttgtgaagactaatgtatacctcaaaataaggaagccagagtagttctaaagccaatgggaaattaaacaggagatggcttgcttataaggaaatggctaggaaaagttctagacttttgatcatttaaataactatgctctctataaataaataaataacataattatatagataatatatgataaacatatgagtataaataacttgagaaatagaaaccttaaagttkaagacatttggaaatttatcctggtttgtaaatgaattctactttgccatgtcctcttgattcaggataaagagtgcatgtttacaggtagtctgtgatgtctgtagtaatccattaggaaaatgtagacatgtatttaatatgagtaaataatgtatattagctaggaggatataaagttagcaagatatcctgaatgctttattttgtcagacaaacccacttagcacatttttagtagagagagaattttattaaagcctgttttcagagtttgaccaaatcattagtagtgttcagatgaaaaggttgcaaagaactctttttatatctgttgtattttctgcttgaaataggacccttatactctgtctataaataaatctgcattttcataaagtgtctgtgattttaatataactactctattaagtaagcaatggtcttatttgattaaccttcatgtcaaaatcattttctctaactgctaagctaaacctttctttgcatctttctttttcttttctttctttccttttttctttttttttttgagatggagtctcgcactgtcgcctgggttggagtgcagtggtgatctcggctcactgcaatctctgccttctgggttcatgcaattctccagccttagcctcctgaatagcgggattacaggcacacaccaccatgcctggctaattttttgtattatttatttttagtagagacgggggtttcactatgttggccaggctggtcttgaactcctgacctcgtgatcctcccaccttggcctcccaaagtgctgggattacaggtgtgagccagtgctcccagccacatctttcttgtattcactattgcttattttaacgctagagtgaccctctctgtgtactttcatttttttcttttgatagttttattactgtaaaaacagcaattcaatacctttttttttttttttttttttttagtttaagtagctttttaggaaagggaattgctgtcatcaccaacagctgttgactagaagatttgtaggtgatataattgagcaaaggtttctgttacttgcttcttggtttgttgagtaaccatagacaaattactgaactgatagttttattacagtaaaaagagcaattcaatcttttttttttagtttaagtagctttttaggaaagggaattgttctcatcaccagcagctgtttactagtggatttgtaggtgtcataattgagcaaagatttctgttacttgcttcttggtttgtttaataaccacagacaaattactgaacatttctgagattcatttgtctcatatttgaatacagacactaacaaatgctgtaaacaagaaatgggtacaaaagattaagtggcaggtaattcctagttccaatgacccaataattcctattttagactctaaatttgttgagatagggcagaatgcagggcttttgtaaggtgaaaattgccaccttcataaccaattaggaggtaactgtatataaagaataaaaccaccttcactaccattttaattgagtgtccactaggagttaggcacagaggtaggtaattcacatacatcataccatgcaaatgaagcaggatggcattgtagatcaaacaaaagcaaagtacctcttgcagtaaaaattatagttaatatttgctgggtttttataatgtgccaaacactgtgctggattatttcttttaattcaattcttataacagccctatgatcatgatttctatttaacaaatgagaaagctgaggcacattgaatttaagtaacttgctcaaggaaacaggaaagaattaaaacttttggaacttaactactctaatggttagaacagctttaactacaaacagcttttaaaagtttaggcaaattcatggacctacaaccagttattaaagtaagttagatacaccagaaggtgttttaaattctaaccatcctctctcacacttggtgccttgttagagcctgaatttcaactggattatatgtcacatataagtatgtgtagtaaaacaattatatgttatgaaaaaggaagtggcatcttatcaaagagaagggaacatcttttgtggtaaatcgtgatagtttttcatggtttcatcctcatgaaaagtttatatatgaatcattatcaactcaattatttcaagacttcatgtagaatgaaaatcactaaattgtttctgagatcatcaggattagaattatttagcccaacatttccccaaaagtattctgtagagcatgctttgaaaatatggaagaggaaaaaagttgtttctttttgtaatgatcaatgctgcacatagaaattcccatgaatgttttgatgcacattagcgcgttaaaattgttgagaaatattgccatgaagaagcctgtttaactctgcttaactcagaatttcccaaatgtttttgaccccagaactcttccatagtatattaatcctggaaatttctgaaaccatactttgggaaatatcagtttggaatttttctaataatgtttatgacaatattagcttctacttggaatcaaaagaatcatagtggagaaacttcagtgcccttacagtttaatattttacctgacgtagaaagactctctgataatatgcaacatatgcaactgcctaacaatagatgatcactaacaatgataacaatctcaattttctgagacagtgaagctgattttggacacttctaattgttggagacaaatttctcaaactgagcttaaaactgcctccctgctatttcaaacagtgcgtctagttttgctttctggagcaacacagaatcaaggcaatagaaaaggctcttttcaaataactgatgattactcttaggacttacctatgtctccccttttctaggctaaaaattttttgacttttggatgttctttatatggtaaataccatagaatttctatatatttttcaaattggcttacatttctttgtatgacttttagtttcctgctgaaattttcagtctttattttgatctactcgacatggtgagcagaactgtctgatcctcatggtttgagaactctggtgtttggactccttgggtgcctgcttctgctatcattttccttgcttttactcatggtgtcttgtcttataatgtgaatggctatttttgattggatactgaacatcacctcttctgaaacccacttcaggaaatttctcactgccttattagctctgtgatgtttttaagatgaattattttatcatcaaaccttcgtttccttcagcagaggatcagactgaatttctaatttgctattacaagaaatagaagtcccccaaatcatctctgtaaatccttttctatgcattctagattgtaggtaacttccatgaaatgttgaaatcagtgtcttgaaatcaaaacaaactctctgatgtgaacattccatgatataaatggacaattacatccctgatttaatgtctaacatgatcttacctatcacagtagccttgtcatgttgttggttcatattgattttgaaagcaattacaacctccaactctctgagctcaaactactcctaatccaggtcttcctcctctgatactagtcttttttttaattatgtaaaggtagaagttacatttatattcattgaactttatcttattaattcctgctttttgttacagtccatcatcctttgactctcgattttgtcttcctttcctaacctgatatcattttcaaatttattcatgaaaaaatgtttaatgacatggaaaacagtattatatctttcttttagataataccaatcaaatatgaacatcctttgagtaaagttgttgaaatgagcttcaagcttgcttcattgggctgctgtataaaccatgcttctttatttcattttcaagcacttcttgaaagactttcttgaaatcaagatatactgtttgtggcattgtggatttatcagtctagtaatcccagttataaaggaaatgaagttagtttggcatgacttactttttaatgacccaataagagctctaagtgaccattgcttgcctgcttttattttcttctcctttgttctgaccttcattttttaaattacttataatccacttaattatgatgcaaaaccacttgttgctgggttcttcttgctcttaagatctcaatataattagtttaaaccctcattctgtgtcctatcaagtataatgttctcccccaaatttctgcaaattccttgggagctcatattttcagggtcaactctgtctccaagcttttgcttccactgaattattttcatttatagattgtctttctgtctctattctacattatattcacccagaatctggagttggccttttccccttgcacgaatagacacacagatacacacattctccaacctaccagagcagaccagaatacatgaatgtagtaaaccttacagaaacttacaggaagacggaagggagggatatctatattgcaacaatatattctaaagggcttcaatttgtatgttcgaaatcttcaaaatctcattgatagcaactccatctcattgcccttccacattttttctctagctactttccctcaaacttctaaattatgttcattggaatgcagtaaagaatagttatctctctagcactccacttggcccctgcttatttctgtccttaggatatcactacccaccttaaattactccttaaggtattttcttcagtataggtagtgcccttcctaagaagcattctgtagtcagccatcacactccccaatcctactatataataatctattatagatttttggtgggaggagggtatccactttaaagacatgaatttctcctgggaacacactttttttcccccaaaacagaggactgcctttttatttcttgcccttattttgcatgtaatgggccaaggcctgcctttcttctccttgtctttactatttcattcaggcttctggactttttttttttccctcctgacacttatacaagttcctgctacattttctgtttttgttctttatttcatagcattaaagaattcctctgagctcacaattttttttaagtggccttactcttattttccttcttatgacttttcttacataacagatttttttcaatcccgttgaagtatatttccttttagatgtcagataaatgagatgttactctcttttaatagcatgtatctatatatttcctgattttgtaaagctttcttatttctattaaattatactctttccactgagactgccccaggagaagcaattacaatagaacatttacaaggacacagtctgagaccaccaactagtgtaaacatgggtcactgagcaaccaaaaatggacaagtactgccaaattaaataatcaaggattcctgacatggcacttttaaacgtgtctagttccttaaggaaatgtgtgtgttcttttggggaaaaacaggtccaaatgaaaggtaataggggacagaggaaaaaagtgctgatatttcaatatttcatcaattgtagaaacttggaaaggtattttggctctattgtcaccattgtttataaattttttataggaatttaagttaaaatgtttatctctatgatactgttcaagtgtttcagacttttctgtactatttgttcttcttaggattccacatcttgttttattggcatatggatttcttttttttttttttgagacagagatttgctctttttgcacacctggagtgcaatggcatggtcttggctcactgcaaccttcacctcccaggttcaagtgattctcctgcctcagcctcccgagtagctgggattacaggtgtgcaccaccatgccaggctaatttttgtatttttagtaaagacagtgttttgccatgttggctaggctggtctcaaactcctgaccttgggtgatctgcccaccttggcctcccaaagtgctgggattacaggcgtccgccaccgtgcccaccttggcatctggatttctaagggtcaattttatttggaagaaaataggtttggatggcttctgcttactgggtcaggacatcgtgggaagaaaacatggcttttggcagcatggagaccttgcttgaatcctggctgtgttgttgattagctgggtgattttgggaaagttaaaaatctgcgagctttggtttcttcttctgagttatggggagaataaaacttattccgaataccttgaaagggttttgtgaagactgaatgatatatgacataaattacttggcaagaactggtataagttctctttcaccttctttccctgtcccatctttcttctccttggtatcttgctcccactttttggcccttggagtgaaatgttgtacttattcctaaaaatgaagggaaatttgactattgagttgaactaacttttctaactttttccatttatcataccatagtcatgttttacttgttttgggaatgttgatccctttggattaggtaatagaccagtgtcttacaggaaatgggtccagaatttaacaacttttgtcaaatgtatatttaacatttgctacataattttataaagcatttgtggacaaacaataattctgactatgacaaatatttatattgacagaaaaatcacattaccatgttggcagctgagactctccgaggccaccctctatttaaaaggcagatgtgtaccaacaaaaagattttctaaagccttttattactgaagatatcagcagctgataaagggaaaattactgtataattaagagctgttagaagctatgtatattttgtggaagatcttaggcaaaatatgtaaaagcatattaagatgtaaagaaaaagagcaagtcaagactggtatttaagatgtgtattctgttttcactctgctgataaagacatactttatactgggcaatttacaaaagaaagaggtttaatggacttacagttccacatggattccatgtggattccatgattgtgaggggaggcctcacaatcatggcagaaggcaaggaggagcaagtcacatcttacatggacggcagcaggcaaagagagagcttgtggagggaaactcctgtttttaaaaccatcagatctcctgagactcttccactatcatgagaacagtgcaggaaagacctggccctgtaattcaatcacctcccactggttcctcccatgacatgtgggaattgtgagagttacaattcaagatgagatttgggtggggacacagccaaactatatcattctgcccccagcccctcccaaatctcatgtcctcacatttcaaaactaatcatgccttctcaacattcccccaaagtcttaattcatttcagcattaactcaaaagtccacagttcaacatctcatctaagacaaggcaagtctcttctgcctatgagcttgtaaaatcaaaagcaagttagttactttctagatacaatgagggtacaggcattgggtaaatacagctgttacaaatgggacaaattggtcaaaacaaaggggctacaggccccatgtaagtccacaatccatcagggcagtcaaatcttaaagctccaaaatgatctcctttgactccatgtctcacatccagatcatgctgatgcaagaagtgggttcccatggtcttgggcagctctccccctgtggctttgcgggatacagccttcctcctggctgtgttcatgggttgccattgagtgtctgcggcttttccaggtgcacagtgcaagctgtcagtggagctatcattctagggtggttctggaggacagtggccctcttctcacagctccactaggtggtgccccagtaggtactctgtgtgagggctccaacaccacatttcccttccactcttcctaacagaggttctccatgagagccctgcccctgcagcaaacttctacctggacatacaagcgtttccataaattctctaaaatctaggcagaggttcccaaacctcaatttttgacttccatgcacttgcaggctcaataccacatggaaggtggcaaggcttcagaagctgcgttctgaagccacagcccaagctcgacattggcccctttcagccacggctggagcagctgggacaaagggctccaagtccctaggctgcacacagcatggggaccttgggcttggcccatgaaactgctttttcctcttaggcttcctggcctgtgatgggaggggctgctgggaagtcctctgacatgccctggagacattttccccattgtcttggggattaatatttggctcctcattacttatgcaaatttctgcagctggcttgaatttttcctcagaaaatgtgattttcttttctatcacattttcaggttgcaaattttccaaactttatgctctgcttcccttataaaactgaatgcctttaacagtacccaagtcacctcttgaatgctttgctgcttagaagttccttaaaccagatactctaaatcatctttctcaagttcaaatttccacaaatctctagggcagggcaaaatgccaccaatctctttgctaaaacataacaagagtcacctttgctccagttcccaacaagttcctcatttccagctgagaccacctcagcctgggctttattgcgcatatgcttatcagcattttgggcaaagccattcaacaagtctctaggaagttccagaccttcccacattttcatgtcttcttctgagccctccaaactgttccaaccgctgcctgttacccagttcccaaattgcttccacattttcaggtatctacagcagcaccccactctactggtaccaatttactgtattagtctgttttcatgctgctaataaagacatacctgagactgggcaatttataaaagaaggaggtttaatggacttacagttccaccttgctggggaggctacacaatcatggtggaagcaaggaggagcaagtcacatctgatgtggatggcggcaggcaaagagagagcttgtgtagggaaactcccatctttaaaaccrtcagatctcgtgacactcattcactatcacgagaacagtgcaggaaagacctgcccccataattcaatcacctcccaccgggttcctcccatgacacttgggaattgtgggagttacaattcaagatgagatttgggtgggaacacagccaaaccacatcaagatataagaggagaaattagaaatagagacaaatagggcatacttgctggatttgtcatgaatttcctattggaaattttagggaagaagaaatttttttttcaaacgtatattttttaaattttattttattttattttattttatttattgtattattattatactttaagttttagggtacatgtgcacaatgtgcaggttagttacatatgtatacatgtgccatgctggtgtgctgcacccattaactcatcatttagcattaggtatatctcctaaagctatccctcccccctcccccgaccccacagcagtccccagagtgtgatgttccccttcctgtgtccatgtgttctcatatagatacataatagttgtacttatttatggggtatatatgatattttgataaaagcatataatgtgtaatgatcaaatcagggtaattggaatatccatcacctcaagcatttatcatttctttgtgttaggaacattctgattctactcttttagttattttgaaatatgtgataagttattgttaactatggtctttctattatgttaccaaacaccagatttttttccatctaactttatttttatatccattaaccatcccttctatatccccctattttgacaagtaaaaattatatatatttatggtatataacatgatgttttaatacatgtatacattctggaatcgctaactcaagctacttaatatatatgcattaccttttatacttatcaatttttggtagtgagaacacttaaaatttactctagcaattttcatgtatataatttattggtattaactgcagtcaccatgatgtacaatagatctcttgagattattcctcctgtttaattgaaattttatgacctttgaccatacaaatttaaaccatgtaaaattttcattttttaagaaggaatcagcatctttccagttatctctgatttgattaattaatggattacctcagcaaatggttatttttgtgtgcttactttgtggcagtcaccatcactctagtatgtgctagggattcaaatttctaaaaataccatcatgatcctgctctcttggaatttacagactagataaaaagtaaattaacaatatgttattatggtagaggttggtacaaagtgttatggaggttggaattgtattaagagagggtatgttaaatgaatactgtgtggctgagtttggagagttgactagagaaagaaggtagtggggcagagggcattttacctgcagaagaggatgtatgctgaaagacttgtaatagtcctgaatggctgagatgaagggtgaactgtgtgagaggaacaagagttgaagctggagaggtaggcatagacctaatttgaaaggtctatgtgctaagttacaaagtttgaactatagtctgaaagctaaggggaaaccatgaaagaattttaagcagggtaatgatgaggggacttcacaaagttcatagaaaaatggaattaaaagaaaaaaataaaaaatataaactttatttctcatcataaactccatcaagttgaagacacttttgtaaataatgatactagccatttagttcatccctaaagaaytgaatgtcctggaatttaaccgtgccaatgcagtcttttttacattatcaactgaagaaaaatgagtgccctttaaatattttttgagatttggaaacaaaaagagtcagaaggagccaaaccaggactgtaaggtggatacctaatgattttatattgaaacttgcaaaattggctttgtttaatgagcagaatgagcagaatgagcaggagcattgtggtggagaaggactctggtgaagctttcccagtgtttttctgctaaagctttggctagctttctcaaaagactctcataataaacagatactatcattccatggccttccagaaaatcaacaagcaaaattctttgagcatcttaaaaaactattgccatgatctttgctcttgactagcttgcttttgcattgacaggaccacttccacctcttggtagatattgctttgattgtgctcagtcttcaggatcatactggtaaatccacattcatcttttgttagatttctccaaaggaatacttaaggagcttgatgaaattaaaattgttaaaacatttcattgaaagctctggtcttatctgcaattgatctatgtgcaacaattttggcattcatccaggggaaactttgctcaactgaaaattttcagtcagaattgtgtaagctgaaccagttcagatgtctatgatgttggctattgcttctggtgttaattgttggtcctcttcaattaggacacaaacaagattaattttttccttgcaaattgatgtggatggtctgctgctgtgggttttgtcttcaacatcatcttgacccttctcaaaatggattatccatttgtaaactgctgatttctttggggacattgcccataaactttttattttattttattttatcttatctttgagatgaagtctttttctgtcacccaggctggagtgcagtggtgcgatctcggctcactgcaacgtctgcctcctgggctcaagcaattctcttgcctcagcctcacaagtaactgggattacaggtgcatgccaccacacctgactaatttttgtatttttaataaagatgggatttcaccatgttggccaggctggtctcgaactcctgacctcaattgatctgccagcctcggcctcccaaagtgctgagattacagcgtgagccactgtacctggccaaacttttcataaagcatcaatgatttcgtcatttttccacccaagcctcaccataaatgtgatgtttctcacagcgtcaagcccagtgctttgcacagtgatgctgctctataaacaattattgaatgacccttttgttcagtccttattcactactgaaaggtgtcatgatcttaatgacaatggtcttttcaattttatggaacttttaagtttataaagcagtaacctataaagctagattgtaaaatctgttagggtaagagttgtttctcttttgttttcctctgtttcttacatgtctggtatgttgctcattgataaatatttgttgaatgaatgtcttttatttttcctcaactgatttcacarcaactgagtgaagtaggcaggcaaagacaatttgtcctgtgttatagataacacaatcaaaattggaataataatgacttgtccaaagtgatgcagttattaaatggcatagcaaggacttgaacctcagacctcaaggccagtgtgccttcacctacatagaactatttctaatttagatctcaagcccaattttgctctatgttcttaacttttatagtcattccttacagcaaaaaaaaaaaaaaaaaaatcatttgagatatgtatgtgagctttaattttctgcttcagttgtaaacttctttttattgagtggtattatcatcttgtaagttcatttggaaaatatgaaagtcaatggattaaattcagaaacattaaataatttctttctctgtaatactttatttttgattgctctgtggttgccatatttaagtaaggtagattagctatttcttatgcttaaaacaatttctttttactctaggtattaatatttatagagcatcaatatattatttttttgactattctttccttctgctttaggctccagaaacttttagcattgttttaaacagatgatttagggacactaagatcacacttggtgatataatgctttccatcaggcacttactgtatacccttttgtacacataacgctgcgggtatgggatttcttttcatgttacaggtagcacccagcacctcgtataaatgcatgaaatattaaataagaaaacatgatgactgtggagctggctcttgttttggagcaatgctacttgatgtttttaaattatgggaattagtaggctgctggagctctagagttatttgaatcaatcgatctgactacaaaaggaagccagggcgttggcagtgagggagaggaaaactttatttgccagagccttggctgcatttttttttcctgctgtttcagcctatttcttcgtgtctttctcaaattactccacaaatctacataatttacatgaactcattggatgcataatttgtatagaacactggcttagatttatttatatatgtattgtcaggaaaaaggagaaaaaatgtatctgggaaaagggactgctgagacaaagtagacattttcctgttgccttttctatgcttctctttcttgcaaaataatttgtcagctattttaatgtgagatgagcaattatagtttctgctgttttatttgatggattactattattatttctgagcagaaataatttgatgagaaaacacactctgggagtgttgacagtgcttacttttccagcaagtgctgggcttagggatattgttttcctctacccattcttatcttgtatgtccaaggtttgttttgggtttagtctaattcactgagctttttaaagtttgagtttggtttataacgagttaaaaaaaaaaacacaggataaattcaaggttcaacaaattattctggggtttttggctcattttaaattcccactcaaaactatgaataagtaaaatccagcagtattaaaaatctcttcaattaattgtgcttcctttccccaacttgtctccaactgggagatcatttatttggagaaataatcaatataagaaaattatcatgtactgaacaaatatagaaaatcttggaggtttgtttcaatgattaaccaytgtggcctattagaaaaatcttcaagccaagtgaatactctttaaaacctaggcctcaacctaacttttatcttctgtacttcagcatcacttggaaagtaagattattgctttcactctttagtatctttaagcgtacatgtgtgcaggtggggatggggtgtgtttaatagggagctaagccagagctataccacagctttcatatgacctctccttgacaattaattattgttgtaagcaaaaaaaactgcttaaatgaatgaaattatcatggttttacagtattttgaactctttattatcaataaatggaggatataattcctgataacaaaagttcaagctgaaatctccatattatacaaagtccgacctttagttaaaacattcttgtgatcatgtattgttactggattttctccatttctcctttggccatgggcatattacctgaagtgttggttttctgtgtttcttattttgaacactytttttttttttttttttttttttttgagacagagtctcgctgtcgcccaggctggagtgcagtggcgcaatctcggctcattgcaagctccgcctgccgggttcacgccattctcctgcctcagcctcccgcggggactacaggcgcccgccacctctcctggctaattttttgtatttttagtagagacggggtttcaccgtgttagccaggatagtctcgatctcctgacctcgtgatccgcccgcctcggcctcccaaagtgctgggattacaggcgtgagccaccgcgcccggctattttgaacactctttacaagtgtgtttgctctaaagttcccatttggagttgtataatgtttacagagataaatatgaagaaaaaatattttaagaagtagagctaatatttcttagggaagacaaagtgcaggggctaaaacatgctttagagttaaatggatttgtcagtaaaatagcttgtattaattaaatcatagataaaattacttaaattttttagaatcttagataaggttttattttgatttgaacatagtgagaatgaaccaagaaatgggcaaggcacagaaatgattatacaatataataaatatttcatataaaggtcattaaaattatgttgaaaggaacttgtttattgttataagtgggggaaaatgaactgattttggctgtgtttaatatgttgggtagaattggtttccacgtcagactcttaaaagacttcctgtcctttggggcccaactcaaattgtcttacgtcttctacgtggtctgagtccctccgtcagtgtcagtatcagtgagttttccgagttttcaccaatgttacctttatctctctttttttgcactctctttactaccttgccttgtgttagagttaaggatagagtagaaagaacatgaatgttgtaataaaaacccagttcaatcaaactttctgaaacccagtttactcaattatagaatgagaagagaaataggaactcctgtggttcttgtgaagattaaattggaaagcatcaagtacctggggctgagtgggcactcagtaagtgtcagtgtccatctcatttccgaatttcatgtctagtttctccagtggtatgagttccttcagggcaggaaatgtcttttatattcatagtgctttgtgcatagtaggttctaaatgattatttgttgaatttaatttactgtcctgtcatggaagcttagcactgttatttcccatttcttttccctctgtcaccttggattgagataaacatgttgctttcatgaaattagggatttaattcagtagaatgccattttaatatgacttatttcatagagtttgatatagtaagggtcaaatcatttccctggaaacttaattatattctataaaatcttattagcctgtctcatggcatcatagtcacagtggagttctggtgtgtttaagatggtcaagtctctatctgtagaaatctgtctaatggcacagagtgagaatatgggaaataaatgacataaagagagagcaaatgcaaatgtcttgcaaattacattacttgacattttcaatcactaaccctccaaagtatgttctaatttatgaaaataaaccaagaatccaatttcttgtgagcttcctttgcttaattaattattagtagcagacagtattctgtggttcgttgcaatttttcacctttgtatttatctagtatctgatttaaaaagaataggagcattctgattcagcagaactgatcagaactctctttctgatcataactcatctgctcatagctcatctgtgttatagagcagaaatgaataaatgtttgctgaacatgccacatatgctttgatcatcaaaatgttaagttttccttccttctcaaaatacaagctctgagagatctttcttgctgaagtttgttgggtgacctattctgcatagatattattatagaggcaagccagattccatgccattatagcaaaatatcgtgtaagcaactacattttcataaatttgtttgtttccatgattgaaatgtgagcactctttaatgcttcctcattatgatttraaattatacattcacagtgctttctaaaaaattttaaagcagaagtatatcctaaaagatgaactttcttttttattttttttaaatgaagtatgctcttttgttagaatgaggactgaacaggcttctcatgcatgcagtaatgttggttatacttagaatatggtttataactctttctgtgtccctaattatttcattgaaagataattagctagcatttgttatcactgtattatgaatgggagaaactgaggctcattatcgactcttcgtgttagcaagttgagaatttgagaaaaatctgctgctatcctaatgatctacttttgttttcaatttcagtttcaaaggacatttgagtctctcaaaaatgttgccaacaaatctgacctccagaaaacctaccagaagcttgggaaggagctggaaaatttggattatttagccttcaaacgtcagcaggtaggagtcagagctctccttggtggaggagatgaacactttaggcttcctgccatcctgcctgtcagaggtgcaggtgggtctgaggaaacttatcttctaatggttagagcagatacaggttgtgctgtgctgatctgctgtgttcatatggcttcccacagtgttcaatgtggtccttgcttttagatgtgtactttaggggtttccacatgtgtccttatacctctcttaaagaaaattcctgctggtttgtgaaaatccaactaccctttgactagggacgcttcagaggcataaagggagtctctataatggcttggccagttggcttttatatttgacctggggagaaaaatcacctgaagaccaggataaggttgtgggtgtacatgcaacattaaggaaaatagtcataaatatgccaaaatatgaattgatctttagttttctttgatctttgaagatgagtaatttgctaagtgtggaagattgaaggaagatttacttttcaaatacaaggtttttaattgcctccttttgtaggcccctagataaatagagagctgaaataaacttttatagggtttgttttagaactggtactttataacctaatattcatcatgattaaatgctgtgtgttttggagacactgccacagtagctcactactcttcctaggctgaatctgctccagtttcttcacagccactaggtgtcagcgttgtcaagcttttacttccaccaaaggtttattccgatcagaacagccagttaaatgtttaaatgaggttgcatgaaattcggtaatgtgctccatgatggatagagtctagaaaaatgactaaatgtctgacttgcatggccaggcctcgagtcgatcacttgagagactttcctcttagagtagcaaagggtgtggcattctcaccattgcctaattcacaagttttggatccttttggatgaaggttttcaaagcagaattttctatttttagttaaatctcattaagtcaacatgatatggtctagaattactgggccaaaaagagaattgtgttctaggtattgctctatcacagatgttacatggacatttaacctttctatggccttattttcctaggggttatatttgttttatagaatgttccagggcaaatacattctttttgcagacacattaatttacatgaaaaaggatacaatgtccatttaagttttgtttttttaaaaaaattaatgatgatctaggtattagcacttgatggttactgagtgctactataacaaacccccagaggatgctgcttagcgttcacaccagagtcactcctccggcctatgcaatttttagtacagttttgtttccaaaaccatattttaccatggaggggtatttgagctggcaggcagtagtcactgtactcttctgttatcgtttctcattaacacattttcagtgattggattcttttattagctaattgtgaatttggaagaatgtaaatgcctcaggggcagaagggtagaactctgggagaatggcattgaggatagatgggtaaattatatgtgcataaagaaaagatgagcacatggagtgtatacatatatgcctatataaatcatctatactatttattaaatgaaaagcatatggcacatggtatgatttaaacatttatgaattgaatctttaaatgcttataacaatacagtgaggtggcttttgttagcaccattttacagatgagaaaattgttaaggaagttaagtaacatgcctaaggtcatggagctaataaggcgtgaaactgggcttcaaatctaaatcaagtctgacttcaaacctggagtgttatgtcttcttgatgggcagggtcaaagggtcagaacatcagctcttctctagcttgatgggatttatcttttatctcgcattctattcctttaaagctccaaaacctgatgaagcacacgccagaaagtgtttttcttctaatggaaaagattcaggcctctgtaaaattgccagtttagcaagaaagtttcctctttataaggtggtattctttgtattasagaattagtcatggtttgttccctggtccaaccatatttatcattccgcactgggacagaacataagctccaaaaggacagggcctcgtctgtcacctttaatgctgtatcctctccagtgctcctaacagtatctgactcatggcaaatcctcagtaaatattattggtggtgttgttgctatgaacaaagaaccatgccaaaaggtttgacctcagattataggcaattaaaatcaatgtgttttgctacacatttaaaattcaaaagagcataagcctttggtttcctggataccaagggctgagagattttcccttgcccctatgtattattgaggttttctcctaacatattttattcttctatccattttttaaaacaaacagaaaatgccagtgttaactctgaattatggatgtccaatgaattgactataattattttattggagtcatccattaggttttattttctgtccccttctatgatatttttaacatcatctttgagagatttctttctcggcacaagataagactactggagttctttgctccattctctcacttctgtttttctgaggttactgtgctttctttcctaggtctgaacttagtatttatttatttaaaagagtgagtgcctgcacatcagctattccttgggtcagggcacaacatctctacattttcctactttcaaaaagactaatgttgaaatagctttgattggaaaaggtgtgagaggaggctgtgataggtgaggtggtgggtttactgggatgaatcagcctaaagtaaacggatgacaaagcaggattaaccggagaatttggacactcttttggttcttactatcgaaaggcaggtacagtcttggagtttatctgcttggactacttggttttcatccttctagttggtgtgacataggaatggtaataacaagttccagctattatatcgatctcagatttatgtattaatttgagtgcttataaatcaagaggtttccttagagctttcgttttgtgaagtaaaacaaaataaggtttgataatgtggactctaatgtaattcattcctctctttatctacccttaaaacttataataacattataaaacacatccatttccagaggcttctgaagtcttttgatataaattaaagttgacattattgagttgaacattatatagactaaagcacatttagacattgatataaaaatatgtaaaattaaattattgtacttcagacctgcatgcatgttggaacacatcacgtatctgattcttgtctctctgatcacggcatactattcttgccttctgacctgtgcacaaggtttatataacttcgtatttagaatgtacagcccgtttcattttacatacttaaatcattctttaaagtcaaactgaagtctagcctccctcataacacctcctcctgtgacctctagtcaatataactcttcactctttgccattcttagcttttatttgtgtcatacaatttagcatttgattgatgatatactcattgagaatccatgtagtacagtgattagagtgtgagctttgtagttacccaaacctggttagactgtttgtactggatacctgagtttctttttaaaaagcatcggaaaaataaccctaacttaaatagcttgctttgaggaaacaatatatcaagtataaagtaagtcctatgaaatatgtataaaggacttaacattgcacctgacatgtgtttagtataattggtagctattatatgttttctgttattctcataagccattttcttaaataggttgtaagttccataaggatatggatatgttctttattttgtatacttctgtgctgtacatagggtccagcactgttctgaacatatgggatagaatgtttttggacatacatagtctagcagttggtgatctatgtaacaaaaagaacatgctgacacctctcaagaagggagctgcaacattttgttctaatatgtttctaaggtgatatctcttgatgggcagttaaagtactgaggacttgtactatgacaatctcttgggggaagtaggttcagtgttctggctaacgtccaattcaggttaataatacattctatatatccaagcttcccttatgcttcaggtattgttcagcacatggtacttttttagtgacgatgctcaggagtgaacaactgctttttttttcttttactaaactgggtgtgtgaccccttttaggtaattccaaagccagaagggtacataataccttgtaggataaaaattgaatttaaaacaaacttttattaaacagaagaaaaataaaaataagttagataaaatttatttgataaaaatgactgcgggttaatatttttcaattgaaaaataaaattctacttgttatctcttatctttttcatgatagccatcctaacaggtgtgcaagacaagagataacaggagttagtgatgatgtgaagaaaaggaaacctttgcacattgttgggaatgtaaattggtacagtcatttcggaaaaagtatagaggttgctaaaaacatatgaaatagagctatcataagacctatcaatcttacttttgggtatatatccaaagaaaatggaatcagtatcttgaagagatagctgcactcccacgttcattgcagcattattcacaacagccaagatattgaaacaacctaagtgtctattaacagatgaataaagaaaatgtggtatacatataagcaatgaaatattatttagccttaaaaaggaaggaaatcctgcctttgcaatagtatggttgaacctggaagacattttgctaagcaaagtaatccagacacagaaatacacatactgtatggtcttacttatatgtggaatctgaaaatgtcaaactcagagaagtagagggtagaggagtgctttccagggattggtgggtggaggaaattagtagatattgatcaaaggtacacattttcacttataagatgaacaagttctggggacctaataaacagcacgagtgatgatagacgtgttaatttaatggtggtagtcattacamaatgtgtatatatctctcaatcatcttgttgcacactttgaatatattcaatctttgtcaatcaaatatttcaaaacaaaaaataaaattctagatagataatgactgaccacatagaaaatactcttaggcttactctgggaacttgagaactctgaggatacaacaaaacaatgtagggatcctgtggaagaaatgcttagaaaatgaaactaaatagtgctaggcttgtggttgtactatagcatatagagaagaaaaagttgatgagttccgataatatccttcaatcatgtaaggacttatagcaagaaaaaagtagtgaatcagctagaataatattgcactgggaattgcttatctacaaggaccttataaggtagggactaactttccattggggctaacattaaaatggaattgtaaatatattttctttaagacctttaaaaataaagaccaacctgaccaacatggtgaaaccccgtctctactaaaaatacaaaaaattagccgggcatggtggcaggcaactgtaatcgcagctactcgggaggctgaggcaggagaatcatttgaatataggaggcagaggttgcagatagatgagatcatgccattgcactccagcctgggtgacaagagcaaaactccatgtcaaaaaataaataaatcaataaaataaaagataaagaacatgtgtatctggaattgtttagatgcagtctaaggaagggtgtaagtgggagctggactgaatgagtactaaggggaggtgctaagcttctagagcaatagttctatagccatggattaacttcagtgacctttgtaagatgaagtatgttaattgctcaattgggagaagattctttttttccttcttctgtaattaatctaactgtcctgaaagaattctgattgaattattccttttaagggtaagtgaaccaaggactgctatactaaaatattcatgtctgtcttaggtggtattctatttcttatttaccagatcaaataaaatgattttttatgccatttataaacctgtttctgaagatttcaaagcatttcagacatcatttaaaaatttattgcacaggtataaaaaatgttgaattattaaacagtgtgctaagttcaaaccaacccaaacatattctatccactacttatgcaatttcatttttattcaattgtacatagttgtttgtcccaaaggagaaaagaatgtgatgttacatttattctttagttttctgatatagagaaaagaaggttggatgcatcatgcmaggtcatcctgagtcagtaacaaattcagaattaatattcacatttcctaatatccagctttttgcaatagccatttgatcattttcactacttcataaactacagatctttatagggtgatttgtttttctatagttacagtctgaagaaaaaatcttatggattttttaatgtaagaaacttgcctttattttaaaatgaatgatgaaaatgatgcatattatacatttgtcctcctaaaatttgatttccacattggatagttaatggtcatgataactaagtgtcttctattaaattagcaaagtaaaaacattatagagacatcttttaattcctaaggtttgctattctgtttccgtctgttgtctctggggctcagtttattggtggcacttaggtagaaagctgttgagtcaagcgttagctgattttcatgcaccagagaagatttattaatttttacaaggttgtttgctatacagtagtttgcgttgtgggcagcttatagctactttatgtggggaatgtttattgaaacaagttaattctttgttatgggttgtttcaaaatttacaatgctgataggaattccagagatggcaaaaaaaaaaaaaacaacaaaaacaaaacaaaaacccaaaaccaaccaaacaaacaaacaaaaaacaacttcagtgtttgcatcaatatggtgcttatttgtgcatgtcttatattgacatacctaagtccataaggttgtcaataaaagttggtattgaggagaaataatgtgcacatgtaccctaaaacttaaagtataataataaaaaaaaatagacaagttaactctgaaaatgtcttctttagtctgttttgcactttgaaagtgatctgtgcatgaaaagaaggtaatctttcactactaagattatgacttttggtggtttaagatgcaaattacagaggctatgctatactagagaaccttaaaccaagtaaagaatctttagaattcatctaacctaactgttttattttattttattttttatgtttgagacaatctcgctctgttacccaggctggagtgcagtggcacaatctcagctcagtgcaacctctgcctcctgggttcaagtgattctcttgcctcagcctcccaggtagctggaattacaggcatccaccaccatgcccagctaattttttgtatttttcgtagagacagggtttcaccatgttgcccaggctggtcttgaactcgattcacccgtctcagcctcccaaagtgcaaggattagaggcatgaactactgtgcctggccccaactgttttattttaaagatgaaaaaaatgagttgcaaggagattaaatatcttgtacaaggccacatactttgctaatgacaagagttgggacaataacaggaaatgatatattctcacaacctttggttctttggtgagccctctattgatccttggtatctggtttgtatcctgaaaccaagagaggacctatagtatgaaaagcattcttttcctgtttgaaaagctgcatgatgctgagattggactggctgcagaaatctcttctaatgttaaaacaaagccaggacattcagtttatttcactggggttcatggtttgggaggccttgcttatatatggctataatgaaaggctctgatggcagcctttgtggaagtgagccccattctctccagggaaaaacatacttctgctacctcctgtgtcttgaggagcatttcctttgctggacacttgctaggtggtcgagtagtgacattctgtcctgtattcagggacatgtggaatagaggagcccctcatagtccccttaataaaagatgtgggtgcagtcttctctaaaacgcaagcctccagccactctacatttccactttcctactcaagaagaaaggagtgaacttctttgagtgttcacagaaatgtacaacaaaggactgaaatgaggatgcagcacaattgacttttcagtgaagtccacttctttctgattatgcttgtcctccaggtgggagttctgctctttcagattgagccctaggaatctgaagtagaacagaattttctaccaggatgaaaggagtaccagaatgggtatggactttcttgagtctgtaggaaccttgttgcattgggactatggaataatccaggaaattgggtttcatatcaaactgcaggaacaacaaagatgcttttaacatttatctatacatgcgaatatactgtattaggcggtgaggtgccagtaaatgaaaataattcagtagtgcctttttaaaaatgttaaatttttaaatatttatttatttatttttgagatggactctcgctctgttgccaggctggagtcagtgacgcgatcttggctcactgcaatctctgcctcccaggttcaggcaattcttctgcctccgcttcccgagtagctgggactacaggtgtgtaccatcatgcctagctaatttttgtatttttagtagagatggagtttcaccatgttggccaggatggtatcgatctcttgaccttgtgatctgcctgcctcggcctcccaaagtgctggaattacaggtgtgagccaccgctcctggcccttttttttttttaaagaagaaaatgcaataatattacaacactgtagacaaaggaaagacttataagcatcatctggttcagccactttatcgtggatacacaaacaatacagaaagtacatcattttgtagttttctactgcaatggaattttgatttattgacaatttctagaatccygtgtcgtctaaacctttaaagtatatcctaggcacttaggttgtttctataccttgactatcatgaatgatgctgcaatgaacatgagagtgcagatacctcttcaaaatactgatttcatttcctttggatatatactcagaagtgggattgctggatcatataatagttctatttttttaaaatmtattttaggaaccttcatactactgttcatagtggctgtaccaatttacattcccaccaaggttcccatttctctacaagcattcccatttctgattacactcaccaacacttgttaccttttgttttttggtagtagctatcctatcaagtgtgaggtgatatcttattttgttttgatttgcattactctgatgattagtgatgtgagcacctttttatatatctattggccatttgtatgctttctttgaaaaatttctatttagagaagcaataaaagatgataaaggggatatcaccactgatcccacagaaataaaaactaccatcagagaatactataaacacctctacgcaaataaactagaaaatctagaagaaatggataaattccgggacacatacaccctcccaagactaaaccaggaagaagttgaatctctgaatagaccaatatcaggctctgaaattgaggcaataattaatagcctaccaaccaaaaaaagtccaggatcagacacattcacagccgaattctaccagaggtacaaagaggagctggtaccattccttctgaaactattccaatcaatagtaaaagagggaatcctccctaactcattttgtgaggccagcatcatcctgataccaaagcctggcagagacacaacaaaaaaagagaattttagaccaatatccctgataaacatcgatgagaaaatcctcaataaaatactggtgaaccgaatccagcagcgcatcaaaaagcttggccaccacaatcaagtaggcttcatccctgggatgcaaggctggttcaacatatgcaaatcaataaacataatccatcacataaacagaaccgactacaaaaaccacatgattatctcaatagatgcagaaaaggccttcaacaaaattcaacagccttcatgctaaaaactctcaataaactaggtattgatggaatgtatctcaaaataataacagctatttatgacaaacccacagccaatatcatactgactgggcaaaaactggaagcattcattccttttgaaaactggcacaagacagggatgccctctctcaccactcctattcaacatagtgttggaagttctggccagggcaatcaggcaagagaaagaagtaaagggtattcaattaggaaaagaggaagtcaaattttccctgtttgaagatgacatgattgtttattagaaaaccccattgtctcagccccaaatctccttaagctgataaaaaacttcagcaaagtctcaggatacaaaatcaatgtgcaaaaatcacaagcattcctatacaccaataatagacaaacagagacccaaatcatgagtgaacttccattcacaattactacaaagagaataaaattcctagggatccaacttacaagggatgtgaaggacctcttcaaggagaactacaaaccactgctcaaggaaataagaggacacaaacaaatggaagaacattccatgctcatggataggaagaatcaatatcatgaaaatggccatactgcccaaggtaatttatagattcaataccatccccatcaagctaccaatgactttcctcacagaattggaaaaaactactttacatttcatacagaaccaaaaaagagcttgtagtgccaagacaattctaagcaaaaagaacaaaactggaagcatcatgctacctgacttcaaactatactacaaggctgcagtaaccaaaagagcatggtactggtaccaaaacagatatatagaccgatggaacagaacagaggcctcagaaataacaccacacatctacaaccatctgatctttgacaaacctgaccaaaaaaaaaaaaagaagtgaagaaaggattccctatttagtaaatggtgcagggaaaactggctagccatatgtagaaagctgaaactggatcccttccttacaccttatacaaaaattaattcaagatgaattaaagacttaaatgttagacctaaaaccataaaaacactagaagaaaacctaggtaataccattcaggacataggcatgggcaaagacttcattaccmaaacacccaaagcaatgrcaacaaaagccaagatagacaaatgggatctaattaaactaaagagcttctgcacagcaaaagaaactaccatcagagtgaacaggaaacctacagaatgggaaaaaatttttgcaatctacccatctaacaaagggctaatatccagaatctacaaagaagttaaacaaatttacaagaaaaagcaaycccatgaaaaagtcaggaaaggatatgaacagacacttttcaaaagaagacatttatgcagccaacagacacatgaaaaaatgctcatcatcactggtcatcacagaaatgcaaatcaaaatcacaatgagataccatctcacgccagttagaatggcagtcattaaaaagtcaggaaacaacagatgctggagaggatgtggagaaacaggaatgcttttacactgttggtgggagtgtaaattacttcaaccattgtggaagacagtgtggcaattcctcaagggtctggaagcagaaataccatttgatccagcaaccccattactgggtatatatccaatggattataaatcatgctactataaagacacatgcacacgtatgtttattgcagcactattcacaatagcaaagacttggaaccaacccaaatattcatcagtgatagactggattaagaaaatgtggcatatatacaccatggaatactatacagccataaaaaaggatgagttcatgtcctttgcagggacatgcatgaagctggaaaccattatcctcagcaaactatcacaaggacagaaaaccaaacaccacatgttctcacttataggtgggaattgaacagtgggaacacttggacacagggcagggaacatcacacaccgaggcctgtcggtgggtggagggctgggggagggatagcattaggagaaatacctaatgtaaataacgagttgatgggtgcagcaaaccaacatggcacatgtatacctatgtaacaaacctgcacattgtgcacatgtaccctagaacttaaaggatttaaaaaaaaaaaaaagaaacatgtctatttagttcgggcacagtggctcacacctgtaatctcagcactttgggaggctgaggcaggcagatcacctgaggtcaagagttcaagaccagcctggccaacatggtgaaaccccgtctctactaaaaatacaaaaattagcaggcgtggtggcaggtgcctataatccctgctatacgggaggctgaggcaagagaattgcttgaacccaggaggcggaggttgcagtgagctgagatcatgccattgcactccagcctggggtacaagagcgagacttaggtctcaaaaaaaaaaaaatgtctatttaggtattttgctcatttttaattaggttatttgtgggtcatttcttttcttttcttttttgcttttgagttaaatgacttccttatagattttcaatactaacctcttattggatgtatggtctgcaaacattttatttcattccataggttactatttcattttgttgattatttccatttctgtgcagaaactttttagtttgatataatttcacttatttatttttgcctttgttgctggtacttatggcatcatatttaaaaaaattgtgaaaactaatgtcatagagcatttcccctttgttttcttatagtagttttatggtttcagggcttatgtttacagctttaatccattttgagttaaattttgtttgtgatgtaggataaaaataaatttgttttttggtatgtggatattcaattttcccaaccccacttattgaagagactattttttccacattgtgtatttttggcaacttttcactattgagcataacactaactatgggcttgtgaaatacggcctttattgtgttgaaatacattccttctgctaggcacggtggctcacacctgtaatcccagcactttgggaggctgaggtgggtggatcacttgaggtcaggagtctgagaccagcctggccaacatggcaaaaccctgtttctgataaaatacaaaaattagcaggtgtggtggtgtgggcctgtaatcccagctattcgggagtatgaggaaggagaactgcttgaacctgggaggtggaggttgtaatgagctacaattgcgccactgtactccagcctgggtgatagagcaagactccatcacaaacaaacaaacaaacaacaaaaaaaggaaatacattccttctatatctaatttgttgagaggtttttatcatgaaagcatgttgaattttgttaaattctttctctgcatctattgagttgtttatatgatttttgttctccattctgttaatgtggtgtaccacttgatcatggtgaatggtcttttaaagcttgttagtattttgttgaggagttttgcatgtttgtgcatcaggaatattggcctgtaattttcttttcttgtagcctccttgtctggctttggtgtcaggtaatgttggcctcataaaatgagtttgtagtattccttcctcttcagttttttggaggagtttgagaattggtattagttctttaaattttagttgaattcagcagtgaagtcatcaggtcctgggctttcctttgatgagactttttaattattgatttaattttctttttttttttctttgtttctttccttttttttttgagatggagtttccctttgtagcccaggctggaagtgcagtgacatgatctcagttcactgaaacctctgcctcctgggtcctggttcaagcaattctcctgcctcagcctcctgagtagctgggattacaggcgtgtgccaccatgcctagctaatttttgtatttttagtagagactgggcttcaccatgttggccaggctagtcttgaactgctgacgtcgtgatccacctgcctcggcctcccaaagtgctgggattacaggcgtgagccactgcacccggccttgatttaattttcttactcattattggtctattcagattttccatttcttcatgattttatcttggtagtttttatgtgtctaggaatttatccatttcttctaagttatccaatttcttgccatataatagttcacaggagtcttttttaattctttgtatttctgtggtatcacttctaatgtttcctcttttatttctggttttatttgagtctccattctttttttgttagtctagctaaagagactgaatatgggaacagctgagactaaggtacagggagctgaagaagagtaaaaatgtcatactttagctctgggttgtccactgtgacttggccaaactgatcatgggactgtctggtattgactcagcagcatttgtttcagaaaagcaagcttagtcacatatttactatacaactagtaaaaattataatctcaaatacactcatattaaatttttgtatccaagctgtacatctctacctgtgttcacaatcagaagacatcacaatgactgttacggtgtccttgtcaggcaaaaagactactgcttcaactacagctgttttgttaatagtagtgctaggagcatgcctagggcactgttggctaaaattcaaaggaaatgttgaggatgcctagctgagaccaacagttcagcttacagcagagctttaaacaggcacacaccagtcatgcagccttttgtagatgttaagctgtttgttaggggctgattacctgagggctaatttaatatgtaatgagaagtttagtttgttctgttattttttttaaggcgtacttatttttgctctctaaactatcatgtttggacaatttcatgtttgctatttaggaagaagctaatcatcttttataccctatctcatgctccaaatgtgacagcagtagaaacacttacactgaaatacatctaggtgagggaaaatgtcaccagaagatggagtagtgttgctggtttgctccatattttgttcaatgatttagaagagtatgtgtatgtacaggtttactttcatacactctagtttcaaatgacagaaaatataaattaattgatattcttcagagtcaacattaaattttagattggatgtctttaaatttttacaatgtaaattgcttttctctcttctgtggtcaactgacagttgcattcattgaccagataaactatatttagcttaacatttttagtatcacttatgggattttagcaagatgccacaatatgaacttgtaatattgcatttcttttttaactgtattattacaaayctgattttaaatcatttttttctattttagttacagcattaatacaggctaaaattctctatataaattctgctcatattagtatagcacctggtagcactacagttcagtatttatcatctactccattataaaacctttgttctaaaagagctgtatgagcctattagatgtatacacaattaagtaggtaatgatctgtggttgcatccacacagcattaacagctgacttgtgactgattttccaagtgaggtgctgattgttgatacggagtacttattggatgaaaatgtttagaatattttgaagaattatttttgtgctttgaagtttaagttacatattttgttttaaccttactgtttgcttaatgaagaaattataatgtttcctccctctcattttgatgttggtatttatctctattgttctaagctccccatccaaacattgggagttactgaagcccttcttggtacttttggtgcagaatgtaatggtccaccacatgtgtcattactgatagtgacacatttatgtcttcatgttaaatttgcatttttaaaattaaaggtaactgaattttagtcattttcccaactttaatgttaaagtcattgagaatagttatgatatttttgaaagtttgataatgatcatctgtgaatttagagaaactaaatatgggagattattctggtaagtatccaatttcagtcttctttgtcagtgtttgaacttaagctaaatgctcatgtttgtaggacaaaggcatttcttctcaccttgggtcagagcagcaagtcctgggaatatgatacagcattatgtgaataaacagaagttttggtaagcagcagtgtacaatttgttaagaaaaaaatcagacaggaagtttttgttggccttttgcccattctaatataaacatacatctataccatatattaagattgggcatagttaagatcaaattcatttaacaactgggggaatttattttacctgggatggaaaacattaaatccaaagatgaaacagaagcaaataaattaagcgtacctgaactttattttaaatttagaggaagctgtctttttggaatctctttgaaatctatcaggaaacatttttgtcttaaaaacagagagtaaataactctgggtttaagatatctaacatgtttgacctttgttatgctaaaatagtgggctagaattggatccrtaaaaaaatgatcggatgtttatccagggaaggaatcttaagttagacttggtattaaccaatgtgtgataagtaaggtaccacttgtgaacatgtggttggtgctcatgagtaacttgtatcagtcactatgcatttttcttctactccaaacacctggcctagtggatatagagaatgtcttgacatctttgttactctatttttttttctttcttctatgttcttctaatgaatgttactctgtttttttttttttttttttttttttgagatggagtctcactctgttgcccaggctggagtgcagtggtgcgatttcagtgcagtggttcttgccattctcctgccttagcctccggagtagctgggactacaggcgcctgccatcacgcccggccaatttttttgtatttttagtagagatggggtttcaccgtgttagccaggatggtctcgatttcctgaccttgtgatccacccgcctcagcctcctcaagtkctgggattacaggcatgagccttggcaccgacctgtttttttttttttgagacggagtcttgctctgttgcccaggctggagtgcagtggcgtgatctcggctcactgcaagctccaccttctgggttcacaccattctcctgcctcagcctcccaagtagctgggactacaggcacccaccaccatgcccagctgattttttgtatttttagtagagacggggtttcaccatgttagccaggatggtcttgatctcctgaccttgtgatccgcccgccttggcctcccaaagtgctgggattacaggcrtgagccaccgcgcctggctgaatgttactctgtttttaagcggttttggaaaagtttatttcttactcttgatataagagctgtgcacagtgctgctataaaaagttagtaattttttaatgtcagtaggggatcaatttgagagaagactaaagttgagaatatctaagaatgttggcatatatggaatagatgttatcaccctacattttaaaggtcttttttgtatacattctatatgtaatatgaggtcagtgaacacactctaagatcaagctcttatagtagactgaaaaacttggcaacactgaagaacaattgtgagtatttttagattaagtgaatgacactacaaatattatttttaagatatctggcattaaggcttatttattgtgaaaaccattaaacgaaagagagaaatcacacaccagaataataaaaaaaaatagttaagatagacatataggggcaagagggccgaataggaacagctgtggtctgcagctcccagcaagatcaatgcagaaggtgggtaatttctgcatttccaactgaggtacctggctcatctcattgggactggttagacagtgagtgcagcccacagagggtgagccaaagcagggtggggcattgcttcacccgggaagtgcaagggattgggaaactaccttccctaaccaagggaagccgtgagggactgtgctgtgaggaacggtgcattccggcccagacactatgcttttcccatggtctttgcaacttgcagaccaggagattcccttgagtgcctatgctaccaaggccgtgggtttcaagcacaaaactgggaggccgtttgggcagacactgagctagctgcaggaattttgtttcataccccagtgacaactggaatgccagcragtcagaactgtttgctcccctggaaagggggctgaagccagggagccaagtggtgtagctcagcggatcccaccccaacagagcccaacaagctaagatccactgtcttgaaattctcactgccagcacagcagtctgaagtcaaactgggatgcttgagcttggtgtggggagggatgtctgccattactgaggtttgagtaggcagttttcccctcacaatgtaaacaaagctgtgggaattttgaactgggtggagcccaccacagctcagcaaagccgctgtagccagactgcctctctagattcctcctctctgggcaggcatctctgaaagaaaggcagcagccccagtcaggggcttatagataaaatacccatctccctgggacagagcacctgggggaaggggtggctgtgggcacagattcagcagactgaaacattccatctgccagctctgaagagagcagcagctctcccagcacagcgctcgagctctgctaagggtaagactgcctcctctagtgggtccctgacccccatgcctcctgactgggagacacttcccagcaggagttgacagacacctcatacagaagagctctgactggcatctggcaggtgcccctctgggatgaagcttccagaggaaggaacaggagcagtctttgctgttctgcagcctccgctggtgattcccaggcaaacagggtctggagtggacccccagcaaacaccagaagcactgcaggagaggggcctgaccattagaaggaaaactaacaaacagaaaggaatagcatcaacatcaacaaaaaggacatccacacaaaaaccccatccgaaggtcaccagcatcaaagaccaataaaggtatataaatccatgaagatgaggaaaaaaccagcacaaaaaggctgaaaattccagaactcagaatgcctctttccttcaaaggatcacaactcttcaccagcaagggaacaaaactggacggagaataagtttgacaaattgacagaagtaggcttcagaaggtggagagtaacaaactcctctgaggcaaggagcatgctctaacccaatgcaaggaagctaagaaccttgaaaaaaggttagaggaattgctaactagaataaccagtttagaggagaacataaatgacctgatggagctgaaaaacacagcatgaaaacttcctgaagcatacacaaggatcaatagctgaatcgatcaagcggaagaaaagatatcagagattgaagatcaacttaatgaaataaagcatgaagacaagattagagaaaaaagaatgaaaaggaatgaacaaagcctccaagaaatatgggactatgtgaaaagaccaaacctacgtttgactgatatatctgaaagtgatggggagaatgaaaccaagttggaaaacactcttcaggatactaaccaggagaacttccccaacctagcaagacaggccaacattcaaattcaggatatacagagaacaccacaaagatacttctcgagaaaagcaaccccaagacacataatcatcagattcatcgtggttgaaatgaaggaaaaaatgttaagggcagacagagagaaaggtcgggttacccgcaaagggaagcccatcagactaacagtggatctctctgcagaaaccctacaagccagaagagagtgggggccaatattcaacattmttaaagaaaagaattttcaacccagaatttcatatccagccaaattaaacttcatcagtgaaggagaaataaaatcctttagagacaaaaaatgctgagagattttgtcaccaccaggcctgccttacaagagcttctgaaggaagcactaatatggaaaggaaaaactggtaccagccactgcaaaaacataccaaattgtaaagaccatcggcactatgaagaaactgcatcaactaatgggcaaaataaccagctagcatcataatgacaggatcaaattgacacataacaatattaaccttaagtgtaaatggtctaaataccccaattaaaagacacagactggcaaattggataaagagtcaagacccatcagtgtgctgtattcaggagacccatctcacgtgcagaggcacacatagtgtgctgtattcaggagacccatcgcacgtgcagaggcacacattcctcaaggatggaggaatatttaccaagcaaatggaaagcaaaaaaaagcagggtttgcaatcctagtctctgataaaaccgactttaaaccaacaaagataaaaaaagacaaataaaggtattacataatggtaaagcaatcaacgtgacaagaagagctaagtatcctaagtatatatgcacccaatacgggagcacccagattcataaaacaagttcttagagccctacaaagagacttagactcccacacaataatagtgggagactttaacaccccactgtcaatattagatcaacaagacagaaaattaacaaggatgttcaggacttgagctcagctctggaacaaacagacctaatagacatctacagaactctccacccgaaatcaacagaatgtacattcttctcagcatcacatcacacttattctaaaattgaccacataattggaagtaaaacactccttagcaaatgcaagagaacagaaatcttaacaaacagtctctcagactatagtgcaatcaaattagaactcaggtttaagagattcactcaactgcacaactacgaggaaactgaaaaacctgctcctgaatgactactgggtaaataaccaaagtaaggcagaaataaataaattctttgaaaccaatgagaacaaagacacaacatacaagaatccctgggacacagctaaagtggtgtgtacagggaaatttatagcactaaatgcccacaggagaaagtgggaaagatctaaaattgacaccctaacgtcacaattaaaagaactagagaagcaagagcaaacaaactcaaaagctagcagaagacaagaaataactaagatcagagcggaactgaaggagatagagatatgaaaaacccttccaaaaatcaatgaatccaggagttggttttttgaaaagattaacaaaatagatagacttctagccagactaataaagaagaaaagagagaagaatcaaatagacacaataaaaaatgataaagggatatcaccaccgatcccacagaaatacaaactaccatcagagaatactataaacccctctacacaaataaactagaaaatctcgaagaaatggataaattcctcaacacatacgccctcccaagactaaaccaggaagaagtcgaatccctgaatacaccaataacaagttctgaaattgagacagtaattaatagcctaccaaccaaaaaaagcccaggaccagacggattcacagctgaattctaccagaggtccaaagaggaggtggtaccattccttctgaaactattccaaacaatagaaaatgagggactcctccctaactcattttatgaggccaacatcatcctgataccaaaacctggcagagacacaacaaaaaagaaaatttkgggccaatatccctgatgaatatcaatgcaaaaatcctcaataaaagactggcaaaccgaatccagcagcacatcaaaaagcttatccaccatgatcaagtcggcttcatacctgggatgcaaggctggttcaacatatgcaaatcaataaacgtaattcatcacctaaacagaaccaacgacaaaacccatgaatatctcaatagatgcagaaaaggccttcaacaaaattcaacaccgcttcatgctaataactctcaataaactaggtattgatggaacgtatctcaaaatagtaagagctatttatgacaaacccacagccaacatcacactgaatggacaaaaaccggaagcattccctttgaaaactggcacaagacaaggatgccctctctcaccactcctattcaacagagtattggaagttctggccagggcaatcaggcaagagaaagaaataaagcatattcaaataggaagagaggaagtcaaattgtctctgtttgcagatgacatgattgtatatttagaaaaccccattgtctcaggtcaaaatctccttaagctgataagcaacttcagcaaagtctcaggatacaaaatcaatgcgcaaaaatcacaagcattcctatatgccaataataggcaaacagagacccaaatcatgagtgaactcccattcacaatttctacaaagtgaataaaatacctaggaataaaacttacaagggatgtgaaggacctcttcaaggagagctacaaaccactgctcaaggaaataagagaggacacaaacaaatggaaaaacatttcgtgctcttggataggagaaatcaatatcatgaaaatggccattatgcccaaagtaatttatagattcaatgccatccccatcaagctaccactgactttcctcacagaattagaaaaaacgactttaaatttcatacagaaccaaaaaagagcttgcatagccaagacaattctaagcaaaaagaacaaagctggaagcaccacactacctgacttcaaactatactacaaggctgcagtaaccaaaacagcatggtactggtaccaaaacagatatatagaccaatggaacagaacagaggccttagaaataacaccacacatctacaaccatctgatcttgacaaacctgacaaaaacaagcaatggggaaaagattttatatttaataaatggtgttgggaaaactggctagccatatgcataaaactgaaactggaccccttccttacaccttatacaaaaattaattcaagatggattaaagacttaagtgttagacctaaaaccatagaaaccctagaagaaaacctaggcaataccattcaggacataggcatgggcaaggactttgtgactgaaacacccaaagcaatggcaacaaaagccaaaattgacaaatgggatctaatttgaactaaagagcttctgcacagcaaaagaaactattatcagagtgaacaggcaacccactgaatgggagaagatttttgcaacctatccatctgacaaagggccaacatccagaatctataaggaacttaaacaaatttacaagaaacaaacaaacaaccccatcaaaacgtgggtgaaggatatgaacagatatttctcaaaagaagacatttatgcggccaagaaacacattcaaaaaagctcatcatcagtggtcattagagaagtgcaaatcaaaaccacaatgagataccatctcacgccagttagaatggctatctttaaaaagttaggaaacaacagatgctggagaggacgtggagaaataggaaggcttttacactgttgatgggtatgtaaactagttcaaccattgtggaagacagtgtggcaattcctcaaggatgtagaaccagaaataccattggacccagcaatcccattactaggtatatacccaaaggattataaatcattctactataaagacacatgcacacatatgtttatgggagcactgttcacaatagcaaagactggtaattaacccaaatgcctatcaatgatagactggataaagaaaatgtggcacatatataccatggaacactatgcagccataaaaaaggatgagttcacgtcctttggagggacatggatgaagctggaaaccattattctcagcaaactattacagggatagaaaaccaaacactgcatgttgtcactcctaagtaggaattgaacaatgagaatacatgggcacagggaggggaacatcacacaccagggcctgtcagtgggtgggggcctaggggagggatagcattaggagaaatacctaatgtagatgacgggttgaagggtgcagcaaaccaccatggcacgtgtatacctatttaacaaacctgcactttctgcacatatatcccagaacttaaagtgtaatttttttaaaaaaagatagacacatagtttatgccagaaaaataaaaaagttaagatagcttatagaaggttgagtgtgtattacctagaacttctctgaaaacagtaagtgtttatcattggaattatagacaacagatattatatatggcttatgattattaatgagaaatacaatttgtatttcttacttgctacatctcattttgaactgtattccaaaattgatggaattaggacagcgctacaaatttatttcattatttaatgttataagcaattaaaattttattcatatgagataaccatgctctcaaaattataactaatttcatattcagttacctatatgaaatccttcttaatcattctttaaaactgggttgtacaagaggttctcttgggccagtgctggagtagacaacagaggggtgagaacctcctgttgaaaaggaagaaaaattatcatgcaacaatttggaaggtttggattttttttaaaaaggcaagtgcattaaaaaataatgagatagtgtagtaaattatgaaaggctgggaacgtggcttcagtaaaggcagaaagtcctttattattatttttaaacctatctttctcctaacygtaaacataagccatatattcatgaatacaacccccaccagtgtgtgaggccagtctattaaaaataaaaaggcacataggagtctgtcacaccgcaagatgaaagctgtgttctttatgcatggatatcattttgttttagaagggttgtaaaaaataatacaattataaagaaagtcaatttatggaaagaaggtagactcttcccgcattatgtaaatactttctactagggtgctcgatataagaaatatactacacagcatttcactttcacagaaaatatgtgatgattattcacataataacaggaacttttagagcatgtgaatattcatttatgaattattgacagagaggttggaatgttaggagatagtgcctactggacattatttagtaatacagattttccatctctgaagctgtggaagtgcctactatacaggttaggtctttgatttacttaattcttacaataatcatataatgggaatattattttccccttataattcccatataatgggaatatcaattttctcccctattgggccactcacacaggatgtaagtttcaaatcaggcctaagtaataaaaaatggcaaattcttgatattttggaatgagagacaataggcataaccaagttgttatactgcctcttccatgtcacctcttctgtgcctcctgagcaaataccctccaacttggggagaagaggagagttggataggaatagaataaacttagacatggtttgtttttgtgctggtctaccactactgtctgccactacccgcccattcctccagggtaggagacatgatagaatttactgcaatgaaatttgggagatctgagatggccagtgaatctcaggccctgtatggacctatgactctaaaaaatgcttctaggagtcttagggaaacggagagaatgtttctgccatgttgtaaccttggagtctttttagttctgggatagtgtgtaggggcatcagaaattttgtcttaggtccagagtgtgggtagaagtcagtggagagagggtgtcagggagcttgatcacatggaggagagcaggggaagcaggcctcagtcaggaaacattgtaattttggaagtatacagaggtttagatggcggtgtgtgtgggtacagcactttatcatgtactttgacttttgtattccacttctgccatagccaggtgggagacaagctgttgctttggttagggttgccagataaaataatacagaatkcccagttaaatttgaatttcatatcaatgatgaataattttctagtagaattatgtctcaaatattgcatggggcacacttatgctaataaaaatatttattctttttgaaagtgaaatttaactgggaatgttttatttgctaaatctggcaacacaactctttggtgccctgagccagtgaaggaatcaaactatcctgtgctttatccatctttgaagtttgacaacaggtgggtgccccacaacaggtgttaatattacatttcatagaagaagtaattctcagttcaagaagtaattcttaattcttgatgggttagtctgtctttctgaggcagcccaattaggccaaatagaatggaaaatatttaatccctagaaaatttcgagagggtaacstatttagtagcttgttctagaacacacaaatagtaaatggcagcatcaggtttttgcaggtccaaatagcctccacaatacacattcaaaatttaaaaagctcctcaggaacatatttattgtgtaaagaaaggtgctcttaaaaactgactggtaggtagctgctgctattttctataatgtactcttgtgttatggtcaggcctacaaaagaaaccttacaagtctttcccaggaaacatccttttgaaattaattgaattattttaaagaaataatgagatattacttctttttaacttggcattttattcaaaggatgtttctgaaattaaaccagtgggagtttaaccaaaatagtacagtgacacaatgatgccatttagaagaatgttgtgctgagttaaatagctctaattatcagcaactttcaaattataaagcaattaaaaaaaccctcagttttcttcttcagtggaatccatagtgattgtatgaagcatttcatctggtttggatagytgggtttcagcatctattttgagatcccagagtcacaaaaagtatgctatccttaaacttagttttctcttgtgcccagaataatcctgtattctgaatcccattttcttctgtcccctgaggaccttcctttataggaagttgtattttgcctttactgtcaacttttcatttttttctactcatttttccttttcagcatattaacctgttaaagtttgatccaaacgacatgacgatgctggcaacaacagcagcagcaatggtaaccttctttcaaagcaataccccatccagcgacagtcctgtctttcttcttttcctcatgctaagtttctgaaagattttaggtgcgctgacctscttactaactacatccatttttggacagaagcgagggagtcgaatgtttcctggagctagttttgttaactggtgttctatttccattaagtatcagatgccacaaaaattccagttaatcatgaaaataattaaaaagaaatgttaatatataccttaaaaaatacatgttaagcatataaaatcaaacttttttttttttttttgagacagagtctcgctctgtcacccagcctggagtgcagtggtgcgatctctgctcactgcaagctccgcctcccgggttcacgccattcccctgcctcagcctcccgagtagctgggactacaggtgcgtgccaccacgcccagctaattttttgtattttttagtagagacggggtttcaccatgttagccaggatggtctcgattccctgacctcatgatccacccgcctcggcctcccaagtgctgggattacaggggtgagccgccgtgtccggcctaaaatcaaactcttaacataaaagctatgctgtacaaatattccttttgcgagcttttttttttttttcccccacgttgagctaggtgaagcttctgaaacaggaaatcaaagaaatctggcctgaaaggcaacccccgccttttaaaaaaacaaaacaaaactacctttaaaaagcacaggcatttttattgcttcaaggatcttcaaaatgcagctaaaattcaagatttagggcaatctattattaacatttttgttcattcaatgaacatgaaatactcccaacagtttaaaattgttaattgtagaggaggggaggtttccatggtcttttctttttctatgattccttcctctcttatttcaatatgagccagcttatttgcctccttgtgaccagctcaacagccctgccagcagactcagtgaaggcatggttttattagcagttgttgggtggatgtaagtatcagtatagttattactgtggatgttttaattatgtgcttgctaatctgtccttagtacttgctgttccctcttcgtggaatgattttcccctagagctcacaggacaattccttcttatcattcagggttcagcttaagtatcacttccttacagtggatttctctgattaatctaatgtagactttcgcctcttcatagcagttatcactgtaggaaattatcytgcacatttgatctttaagttgtttattgcctggcttctccattgggacataagcacattgtctctcttgatattaagtggcactcaataaacacttgttggagaaatgaatgatatgaaaggttaagtatacaagtgagtcagaagtcaaacatttctaaggagaggtttgtatatactattttttattaacttgacttttcacttctcagtaatctagtttctgcctttcacttgcacaaacactgttattatgatcacttatccaactgacatttttcagaccttttaacttcaactgttcttttttcctgtaaatcttaattttctttttttttctcccaatttttctcctacatgtctggactcttcccagttcctgtcagagtaaatgttgatattgcccagaacataacttgctcttccttttctctccttctcatttttctttctttcccctacaccctctgtatactctatagagtaaaatcatatacacccacggagtcaataactgcctttaatctaacaattggatgattcccatatctttatttctaccccatatatttctcttcaattcaagattttatccagttacttaatgaggtgttcaagctcaagatgtccaaaatttaaacgtattatatatcatatattgtaaatacatttttatatacatttaatatattatcttttctttcctccattcctatactttttttccacttatattccttgttggtgaatgcctgctaactggttatcttgcattcaaattcacccctttctaattcagcctaaatattattactggaaggattattttaaaatgaaaatctgaacatatcctcaagtaaaaatccttcaatggttctggttctctgttgcctttagaatgaaatctaaattgtataaagcaactgtgaccctttattttcccagagctttgttttcagccatatcagagtattttccgttctttgaatacatcacatttcttctgacttcatgcctttgcatatactgttacagctgcatgattattttcctcctggaattttctgatctggctcttacttgtacttcagttgcatatgtgatggctcctaatttggaggtagatactactttatggtgtttcgaaaggatttcctgtatacttttatcccatcacttgtcatactgtatgtgtttctccttctactgtaataagctccttgaagtcatagagaatgtttcctctctattccccaacaactaggacagtgccagggacaaagttgatttttaatgttttaataaatggttgccaaatgaactatggttgcacagttttgtgtatatctatattcttatttctatctatatctgtctgtaattttggtgaaagtcttcataatcttttgaggctgtttgattcactttgggatattatgctactattttattttgattcactattggtttttttgaggggatattttcaactgagtttttaaaatttttatttctgttttcctgtcatattagtttttttttctttttagaatacttgtaggttgcttaagcctcagcaattctgtgatggtttgggatggtttacaagatccctggttagaactcttctgttaaggttgtaaaagatagtttatttcctcagtagctttcttcaattaagaaaaattcttttgtcttactggattctgattttccctttcttatttcttcttatgttcactgtgtagtttccagagtgcttytccattcctttgttacccttctctctcccaaggcctttctaagaccacctcttagagccccacatactcattcctccttctagtaggctctgatctaccaggactctttttccattatttttgcaatgagagtagaatttctctttatagctgtgattttagatcaattttaaatttcattgctaggttctctcttctgttttcagtatggttctcccccatctcccaccatccctccactctggccccatcttgcccttgttccccaggtaggcttgcaccagaagggtgagaaattccatgctaagagttggtgttaattttttattcacgtgtaatttgaaatctaggttgttctctcttttctagttatgctgacagcataggttttctgtagttttatttattttttatttttatttttggagtatgtgctgggagattcagacttaagcagctgccatcaccttggctatccagaattcgatcataaatgtttaaagggattgaaaaacaatgttttcacttatctcttggtaaaataatttattttctttctttgaaacaaataacttgagatgtttcccaaaattgttgtgacatttctgtttggctacataaattgtctacagcatcaatttaagaaacaaagtgcttaacattaagagaaatagaagatgagatttcgcatcagtttcactcttggatgaattcagattagaacatgggcaatggaaagcaaattagggccttcaaaatttatgaccagtgggaaaatacatgagaataaaattacattaagattggtgctttgtgttaaagatacctgtgatgagttttcttttcaagaggaatgaaatgacctagatacaaaaagacaratattacatgatctcacttaaatgtggaacccaaagcaactttatctagttacttaatgggcttttcaagctcaacatgtccaaaatttaaatgaatgaatgaatatatgtatatacacacacctaatgtgtrtatatatatatatatawaaaatcatgtattataaatatacttaagtatatataaatttaatatatttttatttcctcattttctccatttctaccctttctttccactctatttcctgcctcagtgaatgcctgctaattggttttgttgcattcagtcctaggagcaatagtgagagctaagcagttttaaaacaatttggcacttcatttccatgatattgatttttttccagatacttatctaagcccctgagaaggtgggccaaggtgcttttcttggtctctttccacgcttaaatgtttggttactgtcaaaagagcaaagagcacctgcttctagtgaatacatgctcaaatgaaaaatgacaagttgcaacttaggttgagaagtaatgattcatttttctcaaccaaaaagactaatttgtttttgtgggtggtggtgcagaggtggcttgggtgaggaatgggggaaattacttacttttaaccagcacttggcattatgaaatgcatttccgataattaaatgaaaacacatttcattttgaattgagtttaaataatttactactgcaagtgaaatttaaatcttaggtacataaagaaaagactcccagggaaatctgtaaaagatacattaacagggatatagaaataattgttctataaaaaggaatttagtttggttttttacctatgtgatactagctgtactgatacatgttagggaaaaataatcaagtactataaaaaaatcagctgatccatctgggcgtggtggctcatgcctataatcccagtactttgggaggctgaggctggcgaatcacctgagctcaggagttcgagaccagcctgggcaacatggcgaaaccacatctctactaaaaatacaagaattagccagatgcgatgaccagcctgggtaacatggcaaaaccctgtctctactaaaaatacaaaaattagctggacacggtggcatgcgcctgtagtcccagctactcaggaggctgagacaggagaattgcttgagcctgggagccggaggttgcagtgagctgagatcgtgccattgcactccagcctaggtgacagaagggactttgtctcaaaaaaaaaaaaaaaagaggccgggcactttggctcacacctgtaatccctgcactttgggaggccgaggtgggtggattacctgaggtcaggagtttgagaacagcctggccaacatgatgaaaccccatctctactaaaaatacaaaaaattagctgagcttggtggcatgtgcctgtaattccagctactcagggggctgaggcaggaaaatcacttgaacctgggaggccgaggttgcagtgagccaagattgcgccactacactccagcctgggcaacaagagcaaaactccgtctcaaaaagaagaaagaaatcagctgatgcaagggatctctgacccatagagtcttgcccatttcatacttgtctttctggttcttggagagccatttatttcctttcaatgtcttcatttcttgctttcaaaagttaattattttggtatatttcccaaataccatccttgtatccctgtactgttctagccaggtgcttaatttttcatttcctgtctttcccttcctctcctccccaaacagtctgttaccccatgctgtcccttgttgcccaagaacctccaatttcgaaactcaacgaggktctgtatgtatgatttcttaacatctacctccctcacaaacatacttagatgcatgaatccctattaaattgttagacagtgtgagcgggatgctctcctccttctgtcctaagcttaaggtttctagagattctctcacatctgtcctcatatttcagagtttcctcatccatagaactctgagagcaacaagttttatgctcttgtgccttcccattagacatcctgtggtacctaggggtgaggaaggtcaagagagaagctggcagtcaccactgtcttggtgaggtgtgtgagtgytaaagcaggttgaaatgggatttggggctctgctcttcctgcaggaatgggacaacctgctggaccctttatcagttatatgtacagctcttcacactgcctatagccgtgttcccaaggatacaggttacaactctagcttttcagagctcatcctcttttcctccatggggaaccacccaggttgtgaggtggcttaattttagattttaaagacaaatgttcctgaaaatagtccttgattgccccagatgattttacattttttcccctaccaccaaaattaggtgtagggaaccccctttatgtttcagtgactatttgatttgagtgactcagccagaagttgagagaggacacacacgtacacamtcttccgtgggtttcctgctgtaaaggccagctgcgtctcagccagcaaaagcttaatcaacacacaggaggtgatcctaggatgatcaggagccttggcagccagtggaggagacattttttgccaagggggatgtcttactgtcaaaacctataacagttatgccttggatgattggtgttatctagctgttaactgaastatgcacagaaaactgacactttcrcaggcttttttggtgttgctatttcttcctggatccaagtgctggagtggctctttggtgcttagtgcagtcagtagcatcttggttcctctgaagcattgggcagaatggggagcattgcctgggacactgatggggcctcatcatggctgggggtgccaggtaatcatttgggatgataggtttagttaaatactttttggattggtatcaatattactggagatttgtatttttttctacaactaaaataagattggagaccttggaagaaagtagtaaaatgactaaagtgtgagaaaacatgattcattagaaagaaaatgaatttacttaacccttagaagagaaaggtaagaagagaataattcttcatatataaaacaaaggaatttctcttaaggtagcaaatggctattatctatttccacaaatgtagaacaaaatcagaggacaaagctcttattcargcataaatatgcttgagtgcagctagcagttatttggcactttctctatctcaggttatgctaatcactttacttattatttcctgtaatccttgaaatacttttacaataatcttactgtttttctcattctatgaatgagaaaactgaggcacatagaggttaaacttggggacctaccaaagtatggtagggaagcagaaattgaatgtagatacaaatactagatgtgaaagtcacaggtaagaaatgaagcaaaaatacaggaattaggaagacacagtgaagcaaaagtagtggttaaatatctagactatcaagaactagaagatctattggaattgagtactaggtgaagggtggagggtcatgaacccatatagtaaaagaagatggtgaagatcagaatccagataagtggtctgtttatcagatatgaggtgacatatacaaaaagaccttaattctggaggcaaacttcaacttcatccagcacgcctatgtatttctggctaaagtagattcttgttcccagggcatggacagtctcaaaaatgaaacaggtgaatgagtgtgaacaagactccttctgtgcctcatcaatcaacacttttgacttcatagcttaagttgtaacatctatgtcaccaataacttatcttttaaaattcccttaggtttgggttgctttttagcagctttataacataaaaggcttctaattaggaatttttaaatagcagaagatacggcattatttatatccctgtagggaaaatatgaatttcactgaaacaaaagaaaaccaacaaagaagtgtttcctatcagatgatcactgttggctttaaaaggaagagacgtctagttgacttatttgaaggaaagcttttctgagtggaatcagaccaaagctgaggccttttakgtttcttgtgctttggctaggtatgccgttagcctctgtctctgactgaaagtgctgcagtgaagccacatactcctgttcaaaggggagattaacacttgttactagtagaaaacaaaaagccaaggatgagaaagtaaaattgggtttaatttctatcatcactgggtctaacttccactgtgttatcaccacctaacttgggtactgctgctcttgctgtgaccttaaatgggtcagcatagtcactagggaggtttttatctttctttctgttttaattttaattttagaatcaaggggtacatgtgcaggtttgtacatgtacatggttatattgcaagctgctaaggtttgggctaagattcatcctgtgacccaggtagtgggcatagtacacaataggtagtttttcagctattactcctcttcttcctctaacctctagtagttcccaatgtccccacctctactagtccccaagaaagcttgttgctatccttatgcccatgagtatccaatgtttagctcccacttataaatgagaacgtgtggtatttggttttctgtttctgtgttaacttgcataagataatggcctccagctgcatccatgttgctgcagaggacacaacttcaatcttttttatggctgcatagtattccatggtctatatgtactgtgtcttctttatccagtccaccactgatgggcatctatgttgattccatgtctttgctattgtgaatggtgctgtgatgaacatatgagtgcatgtgtctttttggtagaatgatttattttcttttggttatatactcagtagtgggattgctgggccagatgatagtcctgttttaagttctttcagaaatctccaaactcctttccacaggggttgaactaatttacattcctaccaacaatatataagcatcccctttttctccatagccttgccagcatctgttgtttttttgactttttcataatagccattcatttttcataatagccattctgtgaggtggtgtcccattgtggttttattttgcattatctgatgaatagtgatgtggagcattgtttcatatgtttgttggccacctgtatgtcttcttttgagaagtgtctgttcatgtcctttgctcactttttaatggggttatttggtttttgcttatctaattgtttaagtttcttataaattctagctattagacctttgtcagatgcctagcttgtgaatattttctcccattctgtagattgtctgtctgctctgttgataatttcctttgcagaagctcttctgtttaattagatcccacttctcactttttttttggtaaatggttttgaggatttagtgataaattrtttcccaaagtcaatgtccagaatggtgtttcctaggaaatcctatagtttgaggtcttacatttaaatatttaatccattttgagttaatttttatatgtggttaaagataagtgtctggtttcattcttctgcatatgactagtcagctgtcccagcactatttattgaatagggagtcctttccccattgcttgtttttgtaaactttgtcaaatggatgtaggtgtgtagctttgattctgggctctctattctgttacattggtctatgtgactgtttttgtacaaataccatgcccttttggttactgtagccttagagtatagtttgaagttgggtaatgtgatgcctctggctttattctatttgcttaggattgttttgcctattcaaattctttttttggttccatttgaactttagaatactctttttctaatcctgtgaaaaatgtcattggcagtttgataggaatattgttgaatctgtagattgctttgggcagtatggccatttcaataatattgatttcttcctatccatgagcatggaatgttttcccatttgtttgtgttgtctctgatttctttgagcagtgttttgttttttttttgtttttttttttaatttttatttttttattattatactttaagttttagggtacatgtgcacaatgtgcaggttagttacatatgtatacatgtgccatgctggtgtgctgcacccattaactcgtcatttagcattaggtatatctcctaatgctattcctcccccctcccgccaccccacaacagtccccagagtgtgatgttccccttcctgtgtccatgggttcaattcccacctatgagtgagaacatgcggtgtttggttttttgtccttgtgatagtttactgagaatgatgatttccaatttcatccatgtccctacaaaggacatgaactcatcattttttatggctgcatagtattccatggtgtatatgtgccacattttcttaatccagtctatcattgttggacatttgggttggttccaagtctttgctattgtgaagagtgccgcaataaacatatgtgtgcatgtgtctttatagcagcatgatttataatcctttgggtatatacccagtaatgggatggctgggtcaaatggtatttctagttctagatccctgaggaatctccacactgacttccacagtggttgaactagtttacagtcccaccaacagtgtaaaagtgttcctatttctccacatcctctccagcacctgttgtgtcctgacyttttaatgattgccattctaactggtgtgagatggtatctcattgtggttttgatttgcatttctctgatggccagtgatggtgagcattttttcgtgtgttttttggctacataaatgtcttcttttgagaagtgtctgttcatatccttcgcccactttttgatggggttgtttattgatgggacgtatctcaaaatagtaagagctatctatgacaaacccacagccaataccatactgaatgggcaaaaactggaagcattccctttgaaaactggcacaagacagggatgccctctctcaccacttctattcaatatagtgttggaaattctggccagggcaatyaggcaggagaaggaaataaagggtattcaattaggaaaagaggaagtcaaattgtccctgtttgcagatgacatgattgtatatgtagaaaccccattgtctcagcccaaaatmtccttaagctgataagcaacttcagcaaaatctcaggatacaaaatcartgtacaaaaatcgcaagcattcttatacaccaataacagacaaacagagagccaaatcatgagtgaactcccattcacaattgcttcaaagagaataaaatacctaggaatccaccttacaagggacgtgaaggacctcttcaaggagaactacaaaccactgctcaatgaaataaaagaggatacaaacaaatggaagaacattccatgctcatgggtaggaagaatcaatatcgtgaaaatggccacactgcccaaggtaatttatagattcaatgccatccccatcaagctaccaatgactttcttcacagaattggaaaaaactactttaaagttcatatggaaccaaaaaagaggccgcatcgccaagtcaatcctaagccaaaagaacaaagctggaggcatcacactacctgacttcaaactatactacaaggctacagtaaccaaaacagcatggtactggtaccaaaacagagatatagatcaatggaacagaacagagccctcagaaataaagccgtatatctacaactatctgatctttgacaaacctgagaaaaacaagcaatggggaaaggattccctatttaataaatggtgctgggaaaactggctagccatatggagaaagctgaaactggatcccttccttacaccttatacaaaaatcaattcacgatggattaaagacttaaacattagacctaaaaccataaaaaccctagaagaaaacctaggcattaccattcaggacataggcatgggcaaggacttcatgtctaaaacaccaaaagcaatgacaacaaaagccaaaattgacaaatgggatctaagtaaactaaagagcttctgcacagcaaaaaaactaccatcagagtgaacaggcaacctacaaaatgggagaaaattttcacaacctactcatctgacaaagggctaatatccagaatctacaatgagcagtgttttgtagttctccttgtagagatctttctttcacctccttggttagatgtatacctatgttttttgcttttcttttggtggggtggggcagttgtaaatgtgattgcattcttgatttgactctcagcttgaacattattggtatatagaactgctactgatttttgtactttgattttgtatcctgacactttactgaagttgtttatctgtttcaggagcctttagatagagtctttagggttttctagatacagaatcatattgtcagtgaagagagatcatttgaattctttttttcctatgtggatgcattttatttctttctcttgcctcattgttgcagctagaacttccagtactatgctgaagatgagtagtgagagtgggcatctttgtcttgtttcagctctccaggggagtgcttccagcttttgctcattcagtatgatgttggctatgggtttatcatagatggttcttattattttgaggtctcttccttcaacatgtacaaaaaaaatgtgattcaccacataaaaagaattaaaaccaaaaccatatgatcatcttgatggacacagaaaaaccttttaataaaatctaacactgcttcatgataaaaaactcctaacaaactaggcctagttttatttttttgtgtatgttgaaccaacgttgcgtccctagaataaagcttacatgattatggtgaattaactttttgatgtgctactggattcagtttgctagtatcgttgccaagaccagcttggtcatggagaccccaacccagcggcgttagaggaattaagacaaagacacagaaatagagtacaaagtgggaatcagggagctaacagccttcagagctgagagcctcaaacagagtttgacccacctatttactgacaataagccagtgataagcattgtttctataggttatagattagctaaaagcattccttacaggaaacaaagggacaggctctggcttgttatctgcagcaggaacatgttcttaaggcacagattgctcatgctattgtttgtggtttaggaacgccttgagcagttttctgccctgggtgggccaggtgttccttgtcctcattctggtaaaccggcaacttccagcatgggcatcatagccatcaagccatcatagcagcaagaaatctctgcagtcacagggctgcagagattttgtttatggcttgtttctcatggcctgtttatggccaggcttgaggcctgttcctagcaattgtgttgcggatttttacatctgtgttcatcagggatattggcctgtagttttcttatctttttgtgtctttgccaggttttggtgtcaggctgatgctacttttgtagcatgagttagaaaggagtcctatcccttctcctcagttttttagaatagtttcagtaggattgctataaactcttctttgtacatctggtggaattttgackgtaaattcttctggtccagggcttttttttttggttggtgggctttgtattactggttcaattttggaacttgttattggtctgtcyagggtttcaatctcttcccgattcaatcttggtaggttgtttccagaaatttatccatttcctttagattttctagtttatgtgcattgaggtgttcataatagtctctgaggatcttttgtatttctgtgggattggtagtaatgtcatctttgtcattttggattgcacttatttggatcttctttctttttttctttgttaatctagctagtggtctattgatcttgtctatccttgcaaaaaaccaacttttggtttcactgatcctttgtatgtattttggggtttcaatttcatttagttctgctttgattttggttatttctttcattcagctagctttggggttagtttgttcctgtttttccagttcctctaggtgtcatgttagatggttaatttaagatctctctaaattcctgatgtaggcatttagtattataaattaacattgcttttgctgcatccccaaaattttggatgttgtgtctctgtttttattaaataatttttttacttctgccttaattttgttgtttacccaaaagtcatttagaagcaagttgtttaattttaatatacttgtgtggttttgagaggtctccttggtattaatttctatttttattccactgtgccctgagagtatggttggtatgattttcatttttttgaacttattgagacttgatttattgctgagcatgtggtcaatctcagagtatgttccatgtacaggtgaaaagaatgtattatatattctctggctgttgagtggaatattctgtagatgtatattaaatccaattggtcaagtgtcaatctcaagtccagaatttcttagttggtgcctcagtgatctgcctaattttgtcagtgcgatgttgaagtccctcactattattatgtggctaagtcttttggtaggtctagaagtacttgttctataaatctaggtgctctactgttgagtctgtatatatttaggatatttaagtcttgttgaatcaaaccttttatcgttgtgtaatamccttctttgtcttcttttactgtagttggttttatctgataaaagaataccaactcccgccgtttttttgttttctgtttacatgatagatcttttcccaactcattacttggtagcctatgggtgtcattatgtgtgtgtgagcgataggtcttgtttttttttttttaattcaacttgccaatttgtgccttttaagtgggggtgtttagactgtttacattcaaggttaatattgatatatgaggttttgatcctatcaaagttgttacctggctgttttgtagtttctattgtgtgattgctttatgggttctgtgagctatttatttaagtatgtttttgtggtagcagttattgttctttcatttccatgtttaagactcccttaaggatctcttgttaggctcctctagtggtaatgaattcccttagtgcttgcttgtctggacaagattttattttttctttcacttatgaagattaatttagtgggatatgaaattcttggttgaaatttctttttagaatgctgaaaatgagctcccaatctctcctggcttayaaattttctgctgagaagtctgctgttagcctgatgggattcccctttatgtgatctgatgttttttcccagctgcccttaagattttttttataacattgaccttgagtagtcaccggactatacatcttgctagagatgtctagctctctagcatgattaggcaaatattcttgaagtattctctcaaatatgctttccaggttgtttactttttctcctctcacagaaattttgataattcatggttttggtcactttacataattccctaattctcaatgactttgttcatttttaaaaatagttttttcttatttttgtctgattgagttaattcaaaaagacctatcttcaagctctgaaattctttcttcatgttgatcttggcaattgataaagctttcaactgtattttgaaatttcttaagcaagttttcaattccagaagctctgactgatttatttttaagatgtttatctctttcctcatgtcctgcattgctttagcagtttctttgtgttgattttcaactttgtcttccatctcattgagcttatttgcagttcgtgctttgaattttttatctgtaacttctatgtttccattttggttaggtatcattgctggagagctagtgtgatcttttagtggtgttgcttcatccaggtttttcaggtgccagaattctttagctggttccttctcatctgtagtcactggtacttctaatttttgtaattattttcttgcagggaggatattttctttgctttctttccttgtaatattgttttctctccctttccctttccccgcttcttaggaagtgtgactgtagacaatgatgggtagtcttttggcttttctgttatagccctacgcactatagggctgcactttactggcaggttttgtattgggctatgcaggttttatattgggctgtgcagtttgacctacaagctggctatggtcagtgcagctgggtatatatttgatcattgtttactgggagaagctctctgttgcttcaggcagtgggctaattcatggagtgcacagtggtctgagctccctgctttgcccccgggggtggggtgggagcaagatgggtggggccatacggggtaggcccacctacaggtttcctgatggcaggtacaaacatctggactgagggagaatgtagtgagcatccaccgagaggtgtgcctaggtgttgagatggaaacctccttggatccaagttgtctgcacagggagagagggagcagcctaaactcttagtccaggaaagtgagtgttctagattccttgagatctgcctgggtgtggagtgtaaagggccctgctgcaccacacagtctctgcacaggaagggttgggcagctcaggctgttaaatcagattaacaggtgctctgactgcctggaggtatcgctgggcatgggacagagagggccctacttcatcataatctctgcacagcaaggctgaggcggctcaggatgctgagtaggtgagcaggtactctgaatgcctggagatctgcttgagggtggagtggagaggcgctcccctgtacctgaaactctgcacaggagggtggggtggctcaggctgtaactctgtgtgagcaagtgctttgaatgcctggagatatgcaggggtatggagtacatagggccccactataccacgatctatgcacaggaagtgtagggtggctcaggctgttgatctgggtgagtgggttctccaaacacctggagatctgaagtttaatcggcatggtgcaaagaaggctcagatgcactacgatctctttgcaggaagggtggggcagctcaggctgctgttccaggcaagcaagtgcttcaatgcctggagatatgcctgggtatggattggaaagggccttgctgcaccatgatctttgtgcwggaagggtggggtagctcaggctggaggagtgggtgctccgactgcctggagatctgtctgggagtggggtggagagggacccactgcaccactctctctgcataagaacagtgggtgtctctggctgctgaaccagcagagagtgccccctgatggctggatttttgcacaggactaatgggatggctcaggctgtcaatccaggtgagcaggtgctttagtgcctggagatctgcctgggcatggagcagtaccacggtttctgcgctgtaccacggtttctgcataggaagggtgggtggggacgactcaggctgcagtctgggtgagcaagtgcactcgcgggtttaaattttataggccaagttgccacctgagcctcaatttcaaatgaactttgtgtagcaaatgtgacatcatttctgggtattcagttaaatatggaaaagatacacattttgaatataatgattacaatcctctggctatcatcctggccccggccctcttcatcactgcagctatcttctatatctttgctttaatattttccttcaactcaatctcatatatgattactagactaattttcctaacataatattttgtcatgttccctcattctaaagaaacgatagtgatttcttacctccattcagattaaatccaaacttcttctgatctttgaaaatccaatggaagcttttattcattgctttcatctgtatttattgaactttcaccattcagtaactcatgataatgaatataaagtcatgataatgaataatcaaaattacagaaatctttgaaattaagagtttcagataagtgactatttctaatattggaagttaacgttttttgttgtttttgactggaatcttaaaaattaaatacctctatatatccatgctttttaatttaaattatttatattcactgaagtactatagggatatagtctttggtaatttggtattttaaacccatcatcttccctaccttcttcctaggtatgctgtgttttttgaaggaggaagccataggtaggaatttttttatgacagatttttttgaggtataatttgcatacagcaaaattaactgtttgttttatacaggtctatgagttttgaaaatgcatacagttgtgtatctaccaccacaataaaaatatggaacagttctaccacccacaaaattcacttctgtcccttgtggttaactcctcttcctgatatctggcaatgattgctttgtctgctatccttgtagttttgtcttttttcagaatgttacataaatggaatcatgtaataatgtggctgtttgtgtgtggcttctttcacttagcataatgcgtttaggattcatccagttgtttgtatcagtagtttatttatttttatggctgaatagtttaatatatggctgtgtcacaatttgcttttctattcattagctgaaggatatttgagttgtttgcaatttttgattatgatgaaaaaagctgccataaataatcatgctctgatttttacatgaatgtaagttttcattttacttggataaatatccaggagtaggatttctaggtcatatggtagcatataattaactttataagaaattgccagaatgtttttcagagtggctgtacctttttgcattcccagcagcaatgaataagagtttcagttgctctgtatcctcacaggcattttgtagtaagacttttaaaaaatgtttttaattttagctactcttacaagaatttagtggtatctcattgtggttttaatttgtacttccctaatgactatgttaataatcttttcatgtgcttatttgctttccatagatctttttttagtgaagtatctgttaaagtcttttgcctttttttaggggaggtgtattagtatgctagatggccataataaaagaactcagactgggtggcttaaacagcagaaatttttatcttcacagttctggaggctaggagtctaagataaaggagtcaacaagtttggtttcttccaaagccttagcttgcacacagtcaccttttagctgtatcctcacatggtttttcctctgtgtacacacattcctggtgactctgtgtgttcaaattttctcttcttataaggacagcggtcgtattggattagggtccaccctgatggcctcattttaatgtaattacctttttaaaggccttatctcaaaatacagtcacattctggtattcaggaccctccatggataccaaaatcatggatgctcaagtcctttatataaaatggcatagtatttgcatatacctgaagtatatagacaaagccagagaagttttggcagagttaaagcattttccatataagaccaattacaatgatttgtttggttacagattgctatattccaaggaagtttactttattactcaatgaggaggggtaaagatctaagggaatcttatctctgttgtcatgtggccttcctaattattaatatttacaggaaaaaaagtcagaagttgcagctgcatatgccatgtgactcgggctacatagctacattcctgtcaaggctcagaataatataaagttccaatagatttaaatttgaattatttaatttcacatagcctatacacatcctcccatatagagcttaaatcatctctagattacttattatacctataaaatgtaaatgctatgtaaatagttgttataatatatcatttttaaaatttgcattatttttaattgttgtattgttattttttatttttaatttttttccaatgtttctgatctgcagttggttcagtctgtggatttggaatctgtgaatatgtagggcccactgtatttacagtgtaatttaatgagcctcttaagttatgcaaaggtatacttagactctagtcttggatggaaagtgatagctaattgctctgcataataaagtaataggctgaacatggatatctgacatgaaatattattagtttcatattctgtgttgttgtgtatttctctgttatcgctaatatttagtacaaatgttatggattttttttagtcaagtatggagaatagtagaggaggtgtggtggagacatatagcgtgagcatatatgaaaagcatggcaagtatagaagacagtgagtgagaattccatgagaggtgtcctgagagtgtaaagctcctgggaatctttgaaaatcctggaaagcatgtatgatgagggcttgagacattttatctggatattaaagaaaaggatgatcttagccagattgtaatagttaagcatttcatcatgtaataatagtcttcacttcatatattgttcattcattttgtcatacatctaacattaatttgttgtactgttttacaaggttacaacatttaaagatagcattcaagtattcatgaaactaggtataggaggagagagaaacatatgagcaagtgattgccttacntagtgataattcagtaaacatgtacagctatggagaaaggtaaaaggggaacgtgatcaactccatttggggaaagggtcatgaagggctttacattttgaaggtggagatgttgcaaggtgaaatgcagaattggggctcaactcagaaggccaagttggtccttggctttggctttgtgcaggaaagaattcaagagtgagccaacagagagaaatgaaagcaagtttattggaagaacaaaggaacaaaaggaaggctactccataggcagagcaccctatccccccagtcccaggctcgtcattggttataattgtggttatttcttgattacatatgcttactaaggggtggattatgcatgagttttctgggaaaggagcagggagctcccagaacggtggttttctcccctatccagaccatacagagttaacttttgggcattgccatgacatttgtcatggcactggaaggagtgttttttagcatgctaatgcattataattagcatataatgagcagtgaaggtaactggagatggctttcattgccattttggttctagctggttttggccagtttccttcactgtctcttgttttaccagtgatgtcttgtgacctgttgtcttggaaactagtcctgctgcatttttatctaagatagaacagataagaggggaaatgtaattctatgtatagagtgattagtattcatatctctgtgtagaagtgcagagatatgaaatataggtgmaagtccaggaagtacaaatactttaatatggctggagtgtaggctgctgtaaatcaaacttctctcaaaagtttgtgagttcctttatgagtgaatctatgcagtgaaacttacacatttgccacattgcctagcaactagtaaataactaaataatcattgaatcaagttttgtgatgattttggaaagtattcttattgtgaggttataatttttggtacgatttgatttaagaaagacacaattttgctactttgctttagcaaagagtttgtaggagactaaagagcaatggtttccatcattgatctgtgtatcttatagttgtttatttttttatatttggagcaaacattctcattctttttgcagaaagaccctagaacagtttctggcccttaatagttacataataaatatttcactgactaaaatgtcttccttttcacagagacaaaagcatacataattaaggccaaaatgtacatggtctcatctttggcaagatgcaggcatgtctaaaaacatccactcccgatttaactttcactttgcccctcttgtaccaaacctgttttctctttttcttactatcctcaacaagaaggatttgcaactcttattaggggaatccagttctttttttcttcagtttctgaagagttaaacagaattaagttttcttttaatgaaatttttaaaagaggaacttgagattgggaaggaattactgaatccgtaaagtaaaagctgtagacgatagtctagcaccactgcttcagcagaagtttaagccattgaagttcagatttagcttcataatagatgcttgctttgtaagcttagtacatccttacgttctgatattccaagagaaatggaagctttttgctggtgcagtggttttcaactaggggcagttttaccctagaggggacatttggcaatctttagacacatttttggttgttatattgtgtttaaaaggggaagtgagtgctattggtatctaccatgtagaggccagggatgtgagaacatcttgcaatgcaaaagataacccccacaacacagaattacttgttaagactaaaggtcttggctgggtgcagtggctcacaccggtaattgccccacccccccgtgctttgggaggctgaggcaggaagatcacctgagccccagggctttgagagtagcctggccgacatggtgaaacctggtctctacaaaaaatacaaaaataaataaataaataaataaataaaaaagacaaaaattagctgggtgtggtggcacatgcctgtagtctcagctactcaggaggttgaggtgagaggatcactttatcctgggaggtcaagactgcagtgagctgtgaccatgccactggactccagcctgggcaacagagcaagactctgtgtcaaagaaaagaaaaagacaaaaaatcttaacccaaagtttttttctggccccaaaaactcaatagtgctggggttgaggaattctgtgttaaagtaacacagatttgggtcatagttatagtctcactgcggtgtgtgtgtgtgtgtgtgtgtgtgttgcaaacttgccaaataacacaaattctagtctgttgaataaggaaacatcacttgtctaaggcagtctgtatgtctagacaagattcaagtgatctatcaaatatataatgtgcctttaaaaaaataaactcagttacgtatttacctaaaaggctggattggctttgagaagctgattttaaaaagaacttttgtaggaaatcagtatgttgaagagatatctgtactcttatttttattgcagcactgtttacaatagctaagatttggaagcagcctaagtgtccatcaacagatgaatggataaagaaaatgtggtacttatacacaatggagtactattcagccataaaaaagaatgagatcctgtcatttgcaaaacatggttgggactggaggttattatgttaagtgaaataaaccaggcacagaaagacaaacatcacatgttctcacttatttgtgagatctaaaaatcaaaacaactgaactcatgaagatagagagcaagagaacggttaccagaggttgggaaggatagtaggagggtggcaggggaggtgaggatggttaataggtacaaaaagttagttagaaagaatgaataagacctagtatttgataccacaacagggtgattatagtcaataataatttaattgtacatttaaaaataactaaaagagtataattggattgtttgtaacataaaggatatatacttgaggggatggatgccctattttacatgatgtgattataatgcattacatgcctgtatcaaaacatcttatgtaccccataaatatatacacctactatgtacccacaaaaattaaaattaaaaattaaagaacatcacttttcttttttttattttttattgtactttaagttctggggtacatgtgcagaatgtgcaggtttattacatagatatacatgtgccatggtggtttgctgcacccatcaacccatcattgacattaggtatttctcctaatgctatcactcttctagccccccaccccccgacaggccccggtgtatgatgttcccctccctgtgtccatgtgttctcattgtttaactcccgcttatgagtgagaacatgcggtgtttggttttctgttttcctgtgttcgttttctgagaatgatggtttccagcttcatccatgtccctgtgaaggacatgaactcatccttaaaaaaacccacttttcctaaacatgcatatgtttttcagaggttgaacaaagcagcttcaaaaaggattaaattgatttcaactttagggggatttatgtgtccttcataagagattcttacatttctattatttcatttagtatatttttaagggtgttaggactttgaaagtacggagaaaaatcaggaaatcagaatgattttggatagaatgaataacactgtatgtctccttttagtaactctcatgaaattttttatgcagtgctttttaaagctttaagtgaacagaaaagactgttttttgttcttagagttttcagctcacagaattttcaaaaaattagcattggtcccaggtacactcttccaaccctttcttatttcccaactacctctgacagtagacagtaagatgtacccatctgcctcaaagcagtgaacttaagcttaagcttccttatacgaatgcaagttctcatcaaaacaaatgaaaataaaaataggagaagtgattgttttaggtaagctgtcatttgctgttgtgacaaagaaaccccctcatttcagtgggggtattcacaataaaaaattttttgctcagtcacctgataatccaatgtgtgtgttcccggttgctgggcagctttcatctacctggtaattctgggatccaggaataaaaagctgattccattgtgtgacttctgtatcatctgcctctaaccagtaaaaggggaaagagagaaaaatccctacctgcttcttaatagcaccagcagaaaacggcatatatcacttacgttcacatgttcttttgatgagaactagttagaaggcttgtacacagatgtgagggggcctgagtgcctccaagctacatctctgtaccctggaggggcaatccatgctacataagatttgttcagtcttttaaagacttctatactgacactctgtggctgaatatatgtggtcacatgtctacaatggcggtgcatacactaatttttttaaaaaacttttaaattatttttcttcctttcttttccattttttttttaaaaggaacagggtcttgctatgctgctcaagctggcctcagacttctaggctgaagcaatcctcccccgtcagcctcctgagtagctgggactacaggcataaaccaccacaactggcctattccctactttattaacctagagggaaacaacacatactggggcctatcagaagatggcaggtgggaggagggagaggatcaagaaaaacaccaacgggtactaggctgaatacttgggtgatgaaataatctgtacaacaaactcccatgacacaagtttaccaatgtattaataacaaacccacgtgtgtacctctgaacttaaagttaaaaaaaaaaaaaagaaagttggaggctaggcacagtggctcatgcctataatcctagcactttgggagtcygaggatggcagattgcttgagcccaggagtttgagaccagcgtgggcaacatggcaagactcagtctctacaaaaaatacaaaaattagccaggcatggtggggcacacctgtagtctcagatactcaggaggctgaggtgggaggatcacctgagcccaggaggtcgaggctgcagtgagccatgattgcaccactgtgctccagcctaagtgacagtgaggccccatctcaaaaataataataataataataaataaaataaaataaagaaacttacagtcacactagtcacatagtcatgagttacaacctagagagtcaaccatagagcctatgtttttaaacacatgttctctaagatgttagattaaatgagtatttagaatgaaaatatgttgttcaataaatgggaatcagatgtttatcattttaggtgtaaaggatgtgtgaaatgatgcctaggggtagataataaaggatttttttttaaaaaaagcaatatttgaatggcatgaaagtctattagagaacgaagtctaaaagtagggaaaactgtgaaggactaagatcatccaaacttatgtagggctaatatcataatatttcaaatttagtgtggttattgagcatgaaaaaagctggaagattctgtcaatatttggtttaccaagacaataatgtgtagtcaaaaacttaactagccatgctcagactgtagatttttagtgattaaagtaggttttccctctgaaattttaaaatgtgaaactttgttactatgagatttggttccagttcaacaattttctttttctttttttttgagaggagatctcactctgtctcccaggctgaagtgcagtggtgtgatcatagttcacttcagtcttgaactcctgggcttatgtgatcctcccacctcagcctccctagccagtgggactatagatgtgcgctactgtgcccagcaacattattctttttgttcagtgtgccttttggttttctgtctgctccctcgttattccacattgaaatttagggagcatctattgattgctaccttaattgtggatcttcaccataacatagctatgatcttttaaagtgcttgtaggttagagtctggtattaagttatgatgaagaatcagtgggaaagtggtacaaatccagaaagacaaacaactgtttgtcatatgtaagaaacaattttataggcatgtcttggctaccatcagatattatttagattttcaaacaccgcttgacatctcatagtttgtgatatttctctaccctcatttccccggaagctcattttgtcccgctttggatatagcaaacccatattttactcttgccatcttctttggctttgttcacacatgaatgtacagccaacactgaaattcttcctagggagaaaaatatgtctcagtttttggctctgcatatctgattatcctaaaagcaatggtagcacctaaacttttctatagtagaacaattataattacgtagaaagagaagaaaacaattgattataccacagtattgctacttcattgttgtatttgattatttgactgcatgtagaaagctattgctgggttaatctcacaaaaaaacttgttgtattgttttccaactctattttataattttgtggcacaactttgaacatatttagattgcttacattttaaaaaagaatctgggcatatttcccctatgagataccattaataaagcatcacatataattagaaaaaatagcattgtacagatgaagagagaaaatttttttttggcagaaacaaattatggtgcatattagtatgtctttagatccaaagaacatttgataattgtgtacaattaactccaaaataagttttgattcttctttggaagcatatatagaattttagatacaaactaaaatggcaaataaaaaataacctgacaggtagaaaacatacctgcaggaattctatagagataaaaccatgcaagtgaaaatactatacaaattgaaacaaaaatatgactttgggaggagaggaattgttctcagttgacaaggtaaatggcagtgtctttcgatgtgggggaaaataactaaatgcttgattttcatgtggttattattaattttttgtgcatgtgcagtacagaggctgtttttcaccttctccaaataaaagaacattctacagtctcctctgtgttttattttcttgttgtttatttttctgataggcagtagttctctcccctgggtgctgagttgacctccatgtgagttataaccatagctggggacaagggcatacagtattatcaaggataattgttttatggtacatctttccctgaaggctgtggacccttttttgaaatgtgctctttacttgaaacctctattatttatttgcttgttttggattttttcctttgaacagcaggcatcataaattgataaaactttactagaaaagttgattctagcctcatcgttttcctctcttttcckttcctttcctcgtctataatctagaatatacaaactctcttattgtgaaatacttggggagggcagctttgaaaccatctttctattgcatgagagtattatagctggtattttgagttgggcgattaaggctgaaaatggttttgttgttagactggagaatgagagtaacagaattactttaaaaaaataaaattctgtgtaaaaacagggtccttttataaatagaatgcaacatttttcagatatcaaaagttactgcttataatgacaccacatgcataagactttattattttaaatgatgcaaaatgtcactgaatctttccagcttgaractaaaatgcttccatggcacttgacagaagcaacgctaattctcaattacccatctatggttatgagagacagcaaaaacacaggcaattgccttcataaagcattaaaaatcttttaggtatttgttactatttctcccccattaaacttttctcccccgaagcytctaagaaggaagaatactgaatgatctgtactttctttttcttttttttttttcttacctacagttttgaagaggatgataagaaacggtcaatgtggaaggttttaggtaaaacaaaaacaaaagtccagaattttatacatcctgaataatcattccctgggttctttcttggggacaaagtgtcctttttctttatagaatcatttcaaactccttttttgttaaaaggcccactaattgctgaaaggcacttactgcaaaaagggatacatggatatctttttgtcctttagctttaatgaattatatattcagtgtatgtacaaagtaccccaaaaggtctgctgggctcttcaaagaggtttaatactcagccactactttcaagaaacatacaggctgtctgctcttccaataaaatgacatcagcagcagcaacacaaccaacacaagttggatgagtaaatagtatgtgataagggccgcaggagtgatatgaacaatagcttttatttgaaaagtcacaagaaagataattgggatctaaagggatcaaggtactttttattcgcgagttattatttttgtttctggaccttgaagaatataaaaaatttgaattggtgaagaagataggggagcgaaagactgctatagtggggaaaacatgaggaaaagaattaagaaggaaatatccaagggcaagcatgaatagatcagtttatgggatgatttctgtaaaagagaagaggaatataacatgggaaaatcagttagagccggattatagaatgttttaaataacaggatcgagtttcaatgttttgttttaggtaatagaaatgcttgaaggattttgagctggaaaatggcatacacaacagtattttagaatgattcatctgatggtgatgaactggggttagagcattcgtaggagcataattgaggatcatgagaaggggtagaaggaggtaggaagggagggaaggacttttgtatctaaactaggaattggcaattgacagcctatcagccaaatacagatctctgtttgtttttgtaaacaaaattgtattagaatgcagccatgctcattataaaaaatgtattgtctatggctgtgtttgtgcttcattgaaaagttgaatattcacaagagagactatatggcctgcaaagcctatagagaaaatttactaacccctgtctgaaattattaggtaattcaagataaatcatttaaataaaccttatttatagttgtagatgctggtttggtaacaaaaggctcccagaaaaccagatcttttatgtattagattaaattgaacacatgtattgaggtgaatgtgcattgctcccttctccagaggacatgactgtaatcatggattccttttatcttgcctttgtgtcatttaagttcagctagaaaggcgatgtcctttttgagctgataacctgatatgagtttgtgtggtcagttttttcagatggtctttgggtgtagggtctagacatcaagcaaatgaaatcaagggtaaattttggtttcttttgccaagaaaactgatggtgattgttcccacttagctgaagcatcctgataatgataaaaacaaactactcagatttactgagcacttacaatatattggatgccgtgcccattgcttcatttgtattatgtaaaataatccttacagaggtcgggtgtggtggctaacgcctataatcccagcactttaggaggtcaaggtgggcagatgagctgaggttaggagttttgagaccagactggccaacatggttaaaccccgtctctactgaacatagaaaaattagccgggtgtggtggtacacacctgtaaccccgctactcaggagggtgaggcaggagaattgcttgaacctgggaggtagaggttgcagtgagccgaggtcatgtgactgcactccagcctgggtgacagagcgagactccatctcaaaaaaaaaaaagaaaaagaaaaaaaatccttgcagaaatcttacgatgtaaattttaaaaattattttctcttgatggaaaagaaaactctgtgttagtgagattccataacaatccctaggtcaacagctggcaattagcaaagctaggatttgaacacaggtataataaaaatctactagaatatctgtttatctcaccttctcagatcaccacgtcttccctttactcattgttagaggagtggtttctagcagacacctttttattatgtgagcttcattctagtcacaatagattggtccagggatgcatgtcagagccagattcaagctgagccaatcagagtcttgccctgggattttgtataagacactaaactttctgcttctttctttccctttttgaagagaggaagtatgcaaatttgtgatgtcattttcccaggcactagaaggtgccctttccttgtcttgcttgttaaatgtttttaaaatgaaaaacacacttacagattcagataactgtgagtgtttttaacaggcaagacaaagatggtaaggagtttgaaagtgtgtgttaatcgaggatattaattacctgaatgttgagtagtaacaaggtgctgacttacagcatctcctgctgtggaagaggagtcagagaaggcatctgtcaatgagttcagtgctggaaatagcaaccactctagacattttcacttggaattgagggaacagagagaattaggtgcttataacacctgctagaatggctggggcagtggaagccagaagggatatcatgaaactgagatccagagctgagattcagaggtcaggaagctgctaccaccaacatattacaacaacttcctttcatacctacaaaactggtgactacaaatataatgaggaatttggctaatgcaaacataagtagctgtgattaaaaacaaaatcatttcttttctggagttgattgatggccatctagatttcttctgtgaattcatacttcttatgtgaataaataatgaaaggttaatcagagcttctctttctaggactggccatctcctaatgcatcatgttgtttgtgttgctggatgtttaatgaaacatacatgatgtttttaagacagaatggccaatgatataaatattagattaatgatataaagcctggaggttaattgactaggaaagacttgcattaaatagagctcaaagaggaatagagattttatgatttcttcatgtcttatgatttctttatttggcaaaattttgaaataattgtgattcttctgtggtcattttatacaacctttttgcttccctatttatttctttttggtgattcagaaaattgcaaatagtgagattgtcctaagtgtggtcatataaataaatctgattgaaaaatataggttgtatattgaacattgacaatttttcacttttctttatcttactgtggttccttttcatagactacaagctaagtaggtcaggaatggggattttggggcacattgctgataggggcataagacaggtacttgggatatccttctaagatcttggagtacccttctaagatcttggaatacaattttaatggttagtggcactccaaatgttctactctgaagactcactgaaaaagagaaataacctaatatatcagtgttctctcaatgtcctcttgggatatttccctctatagtgtgttcattctattctaccaagccaaatgttcaggaaagtgcttgtttctagaccatagcttgagaattgctgttctaggaagaacttgcctcttttcctagtaaattttagtgagacagaaagcctgataatttttagtatccaagtastgtaaattctgtaaattcagcatgtttaatcaaattactcactgatcttgctttcaatgccagcttcatacatcaccaactcacaaatcatataaagtacaataggaatggatattcacatgacagaacattattaccttagtaatttactgtatagtattgggagatttagattgtcttttatcagagaccttctaacctggacacaatatattttcatttctcttttttctcctttttttggttagtatcttcttttatgattaatattacctccataatgaaatttgtattggaaaaataaatggcctttttaaagtcttttttttcctactccctgtaatcaaaaataatgccagaagagtctcaggacacttggcagcaaaataaatgaataaatgtaaagaaaatcttaaaacagattactatcatagaaaagtaataaaatgaaaaagtaagctatttatgctgtttcgttttgaaataataatctataagtcttgaaaacttctcaaataatttttactaattgcagtatgtctctttttttgagattggtagatagaaaagctggattgtcaactacaaaaaatcacttgggcaaatttatttaatttttaaaaaattctcttaaaccaaacgagccagactttggcaaatttaaacaatgtgctgccattacacactttacatattaccagtattagtcagttacacaactggtttccacacccagggactatgtcctggaaataacatcaattcatttgggttcaggtccaaccagtggccctatatctggaagtcaaagctctaattcaacagttagaatgaaaacaaagccataggaaagtgctttcttcattctttgcctatctcctggacagtgttaagtatataaacctatgttgaatatgtacagtatttaaagaatattggtatgaaggaataccatgtcattagcctgcctagagcactcacatgctttaatcttattattgggtaaaatcagggaattataaaaatgtatttgaaggataaagaatgtagaagctacgataacaatgtgagaaaagcaagtcataaaaatgaaagttaatatacaatgtttcaagagagaaaaggaatatatcagattgactttggagcatgcttggttttagtgtagattcttggagcatgcttggctgtaatgtagattcttcaggttcagagatggaagtataagaagtagtgttatattgttgtagggcaaagctaaggcatttaatctttgctaagaggtaaaagataattttaaggcatatgtcaaaagagtaatttacttacatggtgattttaaaaagtgatgaagacattttgcttttgctccatgacatgagacaagtacagtttatgatctgagatagtgaaactagttttcaggacatgtcacagacagtcatgaattctaaatcttattcatgtccaacagaagtgttactatgaaggagagaaaatagagaagacttataaaacattcatcaaagaaaaaatacatggcttgaaaagatgaaaatatcctatttgaagcagaagaagcttaagttggttttcacttatccactttcctgcaaaacatactaatggtggctgaccacgtgggcagaaatcagacactgatattatcctaccccatccccactactaatgcaaagcctgatattcggacatgatgtgaatacatcagccttggatttgcatgctctaccaatttctgattacatgagaagttgcactgtagatcattgtcatttsttctacactcatactaattgggggaaaggattctattatttgggtgaaaatattgagtgtattagagcaaggacagtgagtttctactgatggcactgttgtaggtatatattgaacatggaatatatggttaaaacagacatagtgctcaatattcatatattaatagtggtgctcttttctcacaaatttgttctattctaggcttcaccttcttaaaactattgtttgatgctattgccatggtgtgtactttccttcttttagcaccattgctagggagttggagaaaaagtgttgtttgagaaagtcacatgagaaataatccacgttcttggggattgatatggtttcactttttgtccccacccaaatctcatcttgaattgtaatccccacatgttaagcgaggaacctggtgggaagtgattcgattatgggggcagtttcctccatgctgttctcatgataagtgagtgaattcttaagagatctgatggtttcataaacctctttttgtatttttagtagagatggggttttgtcatgttggccaggtaggtattgaactcctggccttaagtgatctgaccacttcggccttccaaagcgctgggattacaggcatgaaccatcgtgcctggcctgtcctcttctagaagaggactccttttctctgttcccttgagattcatcactgttagaatcttcttttctacttccagaagttttacactggaatatcaacttttgtagtcataaaagagcttgttcctgccccagaatcccacaggcagcatagaataatcctaatggtgctacaagtattcttgtacaagctatgctgcctactgattttagaccttgggcaagttactctttgttctggtcttgtttccctcatttataaaatgaagtgattggaatagagcatttattatgtgtcttttgattctaatactatgattcttgacagtatggaagctctgctggagttgatgtaactggttaattgggtcatccaagaagaagatgttcacacagtatcagatatgcaagagatttattagaggaagatttctgatggtaaatgagggagggaagctggggaggctgagaaaactattattttgtggactcatgctacatgccaactgctttatatacattatggcatataattctcacactctatatgatgatgtggtagcataataatagaccccccaacccccaagatttctatgctctaattctgtactataaatatgaaatgtgttacatggcaaagggaattaggatggcggagggaattaaagttgctaatcaatggacctgcaaaatatggagatgatcctggattacctgggtgggtccggtgtaatcacaaggatctttaaacatggaagagagaggcaggagagagatggcagcatgagaaggacttggccccatgttgctggctttgagaacagagaaatggggtaaagagccaaggatgtgtgtggcctgctgaagctggaaaaggcagagaaatagattcttccctaaagcctccagaaggaacgcagtcctactgacaccttgattttagcccatgcggcctaattcagacttcttacctccagaactgtaaaatgataatttgtgttgttttcagcagccaaatttgtgataatttgttagaacatcaatataaaactgttagaaattcagaaatggatattttttattctgatttgatgaatgaaagaactgcgtcttagagcagttaagaaagattcttatggtcacaggtctaattaaaggcagaggattcaaattcagatttatttccaaagcctgcactctatttagtgtgtggccttccactgttacttggaatccttcaggtgtccttggcaggccctgggctcaagactttcttgcctgtcttagtgggccattctagtgtttttcctagctgagtgccttgcttggttatgcaaagcatcttcagctcttcttggccataactttggctttggggattgctgtccataccttttcatccaggaccttggaaatgtccacagtttttcttgaaacttcagtgctgctgacagttagtggaaaaatcctgttcacagagtatttcttatattagctatccttcctttctatctaatattataaatcctgctttccacctctatccactctctgaaacactgcaactggcttaccctggatgcttactttccattttctttagaaaacatgaggtggagtctgaatagggaataatccaggatatgtttttttgtttgtttgtttgtttggagggggctcgctttctgctagagttggctcatagtctattttcagggcagtagtcaccttggttacattgctgtgaacatcttttattttacgggttaaaaagttttctgaactagactgcatttagccatcctttataagaattttgtcattgagaacatgtgttataaattatacataacagatatgacagcagtttaaaacacaatttgattataasttggggcctgacagtatttttagtcaattaaggaattagactacatagcaattgttgactacactgctcatgttcatacagagaaagaatattaccatttgaaccctaaagggtggttttgaccctgtctcttgagcaaaaaatcagatggctcaaataaatcagtttagttctatttgttttatgagctgtatagcagttgaagcccaagtttaatgacttgtttcacatattttcccacaagtctttcttggaaacccaagacatccagagttatgatgggttatcagaaaaagggaggacaaggttcattattctagaaatattgctatccataggagtgtacaacagttgaggatttaactattttgatggttactttgtactaaatggactaacatataattcaggtcttgtcacaaatgaaaaattgttcccatggtaagaattgagataagagcctcttaattctctttggtacattttatcttcctgtattattacacttattagcttggttatttttctaaaaatctggattagtttaggatctaattctcttccattttgatttgttgggtcattttattgtagaatatgtrtataaaattatgcatggcttggttttcttaaataaacttttaattttagaatagttttagatttacagaaaaattacagatagtacagaggagttcttgtatacctttcttgcagtttcttctattgtaaccttatattgctatgatacatttgtcacaaccaataaaccaacactgatatgttattgctaactaaactctacattttattcagatttccctaatttttcctttaatgtcttttctgtgccaggattcagtgttacatgtaatcatcatgtctccacattctgctctgtgacagtctttcagacatgaaaaacaaggaagtttttcatgactttgacagtttcaggaatactggtctggtcaggcattttgtagaatggcccttaaatgggatttgtctgaacattttccttagggttagactggggtttgggttttggggaggatgaccacaaaggtaaagtgacattctctgacattatataaaggggacattctattgacatgacttatcaatgatgatattaactttgatcactgaccaatgtagtgtttgccaggtttttccactgcaaggttacttcctcaccctgtcccttccccttcctactctcctgtttggaagtaagtcactaatgcagtccacactcaaggtggggagatttaagctcctcttcctggagggggagtatctgtaaactagttggaattcttcggtatcccaacaattgggattttatttttcttttatttgtttattatgacttgatattgatttcttgcacagttctattttttccttctcaaatacaatatgatagagaagataaggcatgcctattttaaaaactaccctattttattgtatctaagatgccatcacttggaagacatatcctaatttgagaaatgtgaacatatgggaaaatgtgcatgttaaaattgatgccatgcagtataatagaaagtacaatcgaatcatctggaggacagtttcacaaattcctttagaaagaatttttattaactgtattatgaagaaattctttcttaaatcttggatgcagtgatttaaggtaattttttcctgtttcataaaattggaaacatcacctaaatttaaatcagtttgaaattctttatatgcacaataaactaaagtagattttagggtcatatctttattttgtaattctctaaactgtgttttgcacaaaatagattgaattatattttatttatgagattagaatggtacaaaatgttttgtcttttcaatgtaaattgagtatagttctctgttagttattccactttctttaataccttttattttcttttgtttggctcattttcttatacattgattccattggtagaggttcataaaatgttagagttgaacatcgttagaaatgatctaattcactcctcatttaataaggcccataagagacttggcataggttatcagctagcaagaacaaagtgagattggaatgtagaacttttgatgcgaggccagcattttcccccactatacaacaatgcttcatttttatttgactcggaaatttcactgtaaatcagcatcctatgtttcgaaatagacgtttgcatatgggaaaagctagattgctttagttcttcttttctctttgactttggcctaagctttccaatacagccagaaaaattttccctgwataacttgttttcagcatgtttatcatatagaggaaacataagctcagttgtgaattgaacttacttacatatgtatttcttaaataaccacgagaattctgatccatctcctgtctattgaaggtaccaatagcttcaatagatgttaaaaagtcacttggttcaaatttaaaagatgttgtattagtaatgtaccttaaaactaaaggataggcaacctaaaagtgtttgagagtcttaagagaatgtattcatctctaatatagtgattctgcctgataaagaaatgaatgttttcctctgtagatttcatatgatattatctcatatccaatgcatattttatttatattgtttacatacagaggaaattcttattctgtgtgtatgggtttcagagaaataaaataaaataaagtgaataaaaataacagtgtctgttgtttttaagtatacatatggctttgatggtttctatccacattgtcaagaaacagtaatcatattgctctgggattgatcacttttgcatttaggggattggacttaaacatttaaattccaaattaacaaaaggaaactctacataatacggtttacaattttgttttgacagccatgctatatttattcacaacaaagcctgggaatcttgcagatttttctcttcctctcttatctgcacatttttacagataacagactgttctgcatttattaatgaagcttgctctgaagtagttgccttgttttcttttcttttccaaatggatgcatcatctggtttgacagaattggaatttgggaaagtgaagtttgttttccatgctggaaataccttgcagtgtccttgttgatctagatctgactaatgttttactataagtttgcaacaacaattgtagcaaggacaaaagcaaaagttaaaccttggaaagtttcccacagagttagtaccttatattttcagaaataacatggccaagttgaccatttgacaacattttttccctaatgcatattcaaggatttctatgtgtctacttaatagaattctttatataacccatgtttctctaggccttacctgctaggagtacatcataactgtcatgacaaaaatgtctttgtatatctattgtgggattttcatgtctttcatatgtgttcataaggttagcactggccatacaatcactattttctctccacttggtaactggctgcatggccctagctctcaagctgatgatcagtggaggcagctggcccagtgcccaggctgtagtgctcctacataactggctgcctccgtctctatctggtaacatggccccactctttctccactaggtaagtgtcaaaaagtaacacactgccagccacatgttgaagtgtggctaataccctccactactatttgtgccaagttgtgttcaccagttccttttagagattttgctgatatgattatataatttttaatttgctattatattttagtcttctcctcccaactaccccctgacccctgactcctaggcttcagctgactctaaggacaattttaacaacacattactgtgctatttcaaactcagtcctcacttggaaactattatctgtgttcctgcctatccttttcttcaagacaagtttcattaagcaaagagaaccctccgctcctcctggacatatctgaattttcaaagcatgtgccacaaccattgaaaaactttttctgccttaagcactcttgtttttggaggcttcagtcacttcatagcaaatgtattaaaatatacttacaatgcaacccaacattaaacgtagtttttgatatagaaaaatttggaaatatttttataaatgtactttgaaatttaatatcttatgagtaatgtttaattcatgtgttgtgattcttgctcacacataaatactatttaatttaaattagatgttaggtaccattgggaattcttttgtagtaagataaactaatatacaaactttttaaatataatgaattgtttatgatagcataatttaaagttaattgagtctcataatacattttgcaggcaattacgttattcatttttactttctttttatattttgatatcaatattagtttttcacagggtattgcaaacattatatttcccccaaatgcatctataatgcctagtaaattaacaacgccctggaatttgtatttgctttggatgctttaaagtgttgcttatatgatcttccctttttttctccctactccttccttccttccttccttccttccttccttccttcccattcctccctccctccctccctccatccctttctccctcttcctattcttccttccttatttccttcggaactctaactatgtgtttgcatgtagttatcacaacacggatcattgtacattgtgtatgggattacttaacctgtttggatagtgtatataaaagaaaaagtgatgaagaataaaatataggcctttatgtagcagcactgaatgaataaaatggtaaaatatgaagtaaggaaaatagagatttcctatggttttcttacccttccataaggcagggcatagaaaagctgggaactgagaatgtgtgaaagttagaacagaagatgcagcaatgaagtatcaaattctagttgaaaagcaagggcacagttgaagagcaaaatggaggctaattattggctgtcaggaagcatcaaaccaagagttcagtggactggataccagaagcagaatctaggataagagccagaacctgcttcatatgtctttttgctagatgtatttcctctttcatgaattgtctgtttttgacctttgctcacttatcttttgggattttagtgtttctgttatctgcttgtttgatctctttattcaacatattaagctagatctatcatgtttacaacaaaaactttttctcataattgcttttttttttaccataggtttctaacatcacatctttctagtctttttacatttatttttatagtttcctagtctgttttctcctgctataacagaataccacagactgcgtaatttataaagaaaacatatttatttggcttgtgattctggtggctgggaagtccaagatcaagcggctgtatctaatgagtgtcatcccatagaagaaggcagaagcatggaagggtggaagtgagtaccctagatgaagagaaagtgggggccaaacttatcctttatcaggagcccactcctgagataactaactcactcctgcaaagttggtattaaaccattcatgaggatggagccttcatggcctaattacctcataaaggccctacctcttaatactgttacaatggcagtttaagtttctaacacatgaactttggggacactttcaaaccatagcaggttctaagtctcgaaaggccatctatagatatatagatattatatctaaaagaaataaatatatatttataaattacatacaatttatatatctagaataaagtctttttttcataaagttgtctatgattcaatctttaacttttttttaaacttttattttaggttcagcgtacatgtgcaggttttttatataggtaaatttgtgtcacagtggtttgttgtacagactatgtcatcacccaggtattaagcctagtacccaatagttattttttctgattctctccctcctcctactctctaccctcaaataggctccagtgtctgtcattcccctctttgtgtccatgagttcttatcctttatctcccacttgtaagtgagaacatgtggtatttgattttcgatttctgcattagtttgctaaggataatggcctccagctcaatctatgtcccttcaaaagacatgatctcattcttttttgtagctgcatagcattgaatggtgtatatgtaccatattttctttatccagcctaccgctgatgggcatttaggttgtttgtgaattgtgctgcagtgaacattcatgtgcatatgtctttatggtagaatgatttatattaatctgggcatatatccagtaatgggattgctgggtcaaatggtagttctgtttttaggtctttgaggaatcgccacactgcgttccacaatggttgaactaacttacactcccatcaacaatatataagtgttccctttttaccacaacttgaccagcatgtgttattttttcacttttaaataataaccatcctgactggtgtgagatggcatctcattgtggttttgatttgcatttctctaatgatcagtgatattgagctttttttcatatgcttgttggccacatgttatgtcttctcttgaaaagtgcctgttcatgtcttttgtccactttttaatggggttatttgttttttcttgtaaatttgtttaagtttcttatagatgctggatatcagacctttgttagtttgcaaaattttttcctactatttaggttgtctgtttattgatagtttcttttgctgtgcagaagctctttagtttaattagatcccatttgtcaatttttgcttttgtcctgattgctttaggcatcttcgtcatgaaatcattgcttgttcttatgttcagaatggtattggctagcttgtcttcaggggttttatagttttggattttacatttaagtctttaattcatcttgagttgatttttgtatatggtgtaaggaaggggtccagtttcaatctttagcatatggctagacagttatcccagcaccatttattgaatagggagtcctttctccattgcttgtttttgtcagatttgtcaaagatcacatagttgtaggtatacagcattatttctgggctaggtgcctctttttgtaacactaccatgctgttttgttactatagccctgtagtatagtttgaaattgggtaatatgatgcctccagttttgttctttttgcttagcattgcctcggctatttgggctctgttttggttccatatgaattttaaaatagttttctctagttctgtaaagaatgttattggtagtttggtaagaatagcatggaatctataaattgctttgggcagattggcccattttaatgacattgattctttctatccatgagcatggaatgtttttccatttgtttctgttttctcacatttctttgagcagtgttttgtaattctcattttagagatctttcccctcccttgttagctgtattcctaggtttttaattcgttttgtgtcaattgtaaatgagattcggctgatttggcttttggcttgactgttgttggtgtatagtaatggaagtgatttttgtatattggttttgtatcctgaaactttgctgaagttgtttatcagctgaaggaccttttgggctgagactatgaggtttgctagatatagaatcatgtcatctgccacctatagatatataaatattattatatttaatatatatttagaaattaaaataatatatatttctaaattgtataacaattatatatctataataaatagtaattttttatcaagtttttgataagaaatcctatgcgagttaaagagttaaagatggaatctttaagaattccatcttaattcaatcttaaagaatctttaagattccatcttaactcttcaactcgcatagaatttcttttagtataaaatgtacaacaggtgctcaaattattttttctttaaatacataatcaattatcccaaaagcgtttattaaatgatatgttttattattcattcattcattcattcttctttgattaggagttttttaartcatgaataagttctttctattttaggctagctatcctgttttattaatctacttttatatccgtagcactttgttttattattatagctttaggatgcttaatctctttctttttagaattatcttacctgcttaattttccagatgaattttagaattattctatcactttctgaacaaattgcattggagttttgattggagttgcataaatctataaatgaattggacagaatttctttaatttctcttcatacacaggaacatttattcatatattctaatatttcacttttcattattaaaaaccagtccctttccctgctctcctccctcattatttgattagtgaggtaagaccatacgaatcatatgaattggtgcatgaagatgacaactctttgctgtccatcacaaatttgcagttattttgaaagcaggggtgacaagaagcactcagctatcataaattcttgctcaggtgtttctgtagccaaaagctcagctcttttatagctctagctatacagagttgcactttctgcaaagttaagtggctcattctaatagcactttatttgaatctcttttgctttgtataattaacaataatttattcattgaactaacattgaaagagctcttcctttgtgccagactcttatctaggccctggaaatataagaggtgaatgaaacaggaaaagtctctgctcttggggagactttatcctggtcagagaagacagacaatgagcaggtaaacaaacacatacacatcaagcagttataagagctatgaggatgaataaagacaggtaaagtagaaatgtgatgaccaaggggtgttgtttgatacaaggtggtcagggatcatctttctttgaaagtgacattgagcagcgacctgaatacatgggaggaaatgggccaaacagatatgggtggtagtggtggggaatgttctagactgaggggatatgtgcagaacaaaggtggaggcttttctttgaaggaacaaggagcaaggagaagagtggtagtatttggggaaatataattaaaaacaaaatcttccaacccagatatgctcttcacaaaggtagttgagaaagaaaacacttttatcattgaataagcattaaactagattgtgttgcatatcataggcaatctactgaaagatttcaaagaaaaaaatctcattcttttacatagccaagaagatacaatctattacaygcatgttttaagataaacaataactagtcctcaagcaagacaacttcccagcaccacttgccacatatagcttacgctagattcacctggtaattggagtgaccatcaatgttagctaattggcattatccagaggaaaaccaacttgtcattttttttattgttttttattttttgagacggagtctctctctgtcacccaggctggagtgcagtggcgcggtctcagctcactgcaagctctgcctcctgggttcacgccattctcctgcctcagcctcccgagtagctgggactacaggcgcccgccaccacgcccggctaatattttgtatttttaggagagacggggtttcaccgtgttagccaggatggtctcgatctcctgacctcatcatccaccctccttggtctcccaaagtgctgggattacagccgtgagccaccatgcctggcmtaggatgtagttttgcaatgtggaacaaagtgcctacctaagttgggctattatccttccacaaaaactgggagatagggctcctatctcccttgatgtctatattcaaagagatggctccaaggtttttgagaaagacattccttggtcatgaaactggtaagatcctatctagttttcaaaaggatttatatacatttcaaagcgagaagaaagtacttacaagttttctgaagtaaatgctataagaaaagatgaggagggtctcttattttcaacagggaaaattaagccttttaaaaattttgtatttgtccttacatagatgataagtgagagaaggaaacagaccttatgaacagtggtcagcactttagattttactctgagtaagatgagggtcctgagaagttttgagcaggggaatgacacattcctttggggttttagaaggaaaccctatctgctgcattgagagttcggtctaggagagctcaggtggaggttgtagtttttgaaagttctgtcaggggtggactagggagtaggggtgggagtgtaggagagcacagtatagattttaagggatacagtggaagggtttagatgttagaaggggtgtaggcttaagttaaatgaggagatgtacaaagctcacaaatgactgattcggttcaaaatacaggcctttttcttcatgtttgccttcccttgcattccatattgtaaggtgcttgagggcagagactgtatctcgcgtttgttgaatgaaagattaacttgccatctatgctttaatactatgtgagggaacaggtcagtgtgtcaactggtatgtcccttttatcttttctctctgatgtttattgagcatctgtcatgtaccagacactaggacaaaatgaagctttctctgccctcaggaagctcactgtctacttgagatagatgagtaaatgggttattgcagtgcaagatgataaattctatgatggctgtatgcagtaatttgctgaaataaaatttatatgtaatcccataattgtatatctcaaacataaatttctattgatgatcctgttattattcaaagaatacctgcttaaactcagcctacctttggctgctgaatagtggtattgctttaagaaccaaagacctctctgctatgcttagaatatgtctcccaaaaagcatgtgttggaaatctaatccccggtacaacagtttggaaggtagggcctaataggaggtgattaggtcatgagggctctgccttcttaaatggattaatgttgttatcatggaagtgggttgcagtaggtttgttatcttgggagtggggcaaagggcaaagaaagggttcacccctctcttttcttttcttgtgtttcttataggcaacagatcaacaggtctttttttttttaatgcatttagctcctctacatcatttgattgcagagtttagttcatttatattcaataatattatttataagaacttatgcctgttattttgttatttgttttctggttgttttgttgttttccttttttccctatgaaggtgcttttctttggtgttatgatttaatttcttgctttttttgtgtgtgtatttgttgtatgtttttttcaatttgaggttaccattaagcttgcaagttttcttttttctgttatgtctttgtctggtctgcttttggtgtcagggtaatactagcctcatggaatgagtttggaagtactccctcctttatttttcagagtagtttgagcagaattggtattagtttttttttcctgattatttgttcttcataarctatattgtagtaattagttcttctttaaatgtttgataggattcagcagtgaagccataggtcctgagcctttgtttgctggatgacactttattatggcttggatctctttgcttattattggtctcttcaggttttggatttccttgtggttcaatcttggtaggttgtatgtgtctaggaatttttccatttcctttagattttccaatttgttggcatatagttgctcatagtagctactaattatcctttgaatttctgtggtatcagttgtaacatctctttttttaatctctgattttatttatttggattttctctccttttttcttagttattctggctaaaagtttgtcaattttgtttaggctttcaaaaaactaacttttcatttcatcgatcttttgtattgttttcttcatttcaatttcacttatgtctgctctgatcattattatttattttcttctactaattttgggtttggtttgctctggcttttttaggtctttaaaattcatcattaggttatttatttgaagtttttcttctttttcgatgtaggcatttataggtatgaacttgcctcctggagctactttcactgtgttttacaggttttggtatgttgtgtttccattgtcatttgtttcaagaaatttgtaaattttcttcttaattttttcattgacccactagtcattcaggagtatattgtttaattttcatatgtttgtatagtttccaaaattcctcctgttattggtttctagttttattccactgtggccagaagagatccttgatattattttaatttcttgaatatcttaagacttgttttgggacctaacatatgatctgtccttgagagtgatccttgtgctgaagaaaagaatgtgtattctgcagccrttgaaatgttctgtaaatttctattaagtccatttgttctatagcacagattaaatattacatttctttgttgattttctgtctggaagatctgtccaattctgaaatgaaagtaattcaagatggattaaagacttaaacattagacctaaaaccataaaaaccctagaagaaaacytaggcattaccattcaggacataggcatgggcaaagacttcatgtctaaaacaccaaaagcaatggcaacaaaagccaaaattgacaaatgggatctaattaaactaaagagctcctgcacagcaaaagaaactaccatcagagtgaacaggcaacctacaaaatgggagaaaattttcacaacctactcatctgacaaagggctaatatccagaatctataatgaactcaaacaaatttacaagaaaaaaacaaacaactccatcaaaaagtgggcaaaggatatgaacagacactattcaaaagaagacatttatgcaatcaaaagacgcatgaaaaaatgctcatcatcactggccatcagagaaatgcaaatcaaaaccacaatgagatatcatctcacaccagttagaacggcaatcattaaaaagtcaggaaacaacaggtgctggagaggatgtggagaaataggaacacttttacactgttggtgggactgtaaactagttcaaccattgtggaagtcagtgtggtgattcctcagggatctagaactagaaataccatttgacccagccatcccattactgggtatatacccaaaggactataaatcatgctgctataaagacacatgcacacgtatgtttattgcggcactcttcacaatagcaaagacttggaaccaacccaaatgtccaacaacgatagactggattaagaaaatgtggcacatatacaccatggaatactatgcagccataaaaaatgatgagttcatgtcctttgtagggacatggatgaaattggaaatcatcattctcagtaaactattgcaaggatgaaaaaccaaacaccgcatgttctcactcatagatgggaattgaacaatgagaacacatggacacaggaaggggaacatcacactctggggactgttgtggggtggggggaggggggagggatagcattaggagatatacctaatgctaaatgacaagttaatgggtgcagcacaccagcatgacacatgtatacatatgtaactaacctgcacattgtgcacatgtaccctaaaacttaaagtataataataattaaaaaaaaagaaagtagggtgttaaagtctctagttgttattatattgaggtctacctgtctctttagctctaatgatatatatctgggtgctctatcattgggtgcatatatatttacratttttatatcctcttgctgaattgaccctttatcatgctgaattgatcctttataatgatttttttgtctctttgtacagtttttgtcttgaaatctattatgtctgatgtaagtatagcyactccttttttggggggctgttcattcagatagagtatcttttatcattcctttgttttcagtctatgtgtatttttgtaagtgaagtgtgtttcttgtaggcaacagatcattgggtctctctcttttttttaatctgtttagccactctgtgacatttgattgcagagtttagtccatttacattcaatattattattgataagtaaggacttattgttattttgttatttgttttctggttgttctgtggtcttctctttcttttttccccatgaaggtgattttctttggtggtatgatttaatttactgctttttatttttttgtgtatttgttgtctgttttttcaatttgaggttaccatgaagtttgcaaatactatcttataacccgttattttacactgataacaacttaacactgattgcataaacaaaaaaacaaaaagaaaactaataaaaactctacactttaacttcatctccctgctttttatcatttggttgtttctcttaggtcttattgcactgcttatgccttattgcactgcttatgctttgaatagttattgtagtaattatttttgattggttcatcattagtttttgtacttaagagtagtttacacaccacaattacaacattgtaatagtctgtgtttttctgtatgcttacaattaacagtgagttttgtaccttcagatgacttcttatgataatgaatatccttttctttctgcttgaagagatccctttagtatttcttgtaggtctggtctcgatgaaattcctcagcttttctttgtccaggaaagtatttctccttcatgcttgaaggatattttcacagtatatactattctagaataaaagttttttccttcagcactttagatatgtaataccactctctcctggcctataaagttaccactgaaaagtctgctgccagatgtattggagctccattgtatgtgatttgtttcttttcttttggtgcttttaggatcctttctttatccttgaactttgggagttttgttattaaatgctttaaggtagtctttgggttaaatatgcttggtgttctatagtcttcttgtatttgaatgttgatatctttctctgggtttgggcagttctctgatattgtatttttgaataaactttctatcactatctctttttctacctcctctttaagaccaataattcttagatttgccctttcgaggctattttctagatcttgaaggcatgctacattgctttttattctttttttttttgtsttctctcactgtatattttcttatagtctgttttcaagctcactgattctttcttctgattgaccagttctgctattaaggtattctgatgcattattcagtttgtcaattgcattttttaactccagaatttctgcttgcttctttttattatttaaatctctttgttaaatttatctgatggaattctgaattccttctccatgttatcttgaatttctttgagtttccttaaagcagctttttgaattctctctcttaaaggtcacctatctctgtgtcgccagtattggtccctggtgccttatttagtttgtttggtgaggtcatgttttcttggatggtattgttgcttgtgggtatttgtcagtgtctgggcattgaagagttaggtatttattgtagtgttctcagtctgggcttgtttgtgcccatctttcttggraaggcttcccaggtatttgaagggatttgggccccaggcccaataatgctgtggttcctgcaaacttatagaggtgcagtcttggtggtcttgtatagaatctagaataattttctggattactaggcagagactcttgttctcttctcttactttctctcaaacaaatggaccttctctctctgtgctgagctgcctgcatctggggatggggtaacacaatcccccctgtggccaccaatactgggactacagaggtcagacctgaagccaggacagcactgggtctcaccaaaggcttactgtaaccactaactggctactgactagctcattctagggttctacaatcagtaggttcggaagccagctaggtttatgtccttcccttcagagtggaaagttctcctgggtcttgagtaggttcagagatgctgtctaggagccagggattctagtaaaaaaaccttagaaatctgccttgtgttctgttttactgcatctgagcttgccctcaaaccacaagacaaagtccttcccactcttccctccactttccacaggcggagctgtctctttccatcgccaccaccaccaccacaggtgacaagagttacttccaggccactgctgatgttcacttaaagccaaagggctcttcagtcagcttgtggtgaacgctgccaggcctggaagtcacccttaagggatgtgggctcccttctggcccagggtaagtccagaaattctgtttaagaacctaggtctggactcaaggaccccaagagtcagcttgatactctacctcactgtggctgagttggtacctaatgtgcaagaaaaagccccctttacgtttccccatgcttttctcaggcagaaagaatttttcaccatagttcccacagctgggaatattctgcatctcccctaaagccagcatgtctcagagtttcacccaaggcccatggcatattacctggatattgcctttggttgttcggggccgaagggctccttagtcagatgatgaatcctgccaggacttggtctttcccttcaaggtagcaggctcccttctgggcaggttcccagggtgtgttgagaaatgttgcccaggagctacggactggaatgggggtctgatatggtttggttctctgtccctatttaaatgtcatgtttaattgtaatccttattgttggaggtggggggcctagtgggaggtgattggattatgaggacagtttcttatggtttaacaccatcccccttggtgctgttgtcacgatagtgagtgagttctcatgaggtctggttgtttaaaagtgtgtagcaccttccccctctctctcttgctcttgctccggccatgtaagatgtgcttgcttcccctttgccttttgccattgattgtaagtttcctgagacctccttatgagctgaacagatgccagcatcatgtttcctgatgctgattggcagaaccatgagccaattaaacctcttttctttataaaattttcagcctcaggtatttctttatcacaatgcaagaacaggctaatacagggcctcaggactctgcctgatgccctatcctgttgtgggtgagctggtattctagatgcaaggcaaagtcctctttgctatttgctttcctctcctcaagcagaaggaaagagtcactttcatttctgcgagcagggctgcctgggcttgtgggaggagtagaaaaaacaccccgtttttcactctgtccctaggtcatgtgccaccctagtccactggctctaagctcagcagtaggaggaatttcagtccttgtgtcatagactgcctttaaagcttaccaaggaccccagagctctctggcccgcagtggtgatgtttgtcaagaaactcaagttctgaccactgggatgggcgatttccctctggctagggcttgtccaaatgttccctttttgggcaggagctggctaagcccagcatggctttgctctctgctgtgacagggcataagttcaatcttccttcaaggcagcaagtgccccagccactgtgctcttccacccccttgtgcacagattctctctctgtgccagatggtcactgcctggagattggggaggggtggcaccagcaattcaaagctgtctttcataccctcttcagtgcttctttcagcaatatgaagttaaaaccaggtgctgggattgcttacctgattttttgttcttatgtcagtgcttttttgtgtgtagttagttgttaaaatttggtattccggctttagggacaattgatggtggcttctatttggccatcttgctcctcccttgaatatttaattttagatgctagtggtgttgtaaggagtttcactgtcaggatctgatgctgaggccaataaggtctatgtactgccttcacggagcagatgtttagagagagcctgctgtgtgtcagatacygtcctgagagatttcagcagtgaatgaaactctcaaaaatttctaccctcatgaaatttatactttattgatagttttggcagccttgcctcttgtatgttgacatacaatttttcttcttttaggaggggtggtgggaacattcccatcatgcccaaactgccaagtactgcttatgccagtaagtgggaaaaacaacttggctgtgagtcggtagtgctccctgaccctttcctcttaatttatttattttcctccaagccattatttgttgctctttcaaatgcagtctttttctttttttttagcaagtttaaatcttttatttcatatttctccagaaaaagtaattataagcttattctaccatttttataccaaaattctaccatttttataattattttatcttaatttattttcctccaagccattatttgttgccctttcaaattcagtatttttctttagcaaatttaaatcttttatttcatatttctccagaaaaagtaattataggcttattttaccatttttatacccagtcagaaagttagctaaaacagctcttttttcctattttcatttcattccagaaaaaagttataaaactaattaccacatcaaccttaaaaatatctaagaatatttaagttctatttctttttttcttactaagaaattgataaaagaaagacaaagtgaaaaatttttactaatttatattacaactcaaatggccagttacataggttgtagttcctacatgattagatcatttctaaaattagttgtttttttgtgtaatttttatatttttaaattttattaaatttattggggtatttattaaatttattggggtatttattaaatttattggggtacagatggtatttggttacatgagtaagttctttagtggtgatttgtgagattttggtgcacccatcacccaagcagtatacactgcaccatatttgtagtattttatccctcaccccactcccagtcttcctctcaggtccccaaagtccattgtatcattcttatgcctttgggtccttattgcttacctcccacatatcagtgagaacatatgatgtttggttttccatccctgagttacttcacttagaataatagtctccaatctcatccaggtcgctgcaaatgctgttaatttattcctttttatagctgcatagtattccatctatgtatttactgcagtttctttatccactcattgattgatgggcatttgcattggttccacgattttgcagttgtgaattgtgctgctgtaaacatgcatgtgcaagtatcttttcgaataatgacttcttttcctctgggtagatacacattagtgggattgctggatcaaatggtagctctactttcagttctttaagaaatctccatactgtcttccatagtggctgtactagtttacatttccaccagcagtgtagaagtgttccctgatcaccgcatccatgccaacatctactgttttttgattttttgcttatggccattcttgcaggagtaagatggtattgccttgtggttttgatttgcatttccctgataattagttatgttgagcattttttcatatgtttgttggccatctgtgtatcttcttttgagaattgtcttttcatgtctttagcccattttttgatgggattgtttatttttttcttattgatttgtttgaattcattgtaggttctggatattagtcctttgtcagatgtatagattgtgaagattttctcccactctgtggtttgtttgtttactctgctgactgttccttttgctgtgcagaagctctttagtctgattaggtcccagctatttatctttgtttttattgcatttgcttttgggttcttggtaatgaaatccttgcctaagccaatgtctagaagggttttctaatgttatcttctagaattttaatagtttcaggtcttaggtgtaagtccttaatccatcttgagttgattttttataaggtgagagattaggatccagtttcattatcctacatgtgtctagccaattatcccagcaccatttgttgaaaagggtgtcctctcctcacttcatgtttttgtttgctttgttgaagatcagttggctgtaagtatttgggtttatttctgggttctctattctgttccattagtctatgtgtctatttttataccagtaccatgctgttttggtgactatggccttatagtatagtttgaaatcaggtagtgtgatgtgtccagatttgttctttttgctttctcttgctttggctatgcaggctcttttttggttccatatgaattttagaattgttttttctaactctgtgaagaatgatggtggtattttgatagggattgcattgaatttgtagattgtctttggcagtatggtcattttcacagtattgattctacccctccatgatcatgggatgtttttccatttgtttgtgttgtgtgtgatttctttcagcagtgttttgtagttttccttgtataggtctttcgactgctttgttaggtatattcctaagtattttatttttttggcagctattgtaaaagagattgagttcttgatttgattatctgcttagttgctgttagtatatagaagagctactgattggtgtacattaatcttgtatccagaaactgctgaattcttgtatcagttctaggagctttctggaggaatctttagggttttcaaggtaaacgatcatattgtcagcaaacagtgacagtttgacttcctctttattgatgtggattcccttcattttttttctcttgtctgattgctctcgctaggacttccagtactatgttgaagaggagcagtgagagtgggcctattccctttctcagagagaatgctttcaacttttccttattcaatgttatattggctgtgggtttgtcacagatggcttttattacattaaggtatgttcaaattcagtctttaagagtaaaatgtgaaagcggatgtatggatgtttgagtttgtctatgttgctgaacagtatgaatgtgggtttmcttcagagctgttgccagaaaggagcagtaattacacttgaaattactgttgaaattgggcttaaaacttaatagaaaaagaaacctttatgtctgagcactagttacaaataaaaggcaatgagagaaagaaaaagctaggaacatttgaatacataacaaaaagaaatgctttatttgtaaattgtagaacatggagcagattcctatagcaatatatcggaacaataggcataacatcacactgcttcggaggctacctgtatatacatctactcctttattattgctaaggttactttctgatttcacaggtactcaggtgattgaagatagagggaatgtgggtttagatatgaaacagtaatactttcaaatctgggaggcagcaacaaggctctcctatgtactcactatgctgacttggtaagtcatgactttcatcaaactcaggttccttatcagaaaaatgaagaagcgaatcaggtgctttttaggattccttataggtttcagctttaaatttccatgatgtcgcttgggttttggtgtgaatatagttgagctgctggcagtacatattttaggcaattctttgagtctaattgagcaatttctttattagaatgggcttaaacatatacacacagacacacacatatatggatatatagcaccgcctgagtttttatagtcagtaaatgccattcagcaaataataggggatgctttctggatttaaatagatttaatctggacactgttaaaatgtgtaccttgtgaagctttctgttttcctaaaggaaaaataattgtagtgttcattaagcacccatactttaagtactattgatggcattattagtattctagaaactgtgataggggcttatggaccttatcctatttagtactaatgacaaccttacaagatagatactattattgccaacttcaaatgaggacattgagatggagagttgaggtaacttacccaaggctactcagcttgcaagttaacagaaacacttaggattcaaattaaggtctgactcattccaaagctgtggctcttttgttcttttaggttttaggaatatattaaaaaatagtcaaaagcctgtcttgaaggagtttcagattaatagaggagacaagaaagactaatatgtggttcaaatgaaaatgtcactgaaatgtcaaaattataaaagtgtattgaggagattgtacccaggctagatagaaatctcagaggtgagaaagggtgtgttggagagggaagttcaagaaatccaggcagttctgactgcctagtacttagtagatgtaggattataaacttcaggaaaataattttttgaacacttcatttttagagaggtggtatggctagggttgattcatatttgtccacttaaagctattgtgcgaagtggtgtctaaggaatatatgatgatggcacggacaggaactttcacttgtttattcacttgttcatttattcattcattttatttattcaatacattttcatgatatattcatccaatacatattttcatacatattaatttgatacattcaatacattgaattcttactgtaaatgttcaatgtgtttgataaaggcaatacaaagaaacacaggcatacctcgttttattgtgctttactttattgcactttgcagttactgcattttttacagatagaaggtttgtggcaactctgtattgagcaagtgtatcagctccattttcccaacagcgtgtggtcacttcctgtctgtgtcacattttggtaattcttgcaatatttcaaaatttttcattattattacatttttatggtgatttgtgatcagtgctcattgatgttactactgtaattgttttggggaccaaaaaccaagcccatttgagatggtgaacttaacaaatgctgtatgtgttctgactgctctactaaccagcctttccccatctgtgtctctctccttgggcctccctattacctgaagtacaaaatcattgaaattaggtcaattaataaccctacagttgcctcaaagtgttcaaatgaaaggaagagttgcatgtctctcactttaagtaaaaagctaaaaatagttaagttcagtgaggaaggtatgtcaaaatctaagacaggctgaaagctgggcctcttgtgccaaacagccaagttgtgaaggcaaaggaaaagttcatgaaggaaattaaaaatgcattctatcaaatatttaaaaaataatacaagtgctacacatactcttctagaaaaattgtagaaaaaactccccaaatcagtctataaagtcagcatcaccctgatgccaaaatcagacagaaacattgcaagaaagaaaaactatatctctcatgatcgttgtcatgggctgaatggtgacccccaaaaagataaattcatgtcctaatcctcagaatctgtgaatagtaccttatatggcaaaagagtgaatgttactttatatggtaaatgatgtgatcacattataaggatctcatgaggatgaggttatcctggatgatctggttgggatctaaatgcaatcatatgtattttatatgaaaaaggcagagagagttttggcacaggcacatagaggagaaagtgatgtgaagacagaagcaaagaccggagtgatagcaccacaggccagggaacacctggaaccaccaggagctggaaaaggcaaagaagagattctctcttacagcatctctctatagggtgtgcagccttgttgacaccttgattttggattcatggcctctaaaactgtgagagaataaatttacgttgttttaagctacaaaggttgtagcaatttgtttaagcagccttaggaaactaatagaaacataggtactaaagttttttagcagaaacatatatgaaatttttaatgtaagtgtacattttctgttttattaatttctaattttatctttattatttctttcttattggtttattttggctttaacttgatttttttctagttttaaaggtgggagcttagttaattggttccagaccattttaattttctaatataggcatttagcgatataaattttcctttatacactgcattagttgcatcctgcaagtttgaaatgctgtttcatttttattcagttcaaaatatttttaatttcattttttgaatctaagttattataggttgaatatgtgggttggaggagaaggtggagttcagatggttcccaggtttctaattaagagagtagtggtgccataactggaatacgaacactggaggagaaacatgttttggggaatgatattccattttgaattatgggattaaagtccctatgagatagtgcttccatttttggaaaggctcctgtttgattaatttcattttaagccatgtgggttcattttcaatcttatttatattccttaaaaaaattaacacttctaaccctgtgtctcttaaacaagaggagatttgttcatcttggtttaatgggtatttaatataataagaatgctgtacatgttaccccagagtccattttgggttatttcatattctcagtgtacccttcaggctgcatcttcttgtcatttgctgcattttgtacccgtatctacatagttaaaagtatctacatggggccagactacctggattgaattctatttctgccatacaagctgtgagaactgcttgctcatctgtaaaattagkataacataggtatctatctcatggggtttgttagaaggactaaataagtccctattcttaaagcatttagaagagtacctgaaacaaccagtaaaggtagttcatgagcagatactctgattctgagatatgttaagtctgcggtcaaagaccctgaaaactgcaaagggaattgttttccaagacaagtttagagttcctagggaataaagctgcactgataaccaccatccttttccatttcaggcatgggatgtacttgttccttcagttgctgacatcagaagaaaaattaatatagtccattagtggttgacttcaactgatatccaaaggtgaaaatacctatgacagtttgagaaagatgataggcaggagcaacaggacaatagccttcccttaatggtcaaattcatgcttaatgccatttacccattttgttaacttaaggagctatctgaagtttcaattataaacaaactcagaggaatttagcaagaatgacaaatttatttatctttgctaaagataatatctttaggctggggacaaaaggtgattttcttgcccacttggagaacagttttctttttaggcgaaatgtgtgagggtgtgtgtgtgtgtgtgtgtgtgtgtgtgtgtgtagttatgtttgagtcatgctcattcattaaaagaggaccattttttccagcccataattgcatatacagtattttaatctttcattagaccctaagctgcattaaaggatgtttcacacctgtttactgttgtctaatgcttgatatgtctagcacataccaagttttaataactatttttgaataaatgaatgacctggacctgagtatacatgaaggaggggatcataaccattttcctattatctccttccatctcccttgtattaggaaagtaaaaaaaaattctgggtactattaaatatatcatttccttctactattaaatataaaattgccctttggagtagaagttcctaatcacaataataagatcccatacttcttttaatgggaagagattttagaggacatctagtccaattcaacctccaccattaacatatgtgaaaatggacactaggggagttgaagtgatactgccttgattacacagctggtaaatttatatccaagactacagtccaggtctttagatttctaatctagcacttttctaggaaccaactgtgctccttgagctgaattgggtaattgtgaattgtttacttccgtggctaaagcaacagataaagaacattgtatttttggtcatatttggaatgtttaagagtaggaggactatagaggtgggagccaagtagcattgcttgaaaatgaaatataaaggatttggacaagagatttggcagagcaaaccaagagamagtaatayactcttctcaccaaaaataaattttatggagaactatcaatggaagtctttttcctttatcagttaattcttggtaattccctcaattgatgattctttggtttgtgtcgagtgagagagacagagatctttttttctcagcacactttttttgtttctcttttaagtgctaaccaaaaaaacatgtgcatccaaattggtatgcttacttactttgagagaacatttataattggttttctcaggagaatagtcttctagataattgccttaccagtttggagtggagagatgctggattgggctctgatagacaatttgctttatcaaaaaggcctcgacatgtagaaaaaaacctacacaattgatcaggcaraaataagggatttggatgtttttatactttttcttgatgttgccttttgtttctctgtttctagcaaatacaaatggaaataaataatgatcagactattttggaatgttgctgagttctactagctaataatgagttctatttagctaactatatacaacacaaataaatgcctgtatttcttgctttggggaatcattaatctcttctaattgtcctcaaaattattaagaaaacagaactctgggtctttatacacttattcattgatagcattgcaccaccactattatagtcaaattgtaatttgttatttctattcaggctctttgccttttataaaaaagatgtaaaatatataagaatatgggagaaatatggatgcaaactaaatcattttattcttaatctattttaatgaaagcatttgagaaaagtttgaagggttgattttgataattttagggcttttatttgtaaggaggggccaaagttctagtaagtaacttaatactagacaaacacaaatcaaaaactaattcgtagagttaatgtgtgattgccatatccaagtaaggataaaaacaaacatcataatcaagttctggaagaagtatattatttgaggtttgcaggagtaaagaaagtgtcactgtattagtgtattagggttctcttagagggacagaactaataggatatatataaatgggcatttattaagtattaacttacatgatcacaaggtcctgtctgcaagctgaggagcaaggagagccagtctgagttctaatactgaagaacttggagtccgatgttcaagggcaggaagcatccagcaagggagaaatatgtaggctggtaggctagccccatctctccccttttcacatttttctgcctgctttatattcattggaagctgattagattgtgcccaccagattaaaggtggatctgccttccccagcccagtgactcaaatgttaatctcttttggcaacacccacacagacaaatccaggattaataatctgtatccctcaatccaatgaagttgacactcagtgttaaccatcacagtcacttatgtttggaatgaaactactttagtaattaactcatctccccaggtatttgtccatttattaagctatgttataatgctaatatttccctttacaactacaattattctagttgtgttcctggaaaaacctattaaagtattttcttaattaatttacatctctctaattctattactaaggcccattttaaaatgatttgttcatttacgtgtcttcaactcattaatgatatataaataatttccttttattgtatattattatagtagaaaaatgttgtaaatactaaaattactccaaaattataaaggtaaactatggaatttgataagagcatttaattcatcatacttacctaggatgccaattgttatttctgaactactacatatgtactgtcaagtcaagggatattcaatatcttatatccatatgaaggctgttcatgaatgtttatgttaattgttttgaattcttacttggatataatataatttaaaattgggtcctattttcctcttaacccttgttctcaaaagagtggactgaatttctatgggagacctgagggggaagaagacttttcatgggaaaattttttctctagaagcagggagatgaaaggtggaccttgagacctcactgttcactaagctgtctccctctattgaactaacagaactagagctaaccaactgggaggtcttctgtaagcatcattattttctgcaagtccacccatcttctgggcccagaatcatccccatgcatactgaactctggtgaggacagccttcaacaggtggtgtcaaagctcagctgggaatggatctgaatcctcagacccccagctcactgtctagttttttgccctggtcattttattgatttataaaaatgagactttgcacttaacagagttaaatattttggatcttagtttactttatataagaattatatatattcatatacacataatacgtatgagaaaagtatctacatccacagtttaagttgagaggaaaaataatctcgagaaggcagtgagctttctcggcagtaatatgagttttttgaatttttacaaagagaaggggccaaaacatgacataattttgtttaaggcaagaatatctaattgctatttaatgatatcaaacaatatgacatatctaatcacaacattacactttttagtactcccttcccctggcatatctccctccaggaagattctccaggaatataggaacttatttggggctttgactcagagtggattttctaggacagttgtatatgaagcagatctcctcactcttgggagtgaggactgttggagaaactagccatactgtgtgcccagtcacccctcctttatttagccttttatagaagcaaaattggtagatcttttaaacatcccccaaaagatgcctggtacccataaagaatcagatagaatcattaatgacatacagtaattttgttaaagccatcaagtgaaaccatctggtttctgttcatttataaattaaaaattaattaccacgcactaagttaaataataagaaatgaaaactcatcttcaaaattaagttaactgtctcttgatgactgaatctggaaaaaatactgtttcttcctgtacattgaaaattttcagcatgtatcataaatgcactaagtagttagctatttaaattgcatctttatttcaagatttccttgcaagttgctactacttaacaactttcttttttttttttaattatactttaagttctagggtacatgtgcacaacatgcaggtttgttacataggtatacatgtgccatgttggtttgctgcacccatcaactcgtcatttacattaggtatttctcctaatgctatccctcccccaggctcccacctcccgacaggccccggtgtgtgatattccctgctctgtgtccaagtgttctcattgttcaattcccatctgtgagtgagaacatgcggtgtttggttttctgtccttgtgatagtttgctcagaatgatgatttccagcttcatccatgtccctgcaaaggacatgaactcatcctttaccaactttctactctttcttctattacaacttactattattacaaacagcatcatttgctttaattttgtgtatttcctatctacagttcatgaggaactgttaataagttgcacttggaaatcagaaatagttttcccctttgcttttaggttctctttcaatccatctttcttgctaccaccatagttatcagccagacatatttgtttgctccatttctttgcttcaaaagtgttgttggttccacattgctaggaggataaagtcataataatttcattatcctagaatataaatctcttcatatgttagttcaaggtcattttctgcttcttctactcatttgttctatgttttttctacccatttgggaattcttgctgatctctgaacatttcatgcgctggaacactcgtgtgtgttttatgctttatgacctttaaggaaagtctcttccttaggacctgtgacaccccatagggctatgcaataaacagagggtgaccctagttctcaaataagccaaggtctctagtcttcaaggcccttcccagaaacaggatgtctctctgcagcatggaggagtatatgaggtaagaatgttgtggttggaaaacaccataggctgataattttcactccacaaaaagcaacaaaaacggtcataacacctctctccatcccccttctctatgagtggtgatgcatggccacagtggcccagctgtgagtagcaaaagacccctctgtgattcatctcattatggagtgagtgatatcagcttcgagattttgcaccatttgggcacttgaagaaccctaccttcagatggcgggctgaggcaaagcagctaatatatggatattgcttgccaccatatttgatagcaaataaaggaaaagtaaattcctagtggctataccctgcttctgcacggtttttttttcctcttcaaaaaacagatgaagagaaaaagcattccagttctgcagaaccaagaatgtactatattctttgtatggaattaataatttcctattttctgcctgatcacccatctctttttgaaactttcttccttcctgtcattgagagtgcctctctgctgcattgtgctccagcagctcttttgtgtatacttctattacagaggtttcatattataccattgttgtttgttcacctgtctccttcactaaactatatctcatccatttgggtatgtctagcacctacatggctgagtataagccttcaataaatattgaatgaatgaaagacaccacaaaatgagcaaaaataagttaattaagacatcttttagttttgctatgttgttaaatttttcttatatttcacaggtagaagcaaagtaacttttattacatgtaatttatttcaatttaacatttagggagtacttttgaagcattatactaagtgctttgagtgacacactgatgtctaagcccccagttaattccgaaaacatttctaatacacgctttttaaaaatagtattagggactgaatgaatttggattaaattaaatgttttttgagtattttcaaaagaagtgggaaagttagcagacctatgtattcatttaacaaacattgattgagcaccaactatggaccaggtttgatgcttgggtaacaaagattgacaacatcatcaaacacaatctctgttcatggaacttacaatttagtcgatgagcataattagacaaataaatatagaaataattgtttagagagttaagtgctaggaagaaaattattgagtataatgatgattctattttttctgttttggaaagaaatagtagttagaaattgtttgcctcaaaatataaaaaagaaagtttttggaaaatttatctagggtaccttgaagccttagcaaatgttatataatcagaatccttcagttatctttaaaggtattaataaatgaaatgctatagaaaccatattgataagaagaatgaattaacttatttattttctattgaaatttttatttatggtttggtaggaaaagcaaaaactcatatgtaaatatcaacattaaaaagaatgatcatacatccttagctcctcagcagtttctgtcatatctggctttcgtttcatttttagtgctgttttgttacaatgacaagaggattgaattgaaagcctgttgaagaattttattatcttttaaaatctattgtcaaagacagttggggttgaaagcttggtgataaatgtcaacagtaatatgaaatgtatagaagcagggacccctttatctgttcatttaaacatcctcatcagtcgcacacctacagataatgggtgaaggtgagagatggtaacagaacagctcattagggctgactgtgttaattgacatttgacccacattttgtaggtcctggtaattttttgagtatttattgattctttttcctgactagaacagcatttatgctttcataataagaagatccagaaagagctatgtttgaaatttagaatatatttctaagggaagatgatatgctcattctctatcagttattattttgaggcactttcgtttttgataacaatagtaacttgtaaagattgaagagtccccgaccttcatttattcagcaaacattgattgagcacactatgtgccaagtccttttcttggcactgcctgtataggtggggccctgttctatgaatctgagagaataatacactccattatcaatcatcaataatgttaactttgtctcatgtattactattgtgttgttgattcatttctttttgtggtatgtttggtggggagaaggttgcaataagaaaataaaatgaatattctagttctcattttgaatttgatttaaaactgaaaagtgtttagtgtctatctttttgaattagataaatctttgtcttcggaaaacaacccaaagtagctgttgttttcctctgagttggctctgttctcaggctgacttctctatgaggtagcaaagcgagttccttgaaaccttaggcttccatggttctttttattagctgataattaccctctttcttctatgtcaatatctctaaacattcttattggctctgcctgggtcatgtaaaatcttgggacaagatgttctggttggtcaattgaggttgtgtgctactcctaggagagaaagataaagtgaaaatattgacagcatttatagtcatatgaagtgatgaaagggcagagtgctaactgggggttggggagggaggagagaggtgctgtttcctgaagaaggactaagagatgctagcaggtaaaacaacggatgtctaccacaaatatatgcaaagcctaattgtttgggtggcttatttaaagaaaattccttaatatattcaaataaatctaggctttcatatcactttgcataataaatttaccaaagagcataaaatctaagagtatattggaaatcacctctatttaaaagatcaaccttttcttgtttgtttaattactaggccttttagaaagaacattcctctattccttttgacagattaatattttgggggagtgtattagtttgttctcacactcctagaaagaactacctgagactgggtaacttatgaagaaaagaggttgaatggactcacagttccacaggctgtacaggaagcatggctgggaggcctcaggaaacgtacagtaatggcaaaaggtgaagaggaagcaagcacatcttaccatggtggagcaggagaaagagagagtgaatgagaatgtgcccacatgtttagccatcagttctagtgagaactcactcactatcatgagaacagcaagggggaaatccacccccatgatccaatcacctcccaccaggcccctcctctaatttgacatgagatttgagtggggagacaaatctaagctatatctggggtaacttcatttcagtttaacttaaaattacaaaaaagttggagaaatagtacaagaagctcttgtttacccatacacattttactcagattcattaattgtttacaatgtatatcatttcctttctcattctctctctcttccttctggactttttgagagtaagttggagacaccctgcccctttacccttacatacgttattgtatattttctaagaacaaggacactgtgttgaataatctcaatacagttatcaaaatcaggaaatttaacattgatataatattatctagtttagagtccacacatattcaaattttgtcagttgtccccagattatgtctatttatttttcacagtccaggatccattccagggtcatgcattgtactgaatttttttcccttagtttcatttaatgtggaagattttctcagtttgtcttatgtttgtgtttttagtttgtctgatgttttcatgattaaattcagactatgcatttttgataacaatagcacaaagcgatattgtgtcctcagtgtgagcatgatgttggttgtcccaatattagtgatattatacacacatacatatacatacatctatatttctatgtatatattttcaaaacaatgagtttattctaatgccaccaatactagtccatttgtttgtttatatcagtattttttttaagtttatataacatgcagaataccttatcagtcattctggagaattcagaaagagtagaagaaaatatctgtatcagaaaagtcttattaatctgattagcttctttcatttcgtgatgaaaaaacataatttattaaaatttgtaagaaatctaagaagaaatcattattcagatttattgttcaagaaacccaaagaagggttgtgtaaattgagtgcttaatgtacctaaaaacccaaagcccatgatgtgtagagaggtgttcatggtccccatgtgacaatgggaaaggtgcccttgtgggtagtcttctgaagctgatgtgttattctacctgagacatgtttacttgtacatacaatctatgaggatgttagagcagatgcagtttggtctacaaaacaaaaacaaaaaataacaacaaaaacaccctgaaatactgggttgtagtaagaaattaactttgtgagttatccatggaattataatcataaggaaaatctccacagctgaatccatgatggatattttctattttatacagacatttctcacatcctgcaacctgcaaagtagcagacatatttcaaattctttagttctttcactttggttttagtgaaagaccatgtctttgtcaatctaggaggcatgctccatagattttattgatgtcttttgattcagataaatgaggagaattcaacttcttcctttcctgttccctagactttagtgaagtggagatgtctgatgatgttctaaaatgataagatgaaggtgatgttatttcattataaagaagaggcctttaacatgtaccttgtgtctgtggcatactcattattttattataagtaaatttgaattattttctttagaacaacaacaacaaaactattaagtttgataaaagacactctttacttcaactgagactcattaacccctgaactttatacgtattaatatcaataataagaaacaactattttacaatttggtttaatatcgtataacaatactttgtgctctaagaaaataaataaagataatactactttgctcatgaaatataactgaagataataacaataaaataagaaaggataatagtaataaggaaaataaagataatactctgtgctctgagaaaataaataaaataaatataataatgtgagctaactcatgtagtactgattatgtgccaggaaacaccgtaagtgtgttacatgtattagcccattgaaccctcctaaaatccctctgatgtaggtactaatattcttcctagtttcagatgtggttcagagaggttaaagtactctccaatgtcatgcagctggaaaaggcagagctgggatttgaacccagagaatctgtcttgtgagtccaggatcataataaattgtctttattcagttaccagttatgctgacttattgctgcaaagtttttgtactatatgttaaaattatttataatttagaaatattgaaaaagagcattttaattataataaaaaatcatactatcatgcataattcacttaaccatttgttagttcttgattttgttttagaggattgaaataaaaaactacacagatagatttaaatgtttttttcattagtaaaaataaaatgctgttagcttattagctgatgttggcttttaaaatgtcctgtttagcactttgggaggctgaggcaggcggatcacaaagtcaggagttcgagaccagcctgccaatatggtgaaaccccgtctctattaaaaatacaaaaattagctgggcatggtggtgggcacctatagtcccagctaytcaggtggctgaagtgggagaatcccttgaacttgggaggtggaggttgcagtgagccaagatcgtgccactgcactccagcctgggcgacagagcgagactgtcaaaaaaaaaaaaatcctgtttaactctggaagaacactagtgcatcagatatgtgactaatttaagaaaagggattatgtgaatatagctactgtactggtgtttttacaaaagaataaattttaatcatagctcttgagtatctagattggcatgtatgttccctggcaagggaaagattcaaattacattagtttctaaatttctgaagaccaactgttttgctaatattcatttacatccttcagagatatgagaaagcgctttaatttatttgtaattgatgacagaattactctagaggcatatgtagaaaattggaaaaaaacaatcaacactgtatagattactagagggtgaagtgggctgggtgggttaaaaagctacctatcaggcactatgctcactaccagggtgacgagrtccatgctccaaacctcaacatcatgcaatattcccacataacaaatctgcacatgaaccccctgtatctaaaataaaagttgaaattaaaaataaatttaaaaataagaaaattggaagaaaaaatatccttttggttttaagacaaggataatgcatgttattgtattgtcctatctaattatataatttgtttaagatttattttattaaatgtcttcattgttccattttttgttttttaagtgtttctcagattttaatgtacacatgaaccacctgaggatcttgtttaattcagtcaccatggtagaggtggaataatttaccaatcactggagcccatgggcacagttcatgaagaacctcacaattactattggaaacaaagtcaatgtaacaagaatcctgaaaaatataaatatgcatactgttttttcttttgtaaacaaaatttattttaattgacaaataaacattatgtatatttatcatgtgaatgatattttaaaatatgtacacattgtgaaatagttcaattgagctaatcaatatattcattacctcatatatttatcattttttttgtggtgagaacacttacgatttattctcttaacaacttccaaaaatacaatacgttgttattctgttgtaatacttccttgcacggattttctactacatgttttacaatagatttcttgaacttattccttccatctaattgaaattttctattctttaaccaataatgcccctgaccctggtaactagcattctactctctacttgtgtgagttcaactttttttagattctacatatgtcagatcatgtggtatttctcttactgtgcctgacatatcacttaacataatatgcttgaagttcacccatgttgttgcaaatgacaatattgtcttttttttttttttacagtgaaatagtattcaattgtgtgtgtatacccctgtttctttatccatttatttatgtgtcgatagatacaggttgatttcttatcttggctgttgtgaataaggccacaataaacatcagaatgcagatctctttgacaaaaagttatatgtacccagaaatgggatttctggatcatattgtagttctatttttacgattttgagaaaacttcatactatttcttataatagttgcactaatttacatttgaatgaacaatgtgcaaggtgaattggtcagtttgaaacttttccatatgatatttattgtcatgttactgttaataactttctcttgctttccaaaataataaaggaataaaagaygttatttcatttttctttgatgaacaaaggttgcactatggtggagaatgtgagggcataattcttctaaggtttatccatgttgtagcatgtatcagtacttcattctttcttattgccaagtaatacttctttgtatggatattctgctccatgctgcttatccatttaccagttgatggacatttgggttgtttccacttttgggctcttatgaaaaatgttgctatgaacattgtgtaaaagttttgtgtggacatatgctttaatattgaattatgcttcgccaatatgtcaataaaatttgattttattcacaatatgtaagaatttaaatggagagatataaatataaaaaatttaacatattttcctcatatttatacagtggatgggttcgaaattggatttaacccaatccaaactggatttaatccaatttaaattggatttaaaccaatttaaattggatttaaatttaattggatttgtatatgaatgaagattatatttacaacatgtgacaaccctatcttttgtcttagagttatttcctttcttttgttttattgaataaaataaaccggctttctataaggacttttagggtagatccactctgaaaacttacaccttgataataccttcccccaccccaggcacttttactttttattattgttattatttaatttcaacttgtagatacagggggtacatgtgcagatttgttacatgggaatattgcatgatgcygaggtttggggtatagatcccgtccactgttgtagtgagcctagtacctggtaggtagatttttaacccaatatcccctgccttccaccctcttggagtccacaatgtctatttttcccatactgatgtccatgtgtgcacaaggcttagctcccacttataagtgcaaacgtggtatttggttatatgttcctccattaatttgcttaggattatgacctccaagggctccatccatgttgctgcaaaagtcacattttcatttttttttatggctacacagtattccatggtgtatatgtactattttttctttatccaatctaccattgatgggcacctgggttgattctatgtctttgctattgtgactagcacagtgatgaatgtacaagtacatgtgtctttttggtagaatgatttattttcttttgcatatatacccagtagtgggattgctgggtctaatggtagctatgttttaaattatttgagaaatctcccgactgctttccacagtggccgtactaattacattcccaccagcagagtataagcatttccttttctctgcagcctctgcatctgttgtttttttggctctttaataatagccatcctgactggtgtgaggtagaatttcattgtggttttgacttgcatttctctgatagtgatgtggagtattttttcatatgtttactggccacttatcttcttttgagaagtgtctgttcatgtcctttgtccacttgttttttttttttttttttttttttgagacagagtctctctctgtcgcccaggctggagtgcagtggcgcgatctcggctcactgcaagctccgccccccgggttcacgccattctcctgcctcagtctcccaagtagctgggactacaggcgcccgccaccacgcccggctaattttttgtatttttagtagagacagggtttcactgtgttagccaggatggtctcgatctcctgacctcgtgaaccaccctcctcggcctcccaaagtgctgggattacaggcgtgagccaccacgcctggtcatttgtccactttttaatggggttattttctgcttgttatttattttttaccatagattctggatattaggctttgttggatgccttgtttgcaaatatcttgtatcattctataggttgtctctttgctctgttcatagttttttttgccatgcagaagctctttagtttaattagttctcactatatttttgtttttattgcagttgcatttggggacttagccataaattctttgccaaggccaatgttgagaagactatttcctgggttttcttctaggatttttatagtttgaggatttacatttaaatgtttaatccattttgagttcattcttgtatatggtaaaaagtatgggcccagcttcagtcttctgcatatggctagccagttatcccagcaccatttattgaatagggagtcctttccccattgcttatttttgtcagccttgttaaatatcagatagttgtaggtgtgtggctttatttctgggttctctaacctgttcaattggtctatgtttctatttttgtaccaataccatgctgttttgattaccatatccttgtagtacagtttcatgttgggtagtgtaatgtctctgtcttttttccttttgcttagtattgttttggctattcacactcttttgtcgttctatatgaattttaaaatagtgttttctaattctgtaaacagtgacattagtagtttgacaggaatagcagtaactgtaaattgctttaggcagtatggtcattttaacaatattgattctttcaattcatgagtatggaatgtttgtccatttatttgcattatcactgatttctttcaccaatgttttgttgttctccttatagagatctttcacctcctggttagctgtattcctagatacttcattttatttgtggctattgtaagtggaattgtgttctagattttactctcagcctggatgttgctggtgtatagaaatgatactgatttttgtacattgattttatcctgaaactttgctaaagttgcttattaattcttggaaccttttagcagtctttagggttttctaggtacaaaatcatatcgtcagtgaaaagagtttgacttcttcttttctttttcaaattccttttatttctttctcttgcctggttgatctggcaaggacttccagtactatgttgaagagaagtggtgagagtaggcagccttgtcttgttctagttctcaagggaaatatttccatcatttgcccattcagtctgatgttggctgtgggtttgcctggatggcttttattattttgaggtatgttcctttgtttattgaggatttttataatgaaggaatgttgaattttatcaaaaggtttctctgcatctattgagatgatcctatagtttttgctcttgattctgtttgtgtggtgaatcatgtttgttgatttgcaacatgtgcaacaaacgcaaatatgatttgcaacatatgcaagtatttgcartcttgcaacacagcaaatcacaaatcacaacaaatgtgatttcagtattgaatcccaagaataaagcctacttgattgtggtgtattaactttttgatgtgctgctagattcaatttgctaatatttgttgaggatttttgcatctgtgtttatgagggatattagtctgaagtttgttgttgttgttgtatctctgcctgattttggtatcaggctgatgcttgtcttatagaataagttagggaggagcccctgctcctcagttttttggaatagcttcagtaggattagtatcagttcttgtttgtatgtctggtagaattggggtgtgaattcacttggtccagggctttttttgcttggtaggttctttattattgattcaatttcagaagttaaaattggtctattcagagtttcaatttcttcatgattccatctttggagattgtatgcttccaggaatttatccatttcctttagattttctaatttgtgtgcctagagttgttcatagtagtctctgaggttcttttgtatttctgtgggatcagttgtaatatcattagtgttgtttctgattttgcttatttggatagtctctttctttttctttgttgatttagttagggattctaccagtcttagtttttcaaagaaccaattcttggtttcattggtcttttgtatggtttattgcatctcaatttcattaagatcttctttaattttagttatttcttttcttttgctagctttggagttggtttgttctctttctttcttgttcctgtaggtgcaaagttagtttgttaatttgagacctttctaacttcttgatgaaggcatttaggactattaattttcctcttaacactgctttggctatatctcagagattttggtaagttgtgttcctattttcattaacttcaaataattttttaaatttctgccttaatttctatgttcacccaggagttattcaggaataagttgcttactttccatttatttgtgtaattttgagagatcattttggtattgatgtctagttttattacactgtggtttgagagtatacttggtatagtttcaatttctttctgaatttattgaggcctgctttatgactgagcatgtggttgatctttgaatatgttctgtgtgcagatgagaagaatgcatattctgtggttgttggatggagtgctttataggcccatttggtcaagtgttgagttgaagtccagagtttctttgttagttttgtgctttgatgatctaatgttgtcagtagggtgttgaagtctcccactattattgtgtggttgtttaagtgttttcctaggccaagaagaagttgttgtataaatctcagtgctccaaagttgggtgtgtatatatttagtatagttaaggcttcttgtcggactgtatcctttattgttatgcagtgcccttcattgtccttcatttttatgtgtttaaaatctgttttatctgatgaatgaatgaatgatgaatgaatgaagaatgaatgatgaaacatgaagaatgaatgatgaaagatgaagaatgaaaattgaatgatgaagaatgaatgaatgatgaggaatggtgacacctgctcttttttgttttctgtttgcatggtagatcttaccgcatacttttacgttgagtttgtgggtgtcattacatgtaagatgggtctcttgaaaacaacagattggttgggtcttgtctttttatccagcctgccactctgtgtcttttgagtgggctgtttagcccatttacattcaaggttattattgatatatgtgattttgattctatcattgtattgttagctggttcttgtgtagttgctttatagtgcctgtgagctatgtgcttaagtgtgcatttgtggtggcaggtgtcattcttttgaattcatgtttagaactcccttaaggacctcttgtaaggctactctagtttaaacgtattccctcagcatttgcttgtcagagaagcctcttatttctccttcagttatgaagcttagtttggtaggatataaaaatttttggttggaatttcctttctttaaggacactgaaaataggcccctaatctcttctggcttgtaaggttttttctgagaaatctgcttctagcctggtgggattccctctgtaggtgacctgcactttctctctagctgccttttagatttcttcttttgcattgatcttggtgattctgatgactatgtgcctcgggtagggtcatcttgtatagtatctggctgaaattctctgtatttcttggatttgcatgtcaatgtctgtagtgacactagagaagttttcatgcctgtgtcctcaaatgtattttacaagttgcttattctctctccttatttcttaggaatgctgatgaatcatatatttggtcataatcccatatttctcagatgttttgttcatttttctttttgttgaattttattaaaattctattcaaattgctaatgaatgcatgaaacaagaaggcaaagacatgcatgtagtcagacttaggtcataattaaaaattacactttctcagaaaagtgttgtaatataaatttaaatacatataatatacttgatgttttaggaaaaatatttagaaggatgttgcatttgccaactcaatggagtgtactttgtgcccttccaaattaaacaaattgctgccaagtatttacaaaatcatttatattctaaagaacattgacacacaaggcagaaattaattacagaaataattttagctgccattttggtctcagaaaggcttctttgcacagattcaacagatttatttttttttatcaccaaagttaagaataagaattaaatgacagccagtgctggtaagattgatttctatcaattcgttacaactttaaatgcaagacagaaatattttgcacaatcaccagtccagttatccctcagatatggagctctaagtttgatgttagttggaaagtcaaatcagaattagaaggcctagttctcctgtaaaactcaaaatctgacactcccacaaaaaaggaaaactctgttatatttgccagagtatcattttttattctatttaatattgtcttacaattgaaatttcaagtttcaaggcagaaaactgtgcattgatctacagttgtcatggagttttctagaagcactagactttcccctaactcagatacacaatccaatgaatattcttctcagttgtggacaaaacagaaatataacagggtacagatcctcatttggaatgggctgctacacagagccaagttactgaaaactatgaccataaaaaggaattgagtcaatgacctagaaatgcctataagcaaatcccttgaaccactcagttttggtcatattaaattaacctttgagtaaattcggcctttaaaaatttttacttgacaaaaattgtatatatttatggcatacaacatgatgttttgaaatatgtagacattgtggaatgattatatcaagctaattagcatacacatgacctcatatacttttcatttttttgtaatgagaacacttaaaatctgctgtctttggaaatttaaggtacacaactcattgccattaactgtggtcctcatgttgtacatttctcgaacttattcttcatgtctaactgaaattttgtatcctttcaccagcatttttctgggtaacccatctcctcactcccagcctctgttaaccactatttttactctgcttctatgagtttgacttttctggattccacacacaartttgatcatgcagtatttgtctttctgtgcttggctaattttatgtaacataatgttctccagactcatcaatgttgtggcaaatcaaaagctttcctttgtttttaaggctgaacaggttccccctgtgtatatataacacattttctttatctactcatctgtggatggacacttaggttgattttgtgtcttggctgcagtgaacataggggagcagaaatctctttgaaatactgattcatttactttgggtatatacctagtagtgggacatactttattacatattgggattgctggatcatatggtagctttatttctgtgggtttttttttttttttgggtggggggaagcatcatccataaggctgtactaatttacattctgaccaatagtgtggaagagttcccttttctctgtactcttgccaacactattttttatatttccaacttttattttaagttcaggggtacatgtacaggttgtgcagatttattacataggtaaatgtgtgccatggtggtttgctccacagatcattccaccacccaggtattaagcccagcatccactagctattcttcctcatcctctccctcctctcaccccttgccctttgacaggacccagtgtgtgttgttccccccatgtgtctatgtgttattatcatttagctcccacttgtaagtgaaaacttggtgtttggttttcagttcctgtgttggtttgctaaggataatggcctccaactctatccatgtccctgcaagtgacatgatctcattcctttttatggctgcatagtattccattgtgtatatgagccacattttttaatccagtctatctttgatgggcatttatgttgattctatatcttttctattgtgaatagtgctgcagtaaacatatgtgtgcatgagtcttattacagaatgatttgtattcctttgggtatatactcagtaatgggattgctgggtccagtggtatttttgtctttaggtctttgaggaattgccacactgtcttccacaatggttgaactaatttccactcttcaccaacagtgtgtaagtgttcctctttctccacgacctctccagcatctgttattttttgactttttaacagtagccattctgactggtgtgagatggtatctcattgtggctttgatttgcatttctttttaaaaaatatttgtccttcaacttttattttaagttccagagtacatgtgcaagatttgcaggtttgttacataggtaaacatttgccttgatagtttgctgcacaatcaacccaacacttaggtattaagcccagaatcccttagctattcttcctgatgctttccctccccctaccccacctccacccctaacagcctccagtgtgtgttattcccctcaatgtgttcatgtgttctcatcattcacctcccacttataagtgagagcatatggtgtttcgttttctgttcctgcattagtttgctgaggataacagcttccaactccatccatgttcctgcaaaggacacgatcttgttcctttttatggctgcatagtattccatagtgtatgtgtactatattttctttatccagtctatcattgatgggcatttgggttaattccatgtctttgctattatgaatagtgccgcaataaacatacgtgtgcatgcgtctttatagtagcatgatttataatcctttgggtatataaccagtaatgggattgctgggtcaaatggtagttctgcctctagatctctgaggaatcaccacactgtcttccacaatggttaaactaacttacactcccaccaacagtgtaaaagtgttcctatttctctgcaaccttgccagcatctgttgtttctggactttttaatasttgccattatgattggcatgagatggtatttcattgtggttttgatttgcatttctctactgatcagtgatgttgagctttttttcacatgtttgttggccacatgcatgtatgtcttcttttgagaagtgtctgttcagtcctttgcctactttataatggcttttttttttttttttttttgtaaatttaagttccttttaaatgctggatattagacctttgtcagatacatagtttccaaaaattttctcccactctgtaggttatctgttcacttgatgatagtttcttttgctgtgcagaagctctttagtttaattagatctcatttgtcaatttttgcttttgttgcagttgtttttggcatcttcatcatgaaatctttgcctgtgcctatgtcctgaatagtactgcctaggttttcttctagggtttttataattttgggttttacatttaagtctttaattcatcttgagttgatttttatatatagtgtaaggaaggggtccagttttaattttctacatagggctagccagttctcccagaaccatttattaaatagggaatcctttccccattcctcatttttgtcaggtttgttgaatatcagatggttgtaggtgtgcagtcttatttctgggttctgtattctgttccattggtctatgtgtctgttcgtgtaccagtactgtgctgtttgggttactgtagccctgtagtagagtttgaagtcagggaatgtggtacctctagctttgttctttttgcttaggattggctatacgagttctattttggttccgtattgattttaaaatattttattctatttctgtaaagaatgttaatggtagcttgatgggaatagcattgaatctataaattactttggacagtatggccattttcaaaacattgattcttcctattcattagcatggaatgattttccatttgtttgtgtcatctctgatttctttgaacagtggtttgtagttctccttgaagaggtccttcacttccgtgttagctctattcctaggtattttattctcattgtggcaactgtgaatgggagttcatttatgatttgtttctctacttgcctgttgttgaatgatttcccatttgtttgtgtcatctctgatttctttgagcagtggtttgtagttcttctcaaagaggtccttcacttccctgttagctgtattcctaggtactttattctcattgtggcaattgtgaatgggagttcatttatgatttggctctctacttgcctgctgttgttccacaggaatggtagtgattttcgcacattgatttttgtatcctaagactttgctgaagttgcttatcaccttaagaagcttttggggtgagtcagtggggttttctagatacgcaattatgtcacctgcaaacgaagagagtttgacttcttcctttcctatttgaatacacattatttctttttcttgcctgatttccctggtcagaacttccaatactatgttgactaggagtggtaagagagggcatccttgtcttgtgccagtttttaaggggaatgcttccagcttttgcccattcagtatattggctgtgggtttctcatatatggctcttattatttagaggtatgttccttcaaaaccgagtttattgagagctttttacatgaaaggatgctaatttttaccaaaggcctttcctgcatctgttgagataatcatgtgttttttgtttttagttctgtttatgtgataaatcacatttatagatctgtgtgtgttgaacgaaacttgcattccagggatgaagactacttaatcatggtagataagctttttgatgtgctgctagattcagtttgccagtattttgttgaggatttttggtatcaatgtttatcaaggatattggcccgaagttttcttttttgttatatctctgccaggtgttagtatcaggatgatgctggcctcatagaatgggttatgggggagtccctgcttttcaattgtttggaatagtttcaataggaatggtaccagctcttctttgtacctctggtagagttaagcggtgaatccatctggttatgggctttttttggttgataggctattcattactgatttgatttcagagcttgttgttgatctgttcagggactcagtttctttctggttcagtcttgggagggtgtatgtgtccagggatttgtccatttcttctagattttcaatttgtgtgcatagaggtgttcataacattctctcatggtcgtttttatttctgtgggtcagtggtaatatcctccatgtcatttctgattgtgtttatttgaattttctctcttttcttttttattagtctagttagcagtctattttattaactttttttcagaaaattagcttctggatttttgatcttttgaaaggtttttcatgtttctatttcctttagtttagctctgcttttggttatttattgtcttcagctagctttgttatttgttcactcttggtttcctagttcttttagttgtgatgttaggttgttaatttcagatctttttaacattttgatgtgggaatttagtgctgtaagtttccctcttaacactgcattaactgggttccagagattttggtatgttgtatttttgttctcattaatttcaagatttctgccttaattttattatttatccaacagttgttcaggaacaggttattcaatttccatgtaattttgtggggtattaatttgttttcatgctgctatgatgaaataccccaggctgggtaatttgtagagaaaagaggtttaattgactcacagttccacatggctggggaggcctcaggaaacttatagtcatggcagaaggggaagcaagcatgttctttttcacaaggtggcaggagagagaagtaccagcaggggaaatgtcagattcttataaaaccatcagctctcctgagaactcactcactattatgagaacagcatggaggaaactgcccccatgttctgattacttcccaccaggttcctcccatgagaggtggagattttgggaagtacaattcaagaggagattttggtgggagcacagccaaaccatattatgtgggtttgaatgcatttcttaatcttgatttctaatttgattgcactgtggtctgagagattgttcattatgatttcagttcttttacatttgctgaggagtgttttacttctgattatgtgaccaattttagagtaagtgatgtgtggcaatgagaagaatgtatattctgttgttctggggtgtagagttctatagatatctgtcagttccacttgatccagagttgagttcaggtcctgaatatttttgttaattttctgtcttgatgatagagatattagaaaatattgtcaatggggttttaaagtctcccactattattgtgtgggagtctaagtctctttgaaggtctctaagaacttgctttatgaatctgggtgttcctgttttgggtgcacatatatttaggacagttagctattcttgttgaattgaaccctttatcattatgtaatactcttctttgtcttttttgatattttttggtttaaagtctttttttgttagatgctaggattgcaatccctgcttttttctgttttctatttggttggtaaattttcctccatccctttatttttagcctgtgtatgtttttgcgtgtgagatgggtctcttgaagacagcttaccagtgggtcttggttctttatccagctttttactctgtgtcttttaattggagcatttaaggttaatactgttatgtatggatttgatcctgtgatcatgatgctagctggttattttgcagacttgtttatgtagttgctttataatgtcactggtctgtatacttcagtgtatttttgtagaggctggcaacagttttccctttttatatttagtgcttccttcaggagcttttataaagcaggtctggtggtaacaaattccctcagaatttgcttgtctgaaaaggatcttatttcttctcttatgaagcttagtttggctagatatgtaattctgcattggaatttcttttctttaaaaatgttgaatattgtcccccaatctcttctggcttgcatggtttctgctgagaggtccactgttagtccaatgggcttccctttgtaggtggcctcgcctttctttccagtggcctttgacattttttatttcattttgaccttggaggatctgatgattacatgttttggggacgatcttcttgtggagtaagtatcttactggggttctctgcattttctgaatttgaatgttggcttctgtaggtaggtcagggaagttctcctggatgatatcctgaattatgttatccaaaatggtcccattctcctcatctttttcaggtaccccaatcagtcatagattcagtctctttacataatcccatatttcttggaggttttgtttattccttttcattgtttttctctatttttgtctgcctgtgttatttcagaatgacattcttcaagctctgagattctttcttctgcttggcctattctgctattaatacttgtgattgcatcgtgaagttcttgttgtgtttttttcagctctatcaggttggttatattcctctctatactggctattttggctgtcagctcctgcattgttttatcatgattcttagcttccttgcattgagttgcaaagtgctcctttagctcagtgaagttcattttttagatccacatttggaatcctatttctatcatctcagccatctcagcctcagtccagttctaaatccctgctggagaggtgttgtggtcatttagaggaaagggagcacactggatttttgagttttctgtgtttttgtgctgattctttctcatctttgttggcttatctacctttgatctttgaggttgttgacctttggatgggtttttgttgttgttgttcttgttgttttgctcgttttttctttgaacagtctgaccacttttctgtagggctgctatgatttgctgggcggctgcttcagaccctagtcacctcagttttttcagtacctgtaggtattaccggtgaaggctgcaaaacagcaaagatggcagcctgccccttcctctcagagctctgtcccagagaagtactgacctgttgccagcctgaatgcacccataggatgtggctggaaaccctgttttggaggtctcacctagtcaggaggaatgggatcagggacctccttaaagaagcagccttcctgcgtttttgtagagcagctgtgctgtgtttggcttcccttcacccccatatagttttgcactttccaaggcccacaggttggactgggtgagatgcccaaacagcacaggtggcagcccacctggccccctgggcactccatcacagggagaaattagaactttgtcagccatagaacatgggtgagggtggttggaagcactggttgggaggacctgcccagcaaggaggaatggattggggttctatttaaagaagcagtctggccacaccttgacaaaacagccatgcgttgctggggatccatctctgcctgtattggcttggattctgcaaagcctacaggctggaatgggctcaaagcaacattggcagctcatccctccccactgggcactccagccaagggagagatcagagttctttcctagaatatgggcaggggtggctggaggtccctattgggaagtcctgcccagtggggtggaatggattggggtcccacttaaagaagtagtctggccacattttcatagagcagctgtgctgtgctgtgctgggggtcccttacttgtccagactgtttggactctccaaagcccacagacttgaacagctgagttgtccaaataacaaaggtgacagcccacccctttccctggcagctccattccatctcaggcaggcactaccctgttgctggtggctggctgaagttccaagccagtgggtcttattttgtgaggtgccttggaaatggggcccacagatggacgctgttcagctccctggattcggcccccttcctaggggtatgtatggacctcccgccttgactgagttgtagtcacctttgccagggatcctgtggctggggtatgtaaatctcctgggtctctgtgcatacctgagtggctgccctgctgagactccacacagctctgtgtatctgacccaaggtcctggtggagtgggtttatgaggggatctcctgatctgagggttgcaaagatccatgggagaaatgtggtttcccagggtggcacattcacttaccacttccttggctggggtgggggttcccttggctttgcgtcacttccaggtgggctatcatcctgccctacttttctctgttttctgtggattggttatttccctgatcagtcccagtgcgaaaacctggatatttcagttgaaggtgctgtatttactcactgcttttcttcctctttatgagtgccatgcaccatagctacttctaattggaggtctcggcccactctctgctcttcatctttctcaattctcttttctgtatttttgtctgactgtgttaattgaaagaattgctctttgagctctcagattctttcctcagcttggtctattctgctgttaatacttccaattatattatgtaatttttgtagtgaatttttcagctcaagaaattaagtttttgtctctctttaagtgagaatttcacctttcagcccttgaatcattttactggattgcttggcttccttggattgagtttcaactttcttcttgatctcaatgagcttctttgccatccatattttgaattctatgtctgtcatttcagataattcagactggttaggaaacatttctggggagctagtgggctcatttggaggtaagggggcagtgtggctttttgaattgccagagttcttatgctgattctttctcatctgggagggatggtattcttttaattgtggtgtaaattgagtgtactttgttggctttgtttctgaaagtttttagagaactaaggctctgtatggtgtcttcgttgcagaattcttactcttggttttgcaagggcaggattagtaaagtgattttggtgttgtagtttgggctacaatctagtagatggtccttgagagcaatgggcagtagataggcttctactcagccttgtggttcctttgtctatgttaacatttgcagctgtgttctgcagtgcaagggggaaatagatgaccccctcatcaggtctgcttgggggagccacatccaatcactagcactgtaccttcgattttgttgttgtttttattaggtctttggggccacggggctcccttagggagaggtctggtatggaaataacccatatccttactggaccaatccccttccccaggtacctttccagtttggaaatcagccttagcattcaggcaccccacattgggtgcctaacttccttcttcttcagtctctgggactgcatcttttctcaatccatgtttggtagtttctctctgaagatttgttcaaattatgttggtgtatattaaattgggtctctttctgtgggagtggcaatttctgactgtatctagtcccaatctatattttaaaagtatggcaagttttgaattttcagtatatgctgaaactgggtggtttttaaagagcagaaatttatttctcatagttctggaggctcaggagttcaagatcaaggcactgacaggtgtgatcttgtgagggctgcttttgcttccaagctgatgctctgttgctgtcctaatgtggtgggaggtggaaggggaaaagggtcacttttatgatgtcatttattttaatgtgatcactagtcatcagtattttttgttttgtttttgtttactttttgtatttgcctaggaatagcctatatgaaaattttatatctgaagtatacacaacacttagtccaggatcatattattagataagcactcacatttgaggatgacagcaaagttttttaattgatagagtttcttaatttagttgtaaatttctctgtaatttaattctaatattcttttctaagtggttttaaatttagccttatggttcagtgtattagaagcaaagtccaataaaattacatctttataatatcctgtaagacattaaattacatattattaattccacttttgaaaagtaattaggatctaataactgccaatagcaattgcatacattcactaaaatttacttgtttgtgtatataatttgggggttattttcaaaaattatgtggtttgcagtggattatttattagcacttaaaattttccacatgaaaaataagcctttgatwaccaaacaaagggatatgatctcaatatcatcttcttcctaaagtatttattccagagtgaatatcaggatgcccatttgtagggagacaaaatctatctgaaattattttcccgtgaattgctcatttttattgttctcataatcaacacaagatgttaaaataaatgtatttgtaagcttatttcttatttcataatacatctgtaacatttatttaaaagtaaatctattcaaaatattggagaatcatttgttatactttgtcacagtactttgacatgtttatgggtgatagattgttagatgtgggaacaatatagttacaaatgacaagcactcacaacagagtaaaattcttattggcatcttgaaggttttggtatatgtattcaagagtttctgtgattttaaagattgtaattaaattgaacaatgagaacacatggacataggaaggggaacatcacacaccggggactgttgtggggtggggggaggtgggagggaatagcattaggagatatacctaatgctaaatgatgagttaatgggtgcagcacaccaacatggcccatgtatacatatgtaacaaacctgcatgttgtgcacatgtaccctaaaacttaaagtataataaaaaaaaattgtaattaaaatataactatagaaattcttccacttttctgactatgtagtagatgcagaattcatgaatgtgtacttgatctatggtactgaagtattttgggagatacaaaagtttaaaacagtcttggttaccataatgcttatagttatttgagacttatgaaaattatcagaaacataagacaaactttggtaagtaccttaatggaggaaaagatctccaacagttgacaggatcagggaagtctgaactaaggacataggatgtsagttgggtggtgaagatcaggtattattttaacaaggagaaatggagggtgttctacctggaaaaaaccttgggagatgttgtaaaagtgagaaagcataaaatgcccagtatatttggattacatggtagaaaatggtgttgaaagagttaggatgggacagagcatggagtgttgtcaatgacttagccaaaaactgcaaattttatttgattactaatgaaatgatttacaattttgatgagagtctaggggatttaatgtgacaattgtatattcatttaatgaaaaaatgctgataaaatgctataaaattaataatattggttttacaatttgagcaaaggtggtacttgtctgtcactctaacaaattcgtttatagttgacccttgaacaacaaggatttgaactgtgcaggtgcatttatatgtagattttaaaaaataaaagctacatggagggtgcctgtctctcttgcctccctttctgcctcctccatctcttctgcctctgcccccactgagacagcaagacccaccctttctctttctcctcctcctcatcctactcagtgtgaagacaacaaggatgaargccttcatgataatccacttccacttaatgaatagtgtattcgttctgttctcatgctgctaataaagacatatctgagactgggtaatttatgaaggaaagaggcttaattgactcacagttcaacatggctggaaggcctcaggaaacttacaatcatggcagaaggggaagtaaacatgtccttcttcacgtggagacaggaaggaggagtgccaagcaaaagggggaaaagccccttataaaaccatcagatctcatgagaactcactcactatcatgaaagcaacagtgtagaggtaaccacccagatgattcaattacctcccaccaggtaccctcccatgacacgtggggattatgggaactaaattcaagataagatttgggtagggacacagccaaaccatatcattccacccctggctcctcccaaatcttgtgtcatcacattttaaaacacaatcatgccttcctaacagtcccccaaagtcttaactcattccagcattaacccaaaagtacaagtccaaagtctcatctgagataaggcaagtcccttccacctatgagcctataaaatcaaaagcaagttagttacttcctaggtaaaatgggggtacaggtgttgagtaaatacacctgttccaagtgggcaaaattggtcaaaacaaaggggctacaggccccatgcaagtccaagatccaatagggcagtcattaaaccttaaagttccaaaatgctctttgacttcatgtctcacatctagggtacactgacacaagaggtgggctcccatggccttgggcagctctgcccatgtggcttttcagggtatagcaaccctcctggctactttcactggctggcattgagtgtctgctgcttttccagccacaagctcttagcagatctaccattctggggtctggaggacagtggccctcttctcacaactccatttgacagtgccccagtggagactctgtgtgggggctcccacaccacatttcccttccacacttcctagcagaggttctccatgagggctctgcctctgcaacaaacttctgcctagacatccaagcatttccatacatcctctgaaatctaggcagaggttcctaaacctcagtttttgacttctgtgcacccacaggctcaacaccatgtggaagctgccaaggcttggggcttgcaccctctgaagccatagcctgagctgtaccttgaccccttttagccatgtctggagcagctgggatgcagggcaccaagtcccaagtctgcatacagcaggggggccctgggctctgcccatgaaatcattattttctcctaggcctctatgcctgtaatgggaggggctgctgtgatggtctctgacatggcctggagacattttagccattgtcttggtgattacatttggccttgttacttatgcaagtttctgcagcaggcttgaatttctccccagaaaatgggcttttctattctattgcatcctcaggctgcaaattttccgaacttttatgctctgcttcctcttgaatgctttgtcacttagaaatttattctgccagataccctaaattatctctctcaagttcaaagttccacaagtctctagggcaggggcaaaatgctgccagtttctttgttacagaatgacaagagtcacctttgctccagttcccaaaaagttcctcctctccatctgagatcacctcagcctggactttattgtccatatcactatcagcattttggtcaaagctgttcaacaaatctctaggaagttccaaactttcccacaccttcctgtcttctgagctctcctagtctctaggatgttccaaacttccccacattttcatgttttcttctgagccctctaaactgttccaacctctgcttgtgacccagttccaaagttgcttccatatttttgggtgtctttacagcagcaccccactctctgtggtaccaatatactgtattagtccattctcatgctggtaataaagacatatgtaagactgggtaatttataaaggaaagaggtttaattgactcacggttcagaatggctggggaggcctcaggaaacttacaacatggcgaaggggaagcaaacatatggtgccaggaaggagaagtccaatcaaaacgggggaaagccccttataaaaccatcagctcttgtgagaactcactcactatcacaataacagcagcatgggggtaactgcccccacgattcaattacctcccaccgtgtccctcccatgacacatggggattatggaaactacaattcaagatgagatttgggtggggacagagccaaaccatatcaaataataaatatattttctcttttttatgattgttttaacaacattttcttttctttagcttgctttataacatacaaaatgtttgttaattgtttatgttattggtaaggcttctgatcaacagtagacattcctgttaaattttggggaagttgaaagttatatgcagctgaaaatctgtgtggggtttgacactcctaactcccatgttattcagtggtcatctgtacattgattttgatgcttatawtaaaacatgatcaaattacatagctggaatgataattttaccaatatgataattttgatgatgataccatattaataatgataatatctattgaatttagtcaaatgtcagaagcatcttatttaatattttatttgaatgttcttttttatagtgtcatcatcaaataaattataagtttaaacatataatcctatttttctagattcatattgagtttcaactttgtgtcttcctaggatatattctgtttcctttctgaataattgatgtttacaagttgatgttgttrtttgctttcagatagttttgtgattatttctttttggttacagtaatcatctaaagaaatttttatgtcatttaaaattttcaatgatctttctttaaaaatatactctgcttttattttacaaacatacatttaaagtgatgtttttaaatgttaatttaatatttactgttaataatactaaaaaatatacatagataggcagcttaatatattggaaagagctctgaaatggaaaccaagacttgtggctttgccattaaactaattrttgccttgaggtcaccctgaaatcctctactttcttgtttgtaaagtagggaaataattctatccacataggttgttgggggattaaattggatagtgggattaatggaaatgttaaaaaatcttaactattgttgttatgtaatgtcatcatttagaatatatgttgttataatctgaaaatgtttcctactattcacattctgaaatttgttccattatgcttctgttagttctgtttgtacttttccaatatagatattgctatgatgtactaatctaagtttaaaggaaagtgctggatctaaattttctaccacttccctgcctgctgctgtcagcaccatagtgttgatgttttgtgttaacactatgaagggaatttatgagaataattagttttgtgttgcttatattagagctggttatcttaattcttgcttggtgggaggtgtgttccttgccatcatttggctcctggcccacagctttaaattatgtggaggagaaaatgattataaatggctccttcctgtggtgtcccttacagtttttctcctaacagaaagtctcttagttttttctcatcaatttctccttgtgttgcagtctaaagtgatgtcccatctgctggtcaagctgcaaagcaattcttttaagcatcattagcctatggttaagaattagattcctttttttgagaataaattttaattggttatggtttttactgaaatgagttgattagatgtgtagagaaactgctataatttttcatgtttaagggaaagccaataaaatatatatgaggagaaagtgtacttaagaattatttaagataaatttggtgggggaaaatctgcaagtgtaaaaatcaggattaaaatagatgctttcaatgtttctttttgttgatggtgaataactgatgtagtatatcatgtttttgacatctttgggcatataagccaaattttatagaatttttgatttatattcttatgatagcttttcaatttgtcagttctttgcctatgatgtgcctgctgagcatgaaaggcacttttgagctatgtagtaataaaaaaaaatgccacaaatacattggcccaggggataggctttctgtaaaaatgacctgaataactacagttgctgtaaataatttttatggatatttgatgctccctccctgtatttttgtttgaattagtaatcagattggtattttactaacatcctggaggtgagaattgtcattctaatacaggtattataatgcaatatctggctgggtcatactggatcagaatgaccttagccagtattgtgcagaaatgttgtaagattttggagaattactctttctttgtaaaaaggtaactctgtggcaggtactgtgtagtgctaagattcttaaggggtatttcaaagcaaacatgcctcttatagctgtctgtgctatctttcattttatgaaagattttatgtattttacaatactgatgtcagctgctgttttacagcattgcccacttcccatactgatttaactaacgggcttctttttttttttttgatattcattcttctattcatgctccattattgatacggtgtaccttaaatactgagatataaagttaagcattattaacacatcttattttacatgattagggaatgagggaagaaagaaaataaagtaaacattgtgtatgtgatatcacacacacaaaagagtcatatttatataaagataagaaatactcataattaagttagtccatatatccgcaactggtctcatcgttatagctggtatgtttaaacagcttcttccactaccatttttatatcctttgcccccagcaagaacttcagtttgtttaatttcttgcctgatgaagttacctaaatcattattgctgaaggatctgggtgattatcagtccatcctgaattgagctgtgctagttttccactgatttcaatcacaagaaatgagaatactaataagcactctggaagatctcctccatttcaggtatatatatctttttattttttagtagaaacctaattttaccttgatagctagaagaatcactccaactagtacagaaaccccatttgttgcctgttaattgaaggccctaatttggctgggtcaagtctcaatgtctagttcaatgcaatcattattgcrttatcacttgatagaagcattacttcctttgaaattaagatctctaaactcacagggcctaaaataatggcaatgagcggcaaaagtttgctagtatatcacctgaagaaatagtgatagtacattctaattttttttccctccttttgattccttgacccatacatttggactgtaagcgatatggcaccacacatgtatgctgaccatgcagaatatactggggatattacttcagctctgaaaagtgttgccatatggctgacatcataaatgagtcttcaaaaagccattccaccatactattatccatgctatgaagaaaatcatggcaagattagttaatttcatgagcaagggccctttgccacattttatttgctgtaaaataaattccttggtcaacaatgatggtatgagtaataatatgatcctgaataaggtattctgtagcacacagatggtattgttggcagattttgaattcagcagtttctgtgaccagtaaatattgatgagtagaagtccatactgcaggtctgaggtaaatcttcctccctgtcatcatggccacattctttttatttttatttttatttattttttttttattattatactttaagttttagggtacatgtgtacattgtgcaggctagttacatatgtatacatgtgccatgctggtgcgctgcacccactaactcatcatctagcattaggtatatctcccaatgctatccctcctgcttccccccaccccacaacagtccccagagtgtgatgttccccttcctgtgtccatgtgttctcattgttcaattcccacctatgagtgagaatatgcggtgtttggttttttgttcttgtgatagtttactgagaatgatgatttccaatttcatccatgtccctacaaaggacatgaactcatcattttttatggctgcatagtattccatggtgtatatgtgccacattttcttaatccagtctatcattgatggacatttgggttggttccaagtctttgctcttgtgaagagtgccgcaataaacatacgtgtgcatgcgtctttatagcagcatgatttatagtcctttgggtatatacccagtaatgggatggctgggtcaaatggtatttgtagttctagatccctgaggaatcaccacactgacttccacaatggttgaagtagtttacagtcccaccaacagtgtaaaagtgttcctatttctccacatcttctccagcacctgttgtttcctgactttttaatgatcgccattctaactggtgtgagatggtatctcattgtggttttgatttgcatttctctgatggccagtgatgatgagcattttttcacgtgtctgttggctgaataaatgtcttcttttgagaagtgtctgttcttgtcctttgcccactttttgatggggttgtttgtttttttcttgtaaatttatttgagttcactgtagattctggatattagccctttgtcagatgagtaggttgtgaaaattttctcccattttgtaggttgcctgttcactctgatggtagtttgttttgctgtgcagaagctcttgagtttaattagatcccatttgtcaattttgtcttttgttgccattgcttttggtgttttagacatgaagtccttgcccatgcctatgtcctgaatggtaatgcctaggttttcttctagggtttttatggttttaggtctaacgtttaagtctttaatccatcttgaattgatttttgtataaggtgtaaggaagggatccagtttcagctttctacaaatgggtagccagttttcccagcaccatttattaaacagggaatcctttccccattgcttgtttttctcaggtttgtcaaagatcagatagttgtagatatgcggcgttatttctgagggctctgttctgttccattgatctatatctctgttttggtaccagtaccatgctgttttggttactgtagccttgtagtatagtttgaagtcaggtagtgtgatgcctccagctttgttcttttggcttaggattgccttggcgatgtgggctcttttttggttccatatgaactttaaagtagttttttccaattctgtgaagaaaggcattggtagcttgatggggatggcattgaatctgtaaattaccttgggcagtatggccattttcacgatattgattttcctacccatgagcgtggaatgttcttccatttgtttgtatcctcttttatttccttgagcagtggtttgtagttctccttgaagaggtccttcacatcccttgtaagttggattcctaggtattttattctctttgaagcaattgtgaatgggagttcactcatgatttgggtctctgtttgtctgttgttggtgtataagaatgcttgtgatttttgtacattgattttgtatcctgagactttgctgaagttgcttatcagcttaaggagattttgggctgagacaatggggtttctagatatacaatcatgtcgtctgcaaacagggacaatttgacttcctcttttcctaattgaataccctttatttccttctcctgcctaattgccctggccagaacttccaacactatgttgaataggagtggtaagagagggcatccctgtcttgtgccagttttcaaaggcaatgcttctggtttttgcccattcagtatgatattggctgtgggtttgtcatagatagctcttattattttgaaatacgtcccatcaatacctaatttattgagagtttttagcatgaagggttgttgaattttgtcaaaggctttttctgcatctattgagataatcatgtggtttttgtctttggttctgtttatatgctggattacatttattgatttgcatatattgaaccagccttgcatcccagggatgaagcccacttgatcatggtggataagctttttgatgtgctgctggattcgttttgccagtattttattgaggatttttgcatcaatgttcatcaaggatattggtctaaaattctcttttttggttgtgtctctgccaggctttggtatcagaatgatgctggcctcataaaatgagttagggaggattccctctttttctattgattggaatagtttcagtaggaatggtaccagttcctccttgtacctcttgtagaattcggctgtgaatacatctggtcctggactctttttggttggtaagctgttgattattgccacaatttcagatcctgttgttggtctattcagagattcagtttcttcctggtttagtcttgggagagtgtatgtgtcgaggaatttatccatttcttctagattttctagtttatttgcatagaggtgtttgtagtattctctgatggtagtttgtatttctgtgggatcggtggtgatatcccccttatcattttttattgcatctatttgattcttctctttttctttattagtcatgctagtggtctatcaattttgttgatcctttcaaaaaaccagctcctggattcattaattttttgaagggttttttatgtctttatttccttccgttctgctctgattttagttatttcttgccttctgctagcttttgagtgtgtttgctcttgcttttctagttcttttaattgtgatgttagggtgtcaattttggatctttcctgctttctcttgtgggcatttagtgctataaatttccctctacacactgctttgaatgtgtcccagagattctggtatgttgtgtctttgttctcgttggtttcaaagaacatctttatttctgccttcatttcttatgtacccagtagtcattcaggagcaggttgttcagtttccatgtagttgagcggttttgagtgagattcttaatcctgagttctagtttgattgcactgtggtctgagagatagtttgttataatttctgttcttttacatttgctgaggagagctttacttccaagtatgtggtcaattttggaataggtgtggtgtggtgctgaaaaaaatgtatattctgttgatttggggtggagagttctgtagatgtctattaggtccgcttggtgcagagctgagttcaattcctgggtatccttgttgactttgtctcattgatctgtctaatgttgacagtggggtgttaaagtctcccatttttaatgtgtgggagtctaagtctctttgtaggtcactcaggacttgctttatgaatctgggtgctcctgtattgggtgcatatatatttaggatagttagctcttcttgttgaattgatccctttaccattatgtaatggccttctttgtctgttttgatctttgttggtttaaagtctgttttatcagagactaggattgcaacccctgcctttttttgttttccatttgcttggtagatcttcctccatccctttattttgagcctatgtgtgtctctgcacgtgagatgggtttcctgaatacagcacactgatgggtcttgattctttatccaatttgccagtctgtgtcttttaattggagcatttagtccatttacatttaaagttaatattgttatgtgtgaatttgatcctgtcattatgatgttagctggttattttgctcgttagttgatgcagtttcttcctagtcttgatggtctttacattttggcatgattttgcagcggctggtactggttgttcctttccatgtttagcgcttccttcaggagctcttgtaaggccggcctggtggtgacaaaatctctcagcatttgcttgtctataaagtattttatttctccttcacttatgaagcttagtttggctggatatgaaattctgggttgaaaattcttttctttaagaatgttgaatattggccctcactctcttctggtttgtagggtttctgccgagagatccgctgttagtctgatgggcttccctttgagggtaacccgacctttctctctggctgcccttaacattttttccttcatttcaactttggtgaatctgacaattatgtgtcttggagttgctcttctcaaggagtatctttgtggcgttctctgtatttcctgaatctgaacgttggcctgccttgctagattggggaagttctcctggataatatcctgcagagtgttttccaacttggttccattctccccatcactttcaggtacaccaatcagacgtagatttggtcttttcacatagtcccatatttcttggaggctttgctcatttctttttattcttttttctctaaacttcccttctcacgtcatttcattcatttcatcttccattgctgataccctttcttccagttgatcgcatcggctcctgaggcttctgcattcttcacgtagttctcgagccttggttttcagctccatcagctcctttaagcacttctctgtattggttattctagttatacattcttctaaatttttttcaaagttttcaacttctttgcctttggtttgaatgtcctcccgtagctcagagtaatttgatcgtctgaagccttcttctctcagctcgtcaaagtcattctccatccagctttgttccgttgctggtgaggaactgtgttcctttggaggaggagaggccctctgctttttagagtttccagtttttctgttctgttttttccccatctttgtggttttatctacttttggtctttgatgatggtgatgtacagatgggtttttggtgtgggtgtcctttctgtttgtaagttttccttctaacagacaggaccctcagctgcaggtctgttggaataccctgccatgtgaggtgtcagtgtgctcctgctggagggtgcctcccagttaggctgctcagaggtcaggggtcagggacccacttgaggaggcagtctgctggttctcagatctccagctgcgtgctgggagaaccactgctctcttcaaagctgtcagacagggacatttaagtctgcagaggttactgctgtctttttgtttgtctgtgccctgcccccagaggtggagcctacagaggcaggcaggcctccttgagctgtggtgggctccacccagttcgagcttcccggctgctttgtttacctaatcaagcctgggctatggtgggcgcccctcccccagcctcgctgctgccttgcagtttgatctcagactgccgtgctagcaatcagcgagactccgtggggcgtaggaccctccgagccaggtgcgggatatactctcgtggtgcgccgttttttaagcccctaggaaaagcgcagtattcgggtgggagtgacccgatttttcaggtgccgtccgtcacccctttctttgactcggaaagggaactccctgaccccttgcgcttccccagtgaggcaatgcctcaccctgcttcggctggtgcacggtgcgcgcacccactgacctgcgcccactgtctggcactccctagtgagatgaacctggtacctcagttggaaatgcagaaatcacccgtcttctgcgtcgctcacgctgggagctgtagaccagagccgttcctattcggccgtcttgggtcctccctcaactaacgggcttcttgttacagatcagaacttcagatgatttaaagaaggataggaaggtaggacggaggttttggaatgaggtcttaacaaatacttaacttttgtgagaattgtatgtgctttcacttgcttttgatcagacttgaattaaccaaaaaggaacttgtggtttgctttgttattaacattatgtggaactcatgttaatgtgcatggccaactttcttaaggtaattatcagtcatgtaatcattaagtgacagacactatttcctacctttatcattctcagtatttcagtcataagtaaatgaaacccctcatttttcgtgttctggcactattcttaaaacatatacaaaggccattgggattaaagtataagactttttctatctttttcctttaagatgatcttcctcagtgctttgtttttctttcctttttgttcacttccccctaggatctattgtcagtctttttttctgctgatgtttaatgaaggctttcaactcagttcaaacaagtgttgaagtcagatcttaggtaaaagaatgtgagaaacgcccattttaccatctgaagagagggtaagaagggtggtatgtggtatgttagaggggcagaaggagatggacatggagggggtgagtagcctgagacctgtgagttatgtaatgtctgtataaagaaaaatttctgctcagaagaattccaagtagttgaaaacaggaccgaacgtaaataaatgagatgaaattcaatgtgtaattataaaaagtaagaactccttatgctttcgtcagactgtccaaataacttattgcatatttttagaagcacattccctatggtgcatggcaatgtaaagaattcagaatcaggtctaaccctatacctaatttatgagtaagttttatttggaagttagaatattggcatatacttatattgtacattatagtttctgagtgcctttttatgcatttcatttttagatgctcgaaacartgtagagacataagcagataaggtgatggtatttccattttgtatattatttaaatgtccctttactgcactgtatgtgaccaggaggtcacattaatattaaagctcccgtgcacaggctggtagcttccacttgcatgactgtgaaacttctgctgtcctccaacactccccaggtttttttttttttttttgagatccttcagggtatatccccaccaggcactgtgggaccacactggctgccaaaccctctgtaggaatgtagttcctggacacagctgtcttgctctgatggtgctgttgctttgcgctcagaatgctcaagtttcacatgcagccttggtttaggagaatgaagtggggaagagaaaaaaaagggtgaagagttgggtaattctcctatatatgattccttcttcctttaaactagtgtttttaactatacacatatagatatttgtacaatcaaaggtaacagtggtgcaaactttattctattagagtttgtgaagaaggctgaaaaccattactttgatgaatgtgtgatcactgaaagattctgggtctcaatagagattaggggcacctcaaaaactatattaggtagaagtgttctttttggttcaagtttccttattatgctttttctagtttctgaaagaaaacttctgaggtttgaaaaaattaaaaagtcccattcttgcataagtgaattctggacagaaggagaagtcccttgtcaaccacaagtgtgcagatggctggagccacaggaggccctgggatgccattattctatactgaggtcattagactataagctgcataaagcaagccatctctttcccttttttggtagcattcacattgaaagaagcaacaaagtagcatataaaataattgaaaagaaattcaaatctttactactttttcttatcaaaataggcccttttttggtagcattcacattgaaagaagcaacaaagtagcatgtaaaataaccgaaaagaaattcaaatctttaccactttttcttatcaaaataggcctttttggtggcattcacattgaaagaagcaacaaagtagcatcaaaaataattgaaaagaaattcaaatctttaccactttttcttatcaaataggcaaaggggaataattgcataatactcagtaaggctttcttaaatattttttccttattctctcatttttacaatcttctatatgtagcagctgcctaatttcttcctctcattccatgctctatttctaagctctcagaaagctttttctctaaactgagtcatacgagcttcctgtatttgttccctttcttcactggctcagagttttattaaacagttctgcctagccttagggagctgtttcagttttgggctcccctggaactttgagcctgcacaatggaagaagacctgggaatttatcaaacaaacaagaatctgttattttagtgggtggtgtgtgtgtaagtagtgggaatctagaagaatgcaaacatgtaactcagtaccttttcttttattcctggaacaagaaaaaccatgtctatgaagataatgcatatatttagtggatgaagcatgaaaatagttgtttattaggtcacatatttttaaaagaggtttggagaaattaaaacatcttaattccaaggatatcatatattccttaagcaatgagaaaaatacctttggaattgtaaattcaataagtgataagttttcttatttcaggtaggttgctagaaagaaaggagccaaatttgcagccaccacagtgatgtatagcgaccttactttgtctttacctttatttttttttaaccaactttaaatttatgctaatttgtgttttatgtatccttataaaacactttatatcctttctggcacaaggtgatatatacatatataagtaatgataaggagcaaaacagtaatgtttctcacgctagtgtagatttatcttaatgctatacaatctaatggtgtaaatggtaaggaatctgttagtgacccttagtataagagcattaaccttggcttagaaaataaatcaagaaagctggtttgatattaagtggaacataatttcctcagtagtctgaaggaaaaagttaaaaagcaactacagattatttttacttctctgttacctacatcaaagattctagtaaacgtcactgtttaatgttagaagtgggttattttcaccttattcatcatatacaatgttttgcatgcagctgccatataatagaaactcaatattatatctactgactcattctatatttaaatttattgttaactaatcattgaactccaagatatgccttagcatagctctagttaggttagtgaggtaaagtggactgtaaacaccttaaaaatcaaggaccacattctagttgtgattctgagtctacactacattttaagttggtctttggtactacataaatggtaagttagtacttgttgtgagactacattatgtagtggtgagaatcttaatatgcagctaggcaaatgagttcaagtcccaactccactacttactggtatattctaatctttstgagctttagtttcctcagctgtaagatgggtatggcaatactttcttaccacgactgttgtgaagattaaatagcattacgcatgtaatgccttgttcacggtgcttgccacggggtaggtaccatggctttttcatcttcctgttgaataaatgaataaatagatgaatgagaacattatacttcctgtttagaaatttattttaaacaaatcacctagtacattaacaattaattgttcttaatttttaatgagaatttattaatagagattatataatatgtataatatgtaacattaaaactaagcaatgaatacagttccaagacttacattaagtcatgcctttgataaacactgcattaacaacttatggagtgatgtagtttggatgttttgccccttcaaaatcctgtgttgaaatgtgacctccaatgttggaggtgggcctagtggtagggtttgggtcttggggactgatcactcatgaatggcttgatacagtctttgtgataatgaatgaattcttactgtatgagttcacatgaaatctgactgtttaagaaagcctggcaccccctcctctctcttgttcccgctttcatcatgagatatgctggctccccctttaccttctgctatgagtaaaagcttcctgggcctcaccagaagccctgcagaatgagccaaataaaccatgagtcaaataaacctcttttctttataaatcacccagcctcaggttatttcctttataacaatgcaaatggacyaacacagggaggcatatacacatacatgtataaatgtatgtatagtaagaaacagatgggtccacttatagcagatgatgagagccatgttgtcaagaagatcataacaattaatgaaaccttaattttagtagttcctacaaatacatattatatttttctaatataatttctatcacatgaacctttgttagttgatttttagttgatttttattttaattctgcttattttatacatgtatttatcctacactgttttaaagttttttgaaaattgataggataaattataaattgataaaaatgaatacaattttgttaaaatttttgtttagtgtgccatgtgaatgctgtgccttagcagggcttagtgctttgggttctgtactggtaggcatcctttgcttatggaaattattgcactgttcttagtagacatttcaagaattcagtagataaaacatcctggaaaacttgagagacttggattgctgacagaaacctccatttcttaactatgtttagttaaaaataattaaaaagttagaatgaaagaaactaacattgaattctcataaactgttagtcaaacagcttctgtggaaaaaaatctttttgattatctatttttcattgaacatggtttaagtaaactgatataattttaagtattagtcaccaaagaacttccaatgtacatgtaagtaaaatgaatatgctcagagctggatagtgatattgtttcagttgatcacactggactggaaaaaaaaagaaagaaaacaaggcagcagggcaatgattgatagacagggcttcacctgtcagaaagggctggaggtgctatttctgagtgagcrttttcaattctagaaagaacttaatgcctgagttcctcctttgaaagtgcctatatagaaatggagtatctggagactgtatgtatgttgtatatgtaatttccatgggcagagagtacacagataacaggaacttctttgaagttaaaatgtactattttttatatgaaagagggtcaggggagggtggtggtatgaggagagggtggtacatttagctcaagctttgtgtcagatcttccagttaacctccttaaatttttattggaaataattacagtgcacgaaggaagggaaacacatctgaatagatcattaaacttcttttttttcattttcagaaggctgtggagcagagcatgtagttcttgatatgaaacacaaaatagagtcttttggattagaatatgtgggacagtaacacatactggaaagatgttaagaagattgaatttatagagaatgtttttaccactaaattgctttgtggccttaggaaagtctgggttttagtctccttacacgtagtttcattttgaaacctaaaagttatatgaaagtctttaattttattatgcagatgtttccccttgacttttcagtgtttttatggctagcaaatgggaatattgatttgtgtacttaaaatactttaatgatcttcagttcatatctgtagactattctgaaacaaggaagggaattgtttcataaaatggtgagctcttggttcaaggagatactcaatcagcagagagacagtcatcaggactgtggtaatggagcttgagttcagggcaatagatttgttatatggtacctgaagcccttgaggttttaggattctaattcttggtattatatttctcttagtgctctctgctaacctattttagtcactaaaaagtacaaagtgaaatagaaaaatgaagactaaagtaacttcttaaagatttccttccaagattgcaaataaggaatttgctccatttatagtagttgctctctcccttactcaaatcatatcagttctgtaagaccagtctctggcctccacttcttcatgaaacccttcttttgtattcctactgttttcgtcttccctatttgcccttagtactcattaacaaatgtggaagcatctgtgcatatagaatatgtaccattcatttagacagttgagtatatcaaactttctcttagttgtaaaagatattgatcctttagtctttcataagtacaggtcatgccacatactgtttcctccctattacctatgatattttaggtactaactcaatgcatatttgttgaattaacttttatacacaacccatgaaaggagccacctatgcacctatgcctcttggaagattacagttaatctccaggaatattcttttatttattgaataatctttcatgaaaaggttttacttgaattttcattcccatttcactggttatagtatgttctcttttttcagaatttctaagtggaatgaaaaatttcatgttgctcacatcgtaccttagattttcttagactttagaactttatctgatccattttgaatgaaaatataatctttcaaaaattagtttctaagacctctcagattcctcttatttcttcttcagcaaaatacaaaagaacattgccttacatagaaattagattagtttgataacaggcataatgcccctactgtaagtgttctgtttgctctccagactaattcttttttttttttttttttttttgagacggagtctcactctgtcgcccaggctggagtgcagtggcgggatctcggctcactgcaagctccgcctcccgggttcacaccattctcctgcctcagcctcccaagtagctgggactacaggcgcccgccactacgcccggctaattttttgtatttttagtagagacggggtttcaccgttttagccgggatgstctcgatctcctgacctcgtgatccgcccgcctcggcctcccaaagtgctgggattacaggcgtgagccaccgcgcccggcctctccagactaattctatgctctactcatggtttaggattttcacctcattgtrctctaaagtcttggatttcctattctagatcagatggcttgtattaagtgtggacctgtcacctattgatcctatttaaaaaattaccaagagcctttaaagtataaacttgtttgctttacctttgggaaaagcaatgtgatgttcatattcgcatgatactttctaaatatatttttagtccattttccccaccaagggttatatgccatattcttgtttatatttaactatattaatatctttgtataatgcctttcaatttataaacactttcataaggatcatagcatataatgatcatagttgccctgtgaactaggcaaggaagttatatcaccttcgttttgtagaagatgaatctgaggcttgaggattttaagagacttgtccaagcggggggctagagctgaaacacaggcatcctgactcctacttctatgctattttcactatacaatgtggtctttggatgagtattaaaaaataaaagacagaattatgctcatggcaactttataataatgtaatattatgttttaaacagagaaatattttaagacatatgtagtattttccacaaaaggtcaaatcttgtatttagaattcctagacatagatttttagataccttttaaatggttgatgcagttaggtacacaaacacagtgaagaagctctgcatttgtcaatgtagacaaacgacaattgaaaatgacaaatggcaacagaaatgtatcaagtgcccattatttgacatgtatctcataattgttcagttacctagccaaagtccagaatgcttcaatggaattgcccttatatgttacttattatgatagcaactaaataaattctaaagggcataaaatgatctattaaataaaaaatgtggtatatatacaccattgtgtatatattccattaacactattcagccataaaaagaatgaaatcctgtcattcacagcaacatggttggaactggaggacactgttaagtgaaataagtcaggaacagacagttaaaaactgcatgttctaagtcatacgtggatgagggactttccaaacatgtcaaggttatgaaagaacaggaaagatggagactgtctttctcacagaattctcacagatctgaggagacaaaagaagatgaccacaaaatgtttcataacatctttgattggaccctgaaacagaataaggacatccattaaaaaagaatggtagaactctaataaagtctggcatttgttaatagtgttctacacaaatattcgtttcttagttttgataaccatacctggttatgtaggatgttaacattagtgatgttaacatttgagaaagctgggyaatagatatacagaaactctctgtatcattatgacaactcttttgtaagtctaaagttatttcaaaataacaagttaaaattttaaaaattctcaaaatgtttaaaatcttttgttatattaagtgtcccagtttgaggtttggaacaaatatcactgtaattatacaaaacattaaaacataaaaaaaagtaaaaagtagaacataggacactagggtctgagaagggtagggggaagaaggtgatagagatttgttaaagggtacaaaattaaagctagaagccttgtttcgtggcatgcgcctgtagtcccagttacttgggaggctgaagtgtgggggtggcttgaacccaggagttcaaggctgcagtgagctatgattgtgctactactccagcctgggtgacagagcaagactgtctcttaaaaaaaaagttacagcaagataggaggaataagttctggtgttctctagcactgtaggatgactataattaacaataatatattatgtagtttcaaactcctagaaggaagaaactgaatgttcccaacacaaagaaatgacaaatgttttagatggtagatatgctaattaccctgctctgatcaccatacattataggcattgaaacatcactatgtactccataaatgtatataattattatatgtcaatgaaaatttttttaaaataagctmtttttatagagaaagaatagttagagcaaaaacatctcagaattcagcaacctgcaaaaaatttaaaacaatttatccccaaatttccagaccctgtactttaaatcagtcgttgaatgttagtgtaaaataattttatttggaaagtattaggatgagaaattcaagtttataatagaaaagtacttcatagaatttccctctagagaaggaaatgctaaactgaaaagacctaggagatttcaactagtccctactcttaacttattctgacaaattttcctattggtgacttctcattctttccttaatatacatcttctttcttctccctgatgctgctacatacacattctactttctagtacagaaggttttctttttaacagcaatctcagaggttaaatctttttaggtctgtttgaaaatctgaatatattacatctactgtggattacataaagtttagcagggtctacattgttactgtaccaaacagaaatccaaactaaagtatgttaaactggttaggatatattcatccctagaggaagagagcacttttatctgtgtactggaatgcaaacatgcctttttcattttaaatataagccaaataatcttgaatttataccacttgcttggatggcgctgagcagattcaaaaggcatcatagctatgggctctaacatatatctttgagctttgatgtgtattgactttctcgtatcaaggctgtaatatctctgaagtgccctggcaggttagttaggaatggcttttcctgcagcaattgagattgttctctgtaattaaactacttttccaagagttcccttaagagggtttccaagatttttcacgatgttagtctctggttgatagctttttagtttgtctcttactctgctatgaaagagggatacttggcttactagtttcttttgtctacgtcctaacttaatatctaaccatagcataacataaagctgaatgtgtgaacagtgggtcaattaaagaagaaagcaccactttttaaatgacattgtccacagagcatcggtgagctrtatgaattagatttgtagtccttacgcacctattctttcatctctaccaaggaggaaatcccagaaatcaactgtttgatgaggacttatttattatttagtattcatcttaattcatgtgagaggatattgactataaggtaggctctattaactgattaacctaagaccaatttccaatcctcttctcttttgccagactccactatgaagtctaaggaagctaagtgtttactagtccagcctcccttgcaggcagtgagggttaagtgactttcctgacctcccttgaaggtagttctgtcccctaaggtgttagattttgctttcctgataaaagacatagatgtggctagtactactgctttctccctgtcttagtccatttggtctgctgtaacaaaatgccacaaactaggtagcttataaacaactggagtttatttttcacagttctggagtttgggaagtttaagatcaaggcactggtatatttggcagctggtgagggcccactttctcatagacagtgccttcctgctctgttctctcaaggtagaaggtaaatgggttccttttggcctcttttataagagcactgatcctattcataagggttccgccttcctgaactaatcacctcccaaaaggtcccaccttctaatatcatcactttgggggttagcctatgagttcttgaagctgttctgttgttggcagccacccttatgaatttgttttcagaaaattaaactaccatttatttcaggttttgttagccagaaggattcctaattaatatatgatagtcattgaccaccttcaatgaagtagagaagaatccttttcattaggacagggtttcttaaccttggcactattgacatttagtgttgaataattattgtgtgagatgtcctctgcattgcaggtttttgttttttttttgagacagagtcttgctctattgcccagggtggagtgctcttggctcactgcaacttctgcctcccgagttgaagcgattctcttgcctcagcttcccgagtagctgggattacagtaacatgccatcacgcccagctaggctaatttttttgtatttttagcagagacagggtttcgccatgttggctaggctggttgtgaactcctgacctcaggtgatctgtccacctcggcttcccaaagtcctgggattacaggcatgagccactgcacccggcccattgcaggtttttaagagcatccctgaccttgactcattgtgatacccaataatttatccagatattgctgaatgttatataggaagagtaggcattatctagttcaactcctgtgtttaccattaaaaacttgtcacatggctagttagtggtagagttaggataagaaactagatcctctgatgtctctgtgctcttctcacaatcatggcaagaccaagcatacactaaaataatttaaataatttgggcaggataataaatagcatcttcaacttttagtatgtcggtgtcaaacatgtcttagggctatgtgcctcctggagttgtatcattaaatgattagtctatttatgtcctaacttaatatctaaatattttcattttggagttgtgttcttaagagatatatatttgtatattaaactaaataagttgtatatttggtgttctataatgtagaattttttgctttaatgaaattattaaaaatagttttaagacaagccaagcaaattttctcttcaagtagcttatgttgactgtttcttctccctgaggccctcttcccttagctaaccatatagattgctgctttacttccttcaagtccctgttcaaaagtcacctcactagacattatttacctgtaacaaaatatctcatgtactccataaatatatacacctaatatgtaccaataaaaattataaattaataaaataaaatgcagtggatttaaagcaaaaaagtctcattagagatacagtatcatatagcccagtataaaagaagtaaatctgatgaataagatcggatgaataagaatatgaataactcttccttatggaaaagttggttaatatttatttatttatttattcgttcattcgtttatccaatttttttattttgaaagatggaaatcttacatacctttcaaggttcaactgatggataatcagagaaacaaaattccagaacagagttgggcaaactacagcccttggaccaaatctggctggctacctgttgttataaataatattttattagaacacagtcacacccacttgtttacttattgtctgtggctgcttttgtaccataaaagcagagttgagtaatcgtgacagagaccatatggccaacaaaccttaaaatatttagtatctggctctttatagaaaaattttgctgaaacctactctagagctgtaaggaaatctagacataatttactacagtggtctgaaagtttttaaaatgtgcacttctatcaaaaaataagttttacaaaagttctaccatttgctaggaaccatttgaggcactggagataaacataaacattacattaaacattacaactaagtgcctgaccccatggggcatagcatgttgttttcaggggagagacagatatataaacagatcagaaaaattatatatgaaatgtacagtgaagtttcccttgacttctctgccctcatctatacaaccccacccatccatcagggtaatcaaaattatgtgtttcttatgtatctttccagagactctttatatatataagaaaacataaatatagattcttattaccccatcattttacagaaaagtaacaactatacaactcctctgtagcttgctttttttcacttaacattgtgggagatctttttcacttaacaagtggagatcttggtgcagagctgagttcaattcctggatatctttgttaactttctgtctcatggatctgtctaatgttgacagttgggtgttaaagtctcccattattgttgtgtgggagtctaagtctctttgtacgtctccaaggacttgctttatgaatctgggtgctcctgtattgggtgcatatatatttaggatagttagctcttcttgttgaatttatccctctacaattatgtaatggccttctttgtctcttttgatctttattgatttaaagtctgttttatcagagactaagattgcaatccctgccttttttttgttttccatttgcttggtagatcttcctccatccctttattttgagctatgcatgtctctgcatgtgagatgggtttcctgaatacagcactctgatgggtcttgactctttatccaatttgccagtctgtgtcttttaattggagcatttagcccatttacatttaaggttaatattgttatgtgtgagtcatcctgtcattattatgttagctggtgattttgcacgttagctgatgcagtttcttcctagcctcgatggtctttacaatttggcatgtttttgcagtggctggtaccggttgttcctttccatgtttagtacttccttcaggaggtcttttagggcaggcctggtggtgacaaaatctctcagcatttgcttgtctataaagtattttatttctccttcacttatgaagcttagtttggctggatatgaaattctgggttgaaaattcttttctttaagaatgttgaatattggcccccagtctcttctggcttgtagagtttctgccgagagatctgctgttagtctgatgggcttccctttgtgggtaacccgacctttctctctggctgcccttaacattttttccttcatttcaactttggtgaatctgacaattatgtgtcttggagttgctcttctcgaggagtatctttgtggtgttctctgtatatcctgaatttgaatgttggcctgccttgctaggttggggaagttctcctggataatatcctgcagagtgttttccaacttggttccattctccctatcactttcaggtacaccaatcagacgtagatttggtcttttcacatagtcccatatttcttggaggctttattcgtttctttttattcttttttctctaaacttctcttcacgcttcatttcataattcaatatggattaaagacttaaatgttagacctaaaaccataaaaaccccagaagaaaacctaggcattaccattcaggacataggcatgggcaaggacttcatgtctaaaamaccaaaagcaatggcaacaaaagccaaaattgacaaatgggatctaattaaactcaagagcttctgcacagcaaaagaaaataccatcagagtgaataggcaacctacagaatgggagaaaatttttgcaatctactcatctgacaaagggctaatatccagaatctacaaagaactcaaacaaatttacaagaaaaaaaaaacaacccatcagcaagtgggcgaaagatatgaacagacacttctcaaaagaagacatttatgcagccaacagacagatgaaaaaatgctcatcatcactggccatcagacaaatgcaaatcaaaaccacaatgagataccatctcacaccagttagaatggcaatcattaaaaagtcaggaaacagcaggtgctggagaggatgtggagaaataggaacacttttatactgtaggtcagactgtaaactagttgaaccattgtggaagacagtgtggtgattcttcagggatctagaactagaaataccatttgacccagccatcccattactgggtatatacccaaaggattataaatcatgctgctataaagacacatgcacacatatgtttattgcagcactattcacaatagcaaagacttggaaccaacccagatgtccatcaatgatagactggattaagaaaatgtggcacatatacaccatggaatactatgacaccataagaaagatgagttcatgtcctttgcagggacatcgatgatgctggaaactatcattctcagcaaactattgcaaggacaagaaaccaaacaccacatgttctcactcattggtgggaattgaacaatgagaacacatggacacaggaaggggaacatcacacactggggcctgttgtgggatggggggaggggggagggatagcattaggagatatacctaatgtaaatgacgagttaatgggtgcagcacaccaacatggcacatgtatacatatgtaacaaacctgcacattatgcacatgtaccctagaacttaaagtataatagaaaaaaaatatgtatatataaaaagaaaaatgggaagaaaaaaaggaacaatttcttgctgtaaaacttcctcttggccgggcgcggtggctcacgcctgtaatcccagcactttgggaggccgaggcgggcggatcaagaggtcaggagatcgagaccatccaggctaaaacggtgaaaccccgtctctactaaaaatacaaaaaattagccgggcgtagcggcgggcgcctgtagtcccagctacttgggaggctgaggcaggagaatggcgtgaacccgggaggcggagcttgcagtgagccgagatcccgccactgcactccagcctgggcgacagagcgagactctgtctcaaaaaaaaaaaaaarcaaaaaaaacttcctcttaacatgtataggattatatttaatgtaatgcaaacaagtttcttttcatctgttttttctctgaaatagtgattagttgaaaacattatatgtacatatacacacaaatacagagttctccttatccacagaaaatatgtcatatgtcacattaaagagcaaatataccaaatagtgagttattatgcctttgataagtagaaaatcttactaaacagagtttagttataaggaaccatgaagggaaattaacaatatgcattcctaacctacagatgtaaaatgtataaccaggacccccaaattatgaaactatactattgtaagatttcttagctatttgtcgttattcgcatgcaaacacatgcctgcaagtacttgtaaactgtcaaataaaccatgatcaaatttagaaaaatacttcagatttttcaaatttacctagaaataaaatacatggtaaaagcagagtatagataattacccagttacctgtcacttcaaataaacaaaatatcagaaataaattatatatcaaaatgaattgatgtgagtcacatacacaaattttgtgaaaaaagtaaaatgatgaaacctgaataaaaaaaaatcaagtggagatctttccacatcagcatatagagatctgccttattttttgtaacagctttatagtattcaattatatagacataccaaaatttgtttgaccagtcctttattgatggacattttaatgattttcaatcttttgccattacacagaataatgtaagtaataactatatatatacacacatacatacatatatacatacatacacttaagtatgtagacacacctacacatgcatatatacaacttcataggcatgcaagtgttatttgtaggataaattctcagaagtgaaagtttggggttaaagggcatatgcatttgtaatttgtacagatattgccaaagtgtcctccaaaatggtggtactaatttacattctcatggtgtatgagaatacctgcatgctgaagcctaactaacagtgtctttaactttggttatttttctaagctgataggcaaaagatattatctagtgttattttaatttgcattttttattagaaaggttaagcatctttatctgtacatatgcatatttgttcacattctttacccattttcttttgagttactggacttcttttgcttactgatttttaggagcttttaaaatattgagtagattaactctttgtaatatgacttgcaattacactttttccagattgttgtcttttgaatttgcttatggtgtattttcrccatggagaagattttaattgttgtcagatttatacatttttttcttttattgactcagtcatagttagctcgcaggcccaaggttgaaaaggaattatcacatggttgcactttctacaagcaaatctttgatctatttagaatatatgcatctggaatataatgatataatgtgaggtatggattcaatcttatttaattttttctggatgtttatccagtttttccaagagcaagtcttgaccagcaagtctcctaacttgtttgagatatcacttttttcacagaatgcattcgtttatgtatttgaatctatttttggatttttaattcttcctattcatcttacagcatcagtattttaattaccaaggctttaaaaatagatttattgaggtttaatatatgtaatgcattatacatacatattttagtgacagggttttgctgtgttgcccaggctaccttctagcttttaggctcaaaagatccccctgcttcagcccctaaagtagagtgcatacattttaagtgtacaatttgatgagttttgaaatatgtcgatggtgaaaccatcaccatagtcaagatagtaaatgtaccaatctctccctaaagttttctcttgcccgtctgcaatgtttcccttttctgcctcctgtgtctctcttcctcctctccacaggtaaccactgatctgctttatgtcactgtagattaattcacatttctggaattttatagacatggaattatataacatgtgctctttttatgtagctttttttcactcagcataattattttgagattcatccatcatgttgtgtttatcagtagttttaaatattgtgaaatagtattccattgtatggataccattattcgtttatttatttagctgctgatagatgcttgggttgtttccagttttaggctattacgagtacaactgtcatgaacattcatgtatttaagtttttgtgtaaagagacattttgatttatcttgagcaaatatctaggagtgcagtggcttagtcacatggtagatgtatttttacacttttaagaaatcatcaaactgttttccaaaggagttgtgccattttacattcccactatctgtgtatgagagtttcagtggtccacatccttgccaatagtctttttatggtcagccttttaaatttcagccattctagtgagcatgtagaactatctcaatttggttttaacttctatttccttaataactaatgatgttaaacatctcacgtgcttatttgccatctctacatcttctttggtgagatgcctgttaggttcaatcttttgtttgtccttctatcaagttgtaaaacttctttaaatattctaggtataagtcctttgtgggacatttatttttcgaatattttctccyattccgtggtgtactttttcattcattttttttggagctctgtaagcccttttcccaccagcttctgttttagattcaaggggtacatgcgcaggttttttacaagggtgtgttgtgtgatgctgagatttgggatacaattaarcctatcacccacatactgagcatagtacccaatgattagtttttcaacactttcctttctccctttttccgcactcttgttgtcaccatttttatgcccatgtgcatccaatgtttagctcccacttataagcaagaacatacagtatgtggttttctgtttctgcattagttcacttaggatattggcttccagctgcagccatattggtgcaaaaaacaagacttcgttattttttatgggcatactgtattcgacattttctttatccagttcacttttgacgggcacctaggttgattccatgtctttgctattgtgaatagtgctgtgatgaagatctgggtgtgtgtgtctttttggttgaatgaataattgtcctttggatatatccctagtattgggattgctgttcgcatggtaattctatttttagtactttgataaatctccaaactgtgtttcacagtggctaaactaattgacattcccacaaacagtttataggcatttacttttctctgtagccttcaccaacatctgttttttttttgactttttattaatagacattctgacttgtgtaagatgggatctcatrgttttgattaatgatgttgaatatttttttcgtatgtttggtggccacttgtatgtcttcttttgagaaatgtctgttaatgttctttgtccactttttaatggggttatttgtttttygcttgttgaattttctaagttccttatagagtctggattttagaccattgttggatacctagtttgtgaatattatcaccaactctgtaggttgtctttttattctgttgatagtttcttttgctttgcagaagcactttagtttaattaggtcccactttttcatttttgttgcaattgcaggacttagccataaattcttttccaaggctgatgtctaaaaaggcatttcctagcttttcttctagaatatttttagttttaggttttgcatttaagtctgcaatccacctttttttttaaactttttgaaaatttttaacctaaacaacaaatttatttctcacagttttagaggatagtttaatccatcttgagttaatgtttgtatgtagttagaggtaggggtccagttttattcttctgcatatggatagccagttatctcagcatcatttattgaatagggagtagagagttctttccccattgtatgttttcatcaactttgtcaaagagcagatggttgtaggtgtgtggccttatttctgttctctattctgtcccattaatctatgtgtctttttttttttcctttggacgaagttttgctcttgtcacccaggctggagtgcagtggcaggattcctgctcactgcaacctccgcctcccaggttcaagcaattctcctgcctcaccctcccaagtagctgggattggaggcatgtgccaccactcctggctgatttttgtatttttagtagagacggggtttcaccatgttggccaggctggcctcgaactcctgacctcaggtgactatgtgtctatttttttttctgaatgtcagtgaatttcttttattttattttattttttatactttaagttctaggatacatgtgcacaagatgcagatttgttacataggtatacatgtgccatgttggtttgctgcacccatcaacttgtcatttacattaggcatttctcctaatgctgtccttccctcagccccccaacccccgacaggccctggtgtgtgtgatgttccctgccttgtgtccatgtgttctcattgttcaacacccatctatgagtgagaacatgaagtgtttggttttctgtccttgtgatagttgacttagaatgatggtttccagcttcatccatgtccctgcaaaggacatgaacttagtattccatggtgtatatgtgccacattttcttaatccagtctatcattgttggacatttgggttgggtccaagtctttgctattgtgaatagtgccgcaataaacatacgtgtgcatgcatctttatagtagcatgatttataatcctttgggtatatacccagtaatgggatggctgggtcaaatggtatttctagttctaggtccttgaggaattgccacactgtcttccacaatagttgaactaatttacactcccatcaacagtgtaaaagcgttcctatttcttcacatcctctccagcatctgttgtttcctgactttttaatgattgccattctaactggcrtgagatggtatctcatcatagttttgatttgcatttctctgatgaccagtgatgatgagcattttttcatgtgtctgttggctgcataaatgtcttcttttgagaaaagtctgttcatatcctttgcccactttttgatggggttgtttgtttttttcttgtaaatttgtttaagttctttttagattctggatattagccctttgtcacatgggtagattgcaaaatgtttctccctttatgtgggttgcctgttcactctgatggtattttcttttgctgtgcagaagctctttagtttaattagatcccatttgtctattttggcttttgttgtcattgcttttggtgttttagtcatgaaggctttgcccatgcctatgtcctgaatggtattgcctaggttttcttctagggtttttatggtgttaggtcttacatttaagtctgtgctccatcttgagttatttttttgtataagatataaggaagggatcctgtttcagctttctacatatggttcgccagttttcccagcaccatttattaaataggaaatcctttccccatttcttgtttttgtcaggtttgtcaaagattagatagttgtagatgtgtggtattatttctgaggcctctgttctgttgcattggtctatgcttctgttttggtaccagtaccatgctgttttggttactgtagccttgtagtatagtttgatgtcaggtagtgtgatgcctccaactttgttctttttgcttaggattgtcttggctatgtgggctcttttttggttccatatgaattttaaagtaggtttttccaattctatgaagaaagtcagtggtagcttgatgggtatggcattgaatgtataaattaccttgggcagtatggccattttcatgattttgattcttcctatccatgagcatggaatgtttttccatttgcttgtgtcctcttttattttgttgggcagtggtttgtagttctccttgaagagggccttcacatcacttttaagttggattcctagattttattctctttgtagtaattgtgaatgggagttcactcatgatttggctctctgtttgtctgctattggtgtataggaatgcttgtgatttttgtacattggttttgtatcctgagactttgctgaagtatcctaattgaataccctttatttctttctcctgcctaattgccctggccaggacttccaacactacattgaataggagtggtgagagagggcatccttgtcttgtgccaattttcaaagggaatgcttccagtttttgccattcagtatgatattggctgtgggtttgtcataaatagctcttattatgagatacattccatcaatacctagtttattgagagtttttgacataaaaggctgttgaattttgttgaaggccttttctgcatctattgagataatcatgtggtttttgtcattggtactgtttatgtgatggattacgtttattgatttgcatatgttgaaccagccttgcatcccagagatgaagccgacttgatcatggtggataagctttttgatgtgctgctggattgggtttgtcagtattttattgaggacttttgcattgatgttcatcaggcatattggcctaaaattctcttcttttgttgtgtctctgccaggctttggtatcaggatgatgctgcctcataaaatgagtttgggaggattccctcttttttctattggttggaaattgtttcagaaggaatggtaccaactcttctttgtacctctggaagagtttggctgtgaatatgtctggtcctggactgttcttgattggtaggctattaattattgcctcaatttcagaacctgttattgstgtagtcagagattcaacttcttcctggtttagtcttgggagagtgtatgtgtccaggaatttatccattttttctagattttctagtttatttgcgtagaagtgtttatggtattctctgatggtagtttctatttctgtgggattggtggtgatattccctttattattatattatttttattgcatctatttgttcttctctcttttcttctttattagtcttgctagcagtctatctattttgttgatctttttgaaaaaaccagctcctggattcattgattttttgaagagtttttttgtgtgtgtgtgtgtctctttctttttcagttctgctctgatcttagttatttcttgccttctgctagcttttgaatttgtctatttttatactggtactatgttgtttgtttactgtagccttgtagtatagtttgaatttatgtagtgtgatgcctctggttttgttctttttgcttaggattgctttggctatttgggctcttttttggttttatatgagtttcagaaattttttttctaattctgtgaaaaacggtggtagtttgataggaatagcattgaatgtgtagattgctttgggcaatatggccattttagtgatattgattctttctgtcaataagcagggaattatttttatttttattttgtgtcatctctggtttctttgaaacagtgttttgtagatctccttgtagagatcttttacctccttggttagatgaattcttaggtcttttatttttgtgtgtggatattgtattaataaataggattgtgttcttgatttggatgtcagcttgagtgttattggtgtatagaaatgttattgattttaatacgttgattttgtattctgaaactttgctgaagttgtttatctgttctagaaaccttttggcagagacttcagggttttctaagtatagaatcatatcatctctgaagagagagagtttgattttttttttttctatttgaatgccttttatttctttttcttgcctgaatgttctagctagaacttccagtactgtgttgaaaatgagtagtgagagtgggcatctttttcttgttccagttcttaagggggaatgcttccagcttttgctcattcagtatgatgttggctgtgggtttgtcatagatggctattattattttgagatatgctcgttaggttttttaacatgaagggattttggattttggcaaaatcttcttttgcatctattaagatgatatatggttttgtttttaattctgtttatatggtaaatcacatttattgatttgcatatattgaatcactgttgcattattggagtgaagctcacttgatcatggtgaaataactttttgatgtgctgctgaattcggtttgctagtattttgctggggatttttgcatccatgttcattagggatgttggcctgtagttttcttttttcatcctgtctttgtcaggttttggtattatgatgatgttgctggctttgaacaatgagttagggagaagtttctcctcctctgttttttcgagcagtttcagcaggattggtagcagctcttttttgtatccctggtagaattcagctgtaaatccatctggttcagggcttttattggttggtagaatttttattattgattcaactttggaacttgttattgatcaggtcagagttttaatttcttcctgtttcaatcttgggaagttgtgtgtttccaggaatgtattcatttcctctagattttctagtttgtgtgcatagatagtgttcataatagtttctgaggatcttttgtatttctatgaaattggttataatgtcaccattgtcatttttttattgtgtttattggatcttcttccttttttctttgtttctgactagcagtgtatggatcttgtttattgtttcaaagaccaacttttggttttgttgatgctttttgtggattttcacttttcaattccattcagttttgctctgattttagatatttatattttctgttagctttgaattagtttcttcttgttttttctagttcccatagttgcaatgttagattgttaatttgagatctttctgactttttgatgtaggcatattgcactctaaactttcctcttaatgctgcttttgctgcatcccacagattttggtatgttgtatctctgttttcattaatttcaaataattttctattttttgccttgattttgctgtttacccaaaagtcatccaggaacaagttgtctaattttaatgtaattgtgtggttttgggatgtttaattgttattgatttgtttttattgcattgtggtccaagagtatggttggtatgtttcattctttaaagttatttgagacttgctttatggctgagcatgtgatcagtcttgcagtatgttctgtgtgcagatgagaagaatgtatattctgtggttgatgagtggagtattctgtagatgtttattagatccagttggtcaagtgtcaaatataagtccataatttctttgttagagttctgcctcagtgatctgtctaatgctgtcagtggtgtgttgaagtcctcctctattatgtgactatctaagtctttttgtaggtctataggcagttgtgttctgaatctgggtgctctgatgttgggtgcagagatattttagatagttaagtcttcttgttgaattgaacactttatcattatgtaatacccttctttgttcttttttttttttactgtagatggtttaaagtctgttttatcttatgaaagaatatcaatcactgctcttttttgttttccatttatgtgatagactgatatagtttggatatgtgttcctatccaaatctcatgtcgaattgtaatcctcagtgttggaggtgtggcctggtgagtggagactggatcatgggggtggatttctcatgaatggtttagtaccattcccttggtactgtctttgcaatagtgagtgagttatcatgagatcgattgtttaaaagtatgtagcacctccccctctctgctcttgctcctgccatataagatgcctgctccctctttgccttccaccatgattggaagctccctgagacctccccagaagcagaagctgctatgcttcccgtatagtctgtagaactgtaagtcaattaaacctcttttatttataaattacccagtctcaggtattctttatagcaatgtgaaaactgactaatacatagatgcttctccatccctttactttgcccctatggctgttatgtgtgattggtctcttgaagagagaagacatttggttcttgttttttttttttttttttcctgcttgctctctatgccttttagatggggcatctatatcatttacattcaagattaatattgatatgtgaggttttgawccagtcatgatattattagcttgtagctttgtattctcaattgcattgtttctttatagggtctgtgggctctgtacttacatatgtttttatggtagcaggtgttgttctttcttttttatgtttagggctcccttaaagatctcatttatagctgggctagtggtaataaattcccttagtgtttgcttgtccagaaaagattttatttctcctgtactatgaagcttagtttggtggggtttgaaattcttgattggaatttcatttctttagggatgccraaaataggctcccaattttttcttgcttgaaaagtagaaacctactgagaagtctgctgttagcctgctggggttgccttttgaagtaatctgacccttttttctagctacctttttgatttttccttctttgttgacttagaaaagtctgattacaaaatgccttcagaatgatcttcttgtttagcatttcatgagggttctctgagtttcttgggattgcatgttgacttctctagtgagacttgggaaattttcctggactaggtactcaaatatgtttcaaagtttcttactctcctctctcaagaaagccaatgagtcatagatttggtctctacataatcccatatttctttgaggctttaaaaggttcatcaaaaaatttttttctttatttttgtctgactaagctctgaaattctttcctcaggttggtctagtctgttattgaagcttccaactgtattttgaaatttctgcagtaaaattttcaattctataagttcagtttggttctttcttaaaatgactatgtcatctttcaactcttagatcgttttacttgcttccttggattggctttcaactttttcttgaatctcatcgagcttcctacccatccagattctgaattctatgtctgtcatttccacattttaatctagttagggtgtattgctgggtaggtagtgtgatcttttgaaggtaaggaaacactctgacttttttaattaccagagtcattgtactgatttcttctcacctgagagggctagtgtttctttgtttctttctttttttttttttttaaagttatgtcatttgaatgggcctttttgtttttgtacttttttcacttgagggtttgactgtatatagtcaattggtcctttttctaggtgctttcagagaaccaaggctctgtatgggttccttcgttgtgattagttttgctgcattgggtttcacaggtgatgcatatttatggaatttatttatgttttcgtggtgtcatctaggctgcattctattagatggtgcttaagagtaagggctagcagataggatcttgctcagccatgcatgtctcttatatttcattctgttcacagcagtgttctggggaggagaagacgagggggtgggtgcaagtgatgacccccttaccaaatccattctggggccttgggggagacctctttaatcactgttgcagtgcctgcatttccttagccccaagggggtccctggtgggctgcacctccttctcttttgggggaagcctgagctgaaggtcagttgtaaggagacttacaactctctgacgacccactggtcctctgtgcctggcaagagtcagaatgggttgtggggtatgtctatgggtggtctgttgatgtagtaggtcaagtgtagaagatacctgggcagggtatccttgtagctaggactcctgaggtccccagaattccttaactcaccccttctttagggcctttgcaggactaggagcttgttctggcactcagggactctatgtaggcttcctagcttcctccttcttcaaactgggtgtctgtggttcttttttgtcaacttttaatgttttctctcaaaagatctgtgcaaagtgtgatggtttaccccatattttgttttttccttggtgagacagatgtttcctggctgtgtctagttggccatctggtccaagatccccttttcatttttgtaatagtgtcttttgagaagcaaaatgttttagtgttgatgaagtccagttcagttttcttttatagtttcgtgccctgcttaaaatatctttgccagacccaacatcactaagattttcttctatgttttcttctaggagttaaagtattaactctaaaatttaacaggtctgtgacccattttgaattaatttttgtgtatcatgaggtaagtgtggagatttttttttgcatatggttagtcattcttccagcatggcttattgaaaatattatccttttctcatcaaattgctttgctcttttgttgaaaattaattattcatatatatccaggtttatttctggactctgtattttgctccattaatttatatgtctatattcaacccaaaaatgtgttgcggtgattactgaggctttatgttgaattctgaagtcagacagttcaagttcttggacttttaaaattaattttttagcattgttttggctcttctttttttctcatttaatgtatggtggtgctcataccctcacccctttattgttctttgtaatagcttcccttgctattcttgcatgcttactatttataagaactttggggtcagctactttgttcaaaaataaaagaataacatcaaaagtcccccaaaccaactgttgtatttttattatgatggttttatatttataaattatcttaagaagaattgacatatttatgatgtygtgtttttctagctgatgtaatttcattttctgaagtcttcttttgtgttttcagttgtgttgttaggttttcttcctatagatcttacatactttctattaagtttactctagtgtcttttctgctatcgtaaatggcatattttattgaatatatgaagccttgtgctttctctgtattaatatgcatcatgatattgtagtaaattctcatattgtttatagtatttttttcagttgattctcttgggttttccagatatattttatcttctgggagatataacatyatgtttgatgtaaattaaatgatccacaattgagaaaatagtgttgatacaatgagagagaagaggaagagagtaatgcatttcagacagtgaggagagttaaaagttaggatacatgtggagaggttttcttagataagagcttggatagtttacactagtgggtgtatgaatgctaggctgctagatatggtggtgtatatctgtgaatatgtttcatctattatagtgaggatggtagagaaaatgttggaggtttgaggaaagagacgttaaacggttgtgtaggagaatgaattgactgcagaaatgcataaaagatcactgggaggaactgaagccccattgaagattatcattatgaatttaaagtgaaaccagtaaggatggtgtgtaatcctctcagcccatgtttagatatttgggttcaagtgggtggaaagctgtatttagtcaaagtataagttttaccaggttgattaaacaagggaagagagggccaccagggagctgattgtaatgatggaccatggaatctaagctaagtaaggaggcaatgtaactagaacagaaggaggtaaaatacagcaaaaagttgattaaggattgttatcaaagaatgagagggcgtgagctggaaaaatgggaagtaatattttggaactggatacttggagttgaggtcatggagggctgctgttattgataataaaaaagaggtccagatcaccatgaaatggctgaggacaagctcattgaagtttacaatttaaggatctgaggattgagggtactgggagattcagttatgtggaaatgacagatgcaaatgataaaatcataatcaaaatcttgtagcagttatagaaactgaagttaactgcagccagtagtagtaaaagttgtctaatttgatggcatgagttgcaaggctggatttttggagggaggtagaagggacacagttttctacaatgatgaggaagtaggacagtgatagttggaatatgagagagaaaatagccatcatttgtggaccctacaggggaagagagtccttggggaataactggcttttatttacagcaaagaggtggaggcagtattcaggaggagatagaacatgagggactttatgttctccagaggacatagtgtaatgggctctgaacttgggaagacagggtgaaattaaggatgcatagaccagagacctagtagtgagggaaaacccaggaactttgggtttcctgtggtgataaagaggttgatggaatttctcttgatggtctttaaagttgtaaggctatgagtgttgtggagacagatatagaactttgatactctctaactcctgtagatgatggtgtggaggctgggagaagggcagtgtgacttggagaataaggtctgggattccctcttcactatgaattatgcatatgtactactgacctaatacagattgtacacagtgcaatatataaagggaagaatgggataaaggtgaagtaatcaacatttttaaacggtttgaaaacgatgatagctttgtattatcattgcataatatctcaaggcattctatatacttaaagctaccttgacttttaatgatggtggatgaatgttcatattttaatattatgaaaaggtttttttttttgcttgacttcttgtcaggctgatttactcaggaatgatgaagaactcaccgcaggagcagaagttacagctccacctttttttttgtgcttacattatttgtatagccaccaattattatcaatcatcaattatttgtgtaatcataaattccatgattctttgcaagaatttttttctttcttttttgttttgtagggttagtttaaataaaactaggtaatgtattcagtaaatccactactcgtggctacacacagtatggtactttgcaacctgatgaaagctaggagatgagtgagtgtttcaccaacaactacttccttctgcctatctcatgaaatctgcctgtcttgtttacatttgatatagggacagggaatggggtcagtgtaatttctttttaaaatatcaataaagtttaatttctttctgtttttgataaaaataagtacaagtagaagttctgatattttcttctcacatcacaatgacataccccactttgacaaccattgacaaagtggtggtgttattgttaataagaaaacaaataaataaatcaatgttaatcttaaactatcatttggacaatagcaaagtattaatttggaagggattaaatttttttctatggtaggtttatgggtctagaattttcatggtcttgcattatcacctacacataggtgtaggaaacccttcattccttttcaaataagaaatagataccctaggttgttattagcaaagttttcagggaaagctcatatcgtcacccaaatttaaaatgtttgctttattgtaagaccagcaattaaatgggacctacccattgttgttagtattcaaatacagttttaaagaaaaaccataacttttttgctgcacatacttttccaagcctacttttgtaagatttttccttattaatatggatacttttgcttggatgcaattgcattccctagatatattgtttgtttcataagtaacatagtttgtgagtattaattagattgtagaataaatctattgtttattgctgaaggggccttttggcttcctaccaccggaaaacctttaaatctacagcaatgagattttttagtatctcttctctttctagttttattctcctctttaaaaaataaaaaatgtaaatgaataattcaagttacaaacatacatacaaatgggtaattcagccaagatatttgcagcatttatccttgcaagttgaaggtacttatcactttagttgctaggtgctcagacaaaggatgttaaaaataataaactcagcaataaatttttcttaatctgagatctgcagcaaccttgtagggttattttggagaatgtaagatgctacacaggcagttggtcaatttatctcccaggccccttggctaacccagctgggtagatcatgtcttttgtcttccttgttttatactgtgcattaactagctcttaaagcaggtatccaatgctcagaaagcaagacttttgtaatgttcctagtaatgagaaatgtttgttttagaaagctagccttgtgccaattgttaatgttagaagtttggaggagagtcagaattgggaccaagaatggaggcggagtgggctgctgtttgaaagatttaactgaaaatgcaaggactgcaatttacctttcaaacctgaagttcggtctcttcattagagacattgcagcttcattggtggcagtggctgagacttatttttccaatgaaaataccttcctcttcattccagtctttagtgatgactcttggtaaattcctgtggaaatcgttacattcatccgttcactcacacattcatctacttatttaacaaatatttattgagttctgtgcactgtccttgatgctgmaactatttttaaaaatcatggtacctgacctcaagcatcataaagcttatcccatcatcatactcctttcatttttggcacctaagaagtgactttaatcatttaatgtatatatcttgttttctcagctccttgtaacaattctcagttgttgaaaatgatgatttgcttgtcaagggaggcattctaagtaaacatcaaatttaactattgaattactagcaatctttatgtaacgtgcataacaggatgagttcaatggtacttttaaaacacaataataaattgtgaaatgctgcactgaattaaagtttagggagttcttgcagttactataatgcagaggttgttgcccagctgtaaagttgaataccttggagatgtgctgcttcttctctctctctttttgtagttcatgccccacagtagaccaatgaaaacagagtctcagagtggtgcccccgaattttagcatgcagtgggattgagaatcagtcttgtatggcacctaatctcaagaataattatgcaaagtagcagttcctatcatctacattttgtggaagtgaacactgacattcagacaggtgaatatgttgtctaaagctacagagctagtaagtggcggaagcaggatctgagcccagatcttctagctataaaacctttcccattttggaaacgtagtgctggccctcaaagatgtgacacttaggttttccttcccactgttttgcttttaacattttctaatgatttattttctgctagttggccattgtgtacatacctggaattaatatctgtgatggatagaataaaaaggatgaaggaaaaaagatgctactttctgtgacggatagaatggaaaggatagaaagaagagaggaaagaaagtgctactgggttcttctctgttagggctagtagtttcagggaagggcttgaagacacaggagatagtaggagttccattatttcggaatgcttacttttacttgtttaatccgttgtgagagtactggagcaatagttacatttcgtagtaacagtgaattggaattatgtgttagatatgatcactgctaacatacaggaaaaatggaacattcatacctttctatcttaattttaagtagtgtagttagccacagtgaattagcatgaggcatgagaccttttttttttattcttttgcataaagggatcttaggtttcagtaaggaataatactacttggaacttttccactttctggaaagggagactttagattattattcctttgtcctgtgggaatttcatcacctggaggattatttcaagtcaaggaataaatacatcagcacaggtatgccttgctcagtgttttcaaaactgtcatggaagatggtggtggtaaatataaaaggaatggcctcttcaaatcatgcagctttctatttgttcctgttagcattttaatcatctgaaggcagatttagggrgtcctaggatctggttgatgtgctttttgttagaactcagacaatcactttttcccctggttgtccccgtacccgatcacacttctatcatcacacttagattattgtatggaagtatatttgtttattacttgtctctatcccctgctagtttgtgcaatctttaaaggcaaatattgtgttattttcagtttgtttacctaatgcctagcacagtgcttggcatatattaaatgcttaatacatgtttggtgaattaaattgcatttgtcttttgatgatcattttcaggaaatggaatgttaagcctgacttctggttaatattaaattattttctctaacagagtatgtcagagtgtttcagagagtgcattaaaatcccagcagttatcttcccaggccaccacttttcctcttgttaggaaacagtatttatcatagtaaatagcccatttgaggtggttcattcaggctttagtaccaaatttaacataacaggaagtcacaaattcccttttggccagaaaggagtttgacagcttctctcagaaaaataactttgcattaatttactctgctttattcatgaaaggtataaaaatctataaacattttatagctattcagaggtggtaaacaacacgctggccaactacttatgcttttaataggcatgttttatgccttgtatataatttttaaaaaattatagcttggttttttgtttaaatactcagttacattatcttttttgtagatggtgctttgtgaaatgtttcgtggtttataacatttagaatatgtgaaacttttgctgtatgctttcttgtagaagagatttttttatttgaaagtgtagttttaattcatatacagtaaaattgacttttttggtgtatatttctatgagttttggaaaataggtagagttatgtaacccattaccacagttaagataaagaacaatttcaatatacctcctctaatattctcttatcttctccctttgaagtcaaatcttccccatacctttaacacctgacacccactcatctgttttgcctattccagaatgttatatgaatgagtggaatcatactatatctagccttttgagtctgacttctttcacttagcataaagcatttgagattcatccctttgttgcatgtatcaatagtttatttatctttattgttggatactatttcacactatgggygtatcaccatttttaaaaacacatgtctatttgaggggaatgcaggttatttacagcttttggtaattatgaataatgcatatatatatatatatatatatacacatacttttttcacatacagattttttttttgtatgaatagaggttttcacttgggtaaatacctagaagtaggatttttgggtaatatgctaaatatatgtttaactttataagaaactggaaaactgtttttcacaggactatgccattttctattctcatcagcaacctatgagagctccagttgctttacatcctcaccagcatctggcattgtttgttttatttagtcattctattaggcaaatagtggtgtaaagatgtttctcagtcatctttgggtaattttctttgttgttggtggtgggttttttattacataatttttttttttttttttactaaccatttggtcatcattcacacagatctttatggttataatcttaaaaacttaagtttagtgctggtattccaagctactgctttagtccatttattaaggaaacacactagtgctatgagaaagtataaatattattgtggattaggactgaacttttactaattaacattaaatgaaagcaacaagtttcccctcctccaactatctttctctcctatacattgtccccagcaatccagtctttctataatggtgctttcttcataccaacatttgttcatgaccctttactgattctctcacaaccatggtatggtctagtagttaagggcagagactctgacattcactaggcatggttttattctcagctctgccacacgctagctgagtgaccttgacagattaatatagctaaacctcagtttgtcattttcaaataggtcatgataagacctaaataaaacattttgcacaagtggtcagggctcaatacatgcccgaaattggtaattaaattaccatctgcaacaggactcatcttatttgactagccttgtctgtcacagttcatcatcacaaatcttctgacataattaagctgatatactgagtgccctgataccttaccttaatcctcctgtgtaggggttcccacttaagtgtgattaatccatgtctgagtatgagtgttgaacaactgtgtaggtcataaggagttgctttgcctgggagctctaggctgaggttggaggaaatcaattagcaaagcctactggaagataacctggaatagccattacagcatgcttctttgtcattttattttttatgttattttattgttgtaaaacatttaatatgagatctactttcaacaaattttttaagtgtgcaatatagtattgataactataggtacaatgttgtacagcagatctctagaacttatttatcttgattaattgaaactttactccccttgattatcaacttccctttttcttctcccttgagtccctggcaatcaccattccattctttgagtctatgaatttaactattttcgatacttcatataggtggaatcatgcagtatttgtcctttgatgactggcttttttcacttagcacaatttcctcagtcatctctggtgtcayatattgcagaatttccttctttttaaaggctgaataatattccattgtatatagatacaacattttctttattcattcatttgttgatggacatttagattgtttccacattttagctattgtagatagtgctgcaatgaacctgggaatgctaattgctctttgaagtcctgatctcagttcttttggataaatacccagagtgggactgctgaatcatatggtagttctatttttaatttttaaaraaacttcatgttgttttccatagcggccataccattttgcatttccactgacagtgtgcaaaggttccagtttctccatatccttgacaacacttatctttcatctttttgataatagccattctaacaggtgtgagatgatatctcattgtggttgtgatttgtatttccttgatgattaatgatgttgcgtatattttcacatagatactgtgacatagtctgttcaagtttttttgccccatttaaaaaattgggttattagtctttttgctgttgagttgtgggagttccttatatattttaggaattatctccttatcagatatatggtgatatggtttggatgttttgtcccctccaaatctcacgttgaaatgtgacctccaatgttggaggtgagcctaatgggaggtgtttgggtcatggggaaagatcccttatgaaaatcttggtgctgtccttgcagtaacaagtgggttctcattctgtgaattcatgtgcgatctggttgtttaaaagtgccgggcacctcctccctctgtctcttgctctctctcttatcatgtgaaacgcaggctccccctttcccttccaccattgttggaagcttcttgaggccctcactgggagcagatrctggtgccacgctttgtgtacagcctgcagaacagtgggccaaaataagcctcttttctttataaattaccctgtctcaggtattcctttatggcaatgcagaatggactaayacatatggtttgtaaacattttttcctattctgtaggttgcgttttcaccctgtcaatygtttcctttgctgtgcagaagctttctcctttgatgtgggctcatttgtttatttttgcttttgttgcttgtgtttttgatgagatattcatgaaatcactgccaagaccaaggtcatgaagattttccactatgttttcttctagaagttttatagtttcaggtcttatgtttgtctttaatctactttgagttgaatgttatgtatggtgtaagggttcaatttcrtgtttttgcatatggatatgagtttttacaccatttgttgaagagactatcctttccccattgtgtatttttggcacccttgttgaagatcagttgacctttggcatgctgcttgttttttatattgacgtttctggtttggtgaagcagagtacaggtagtgctgaaggagttgttttcatgagtgtagtgttggtgtttagttgaaaaaacaaatgccacagaatgtggaagagaagcctccattgtatttggtttttgtgttttttttttttttttttcaggaaaacactaaattttactttctatctgatgcatcatataaattcttttctatgagtagtctcttgagtggattctcttgattaaaaaaaccagatttttctggatacacctcaaaacctaaattacctttgtacactaacatttactaaaaaattgataagagcaacatgttaaatattgaaactaagagtactcaactttactatccatcctaactttcaaagaatttacttctgagttcagcagactcaaattctacaaggatacagtttgtttcattcatcaacatatatccagcacctaacatagtagtacacggcacagagtgggtgttcagcaaatatttgtcaatgattgaacgaatttttttaccagaaagtgaaaaaagtgactttaaataatggcaagagaatactgtttcattatgcaacaataggagcttttgtaaaaattctgggattactggctgggtacagtgtctcatgcctgtaatcccagcactttgggaggctgaggtgggaaaatggctttgagctcaggagttccagaccagcctgggcaacatggtgaaaccccatctctacaaaaaacaaaacaaaacaaaacccaaattagctgggcattggtggctcatgcccatagtcccagctacttgggaggctgaggctagagaatcgcttgascctgggaagcagaagttgcagtgagctgagatctctagcctgggagacagaatgagaccctgtctcaaaaaaaaaaaaaaattctaggattacttattataagtagatcaagaattagataaaataacttcctccaataataaaaaaattctcataattttaactcattagagtgattctgactcagggaggactgcaggaaatagaatgcctctgtggtcccttggaggcaggcagctctttgagtatcacatctgctgtctcaagctgagggcacaagcaggagggacaatgatgtggcattgatatcagtgggaaagggtttctaaatgtaagttcatgagggaatgatcttgacactctttaaggcttcacagaaattcttcaggaaggagacctgacattagatagttgagggaagaaatttggattatttctattaatgaactctcatctatcgccacgagattaggaaggcctgcagaaactcacttataactagaagtttctctctccatattttctacttgtccatatacagtgtgccctttaaggtccaagcctcgtctgttctaataaggtccatttattcattaatttaatttaaagcacttaaggaaaaaaaaacttttactctagaatagtatatctggtgaaaacatccgtcaaagatgaaagagaaataaaaacattcccagacaaacaaaagctgagggatttcaccaacaccagacctgtcctgcaagaaatggaaaagagagtacttcaattagaaagaaaagtatattaatgagcaataagaaatcacctgaaggtacaaaactcattgataatagtaagtacacagaaatacacataatattataacactgtaattgtggtgcataaactactcttaagtggaaagactacaggatgagccaataaaaataataactacaaagcttttaaagacytagatagtacaataaggtataaatagaaacaaaaaagttaaaaagtgagggaacaaagtatagagtttttattagttttctttttgtttgtttctttctttctacaaacaacttaagtagttatcaggctaaaataataggttataagatagtatttgcaagcctcatggaagcctcaaaccaaaaatatacaatggatacaatcagaaaataaamaaaacaagaaactaaacattaccagagaaaacaccttcattcaaagggagacatgaagggaagaaagaaggaagagaagaccacaaaacaacyagaaaacaaacaacaaaatggcaggagtaagtccttttttaacaataataacattgaatgtaaatggactaaactctccaatcgaaagacattgagtggctgaatggataaaaaaataagacccattgatctgtgccttacaaaaaacacacttcacctataaagacacagatagactaaaaataaagggatgggaaaagatattccatgcaaatggaaactaaaaaagagcagaagtagatacatttatatcagacaaaatagatttcaaggcgaaaacaataagaagagacaaagaaagtcactatataatgataaaggcatcaatccagcaagaggatataacaattttaaatatatatgcacccaacactgaagcgcccagatatataaagcaaatattattagagctaaagagagaggcccctaataatagctggagacttcaacaccccactttcagcattgaacagatctaccagacagaaaatcaacaaagaaacattggacttaatctgcactatgaaccaaatggatctagtagatatttacagaacatgtcatccaatgaatacacattctttccttcagcacgtggattattctcaaggatagaccatgtgttaggtcacaaaacaagtcttaaaacattcaaaagaattgaaatatcaagcatcttctctgaccacaagaaataaaactacaaaccaataacaggaggaattttggaaactatacaaataaaaggaaattaaacaacctgctctagaatgaccactgggtcaatgaagaaattaagaaggaaattgaaaaattttttgaaacaaatgataatggaaacacaacataccaaaacctgtggaatgcagtaaaatcagtaccaggagggaagtttatatctataaatgtctatatcaaaaaagaaaaaaaaacttcaaataaataacataatgaggaattttaaagaactggaaaagtgagagaaaatgcaaaccccacattagtagaagaaactataaataaagattagagcagaaataaatgaaattgaaatgaaaacaatataaaagatcaatgaaacaaaaagttggtgttttaaaaagytaaacaaaattgacaaacctttaggcagagtaagaaaaaggagagaagatccaaataaataaaatcacatatgaaaaagggggacatacaactgataccacagaaattcaaaggatcattagtggctactatgagcaactataagctaataaggtgaaacaatctagaagaaatggaaaaattcgtagacacatacaacctatcaagattgaaccatgaagaaataaaaaacctgaacagatcaataccaagtgacaagattgaagctgtagtaaaagtctcctagtaaagaaaagcccagacccagtggctttactgctgaatcctagtaaacatttaaagaagaactaataccaatgctagtaaaaatattccaaaaaatagaggaggagggaaaaattccaaactctctctttgaggccagtggtaccctgatgtcaaaaaccagacaaagacacatcagaaaaaaaaagagaaagaaaactacaggccaatatctctgatgaatattgatgcaaaaatcctcaacaaaatactagcaaaccaaattcaacaattaattaaaaaggtcattcatcatgaacaagtggattttatccctgggatgcaaggatggttcaacatacatgaaacaatcaatgtgatatatcatatcaacagaatgaaggacaaaaatcatacattcatttcaattgaaattgatgctgaaaaagcatttcataaaatttaacatcctttcatgataaaaaccctaaaaaacctgggtatagaatgagcatacttcaacataataaaagctatagtattatactataataaaataaartataattaatataatataataaaatataaaatatataatataataaaagctgtagtgttatactagctggggatctgtcatatagaatggagaaaaaattgaaagcctttccactaagatctggaacacacaaagatgctcacttccaccactgttattcaacatagtactggaagtcctagatagagcaatcagacaagagaaaaaataaagagcatccaattggaaaggaagaagtgaaattatgcttgtttgcagattatatcatcttatatttgsaaaaatctaaatattctgccaaaaaactgttagaactgataaacaaattcagtaaagctgtaggatgcaaaatcaacatacaaaaatcagtagcatttctatatgccaacagtgaacaatatgaaaaaatattaaaatggaatcccatttacaatagccacaaataaaattaaatacctagaaattaacttaaccaaagaagtgaaagatctttataatggaaactataaaacactcatgaaagaaatagaagaagacaccaaaaaatggaaagatattccatgttcatggattggaaaaaatcaatattgttaaaatgtccatacaacctaaagtaatctatatatttaatgcaatccctattaaaacaccaatgacattcttcacagaaatagaaaaaaactatcctaaaatttatatgggctgggcgcggtgcctcacacctgtaatcccagcactttgggaggccaaggcgggcagatcacttgaggtcaggagttcgagaccagcctggccaacatggtgaaacactgtctctactaaaaatacaaaaattagctgggtatggtggtgcacctgtaatcccagctactcagaagcctgaggcacaagaattgcttgaacgtgggaggcagaggttgcagtgagccaagatcgtgccactgtactctagcctgggtgatagagcaagagtcagtctcaaaagaaaaggaaaattatgtggaaccacgaaagagccagaacagccaaagccatccaaaaaaagaaaaaaacaaaacaaaacaaaactggagaaattatattacctaacttcaaatttactacagagctatagtaaccaatactgcatggtactggcataaaaacagacacacaggccaatggaacagaataaagaatccagaaactaattcacacacctgcagtgaactcattttcgacaaaggtgccaagaacatacattggcgaaaaaagacagtctcttcaataaatgctgctgggaaaactggatatccatgtacagaagaatgaaactagacccctatctcttccatatacaaaaatcaaatcaaaatggattgaatatttaaatctaagatctcaaactatgaaactactacagaaaacgttggagaaaatctccaggacattggagtgggcaaagattccttgagtaacaccccacaagcacaggcacctaaaacaaaacaggacaaatgggatcacgtcaagttgcaaatcattcactcagctaaagatacaaccaacaggccgggtgcggtggctcacgcctgtaatcccagcactttgggaggccgaggtgggtggatcacaaggtcaggagattgagaccatcctggcttaacacggtgaaaccctgtctctactaaaaatacaaaaaattagccgggcatggtggtgggcgcctgtagtcccagctattcgggaggctgaggcaggagaatggcatgaacccgggaggcggagcttgccgtgagccgagaccgcgcctttgcactccagcctgggcgacagagtgagactctgtctaaaaaaaaaaaaaaaaaaaaaaagaagaaaaataaataaattaaaagaataaaaaatatatactgggaaactacgaatcaaaagaaaactggaatagctatgttagaatagatggagtttgaggcaaaaaaaagacacataaatggcaaaaaggcatatggaaggtgctaaatatcattgctcatcagaaaaatgcaaagcaagactataattatacatcatctcaccgtagttaaaatggcttatacccaaaagacaggcaataacaaatgctaatgaggatatggagaaaagggagtcattgtacactcttggtgggattataaattagtacaaccattatagagaacagttttgaggtttctcaaaaactaaaaatagagctaccaaatgatgcagcaatcccattgctaggtatatgccccaaagaaaggaaatcaatatattgaagagatatctggactcccatgtttgttgcaatactgttcacaatagacaaaatttggaagcaacttaagtgtccatcaacagatgaatggataaagaaaatgtggtacatatacacaatggagtagtatttggccataaaaaagaataagatcctgtcatttggaaccacatggatggaactggagatcattaagttaagtgaaataagcaaggcacagaaagacaaacattgcatgttctcacttatttgtgggatctaaaaatcaaaacaattgaactcatgtagatggagagtagaatgtggttaccagaggctgggaagtgtagttgtggggaggtgacgcagagatggaaatggtaaatgggtacaaaaaaaaagtagaaagaatgaataagacctactatttgacagcacaacagagtgactatagtcaataataatttaattatacattctgaaataactaaaagtgtaatttgattgtaacacaaaggataaatgcttgagacaattgataccccatcctccrtgatgtgattattatgctttccatgcctgtatcaaaatgccttatgtaccctataaatatttatacctactatgtacccacaaaaattaaaaattgaaaaaataaataaaaacctatatgtcttatttcaataactagattgtaaaatcctcgaggacttaacactcctttgtcttgccatccctgtttactctgtttacgcttctacttcctccatccctttaatatgtagtaaaagttgaaaaaaatgtactattcagtttccattgacaccaaaaagaaatatcaaacatgacaatatccactagatgtttttcttccttttcaaagtgtaatactatattcatcagaacatttcattctatataaaaagctacttattttaagccacatcttatgtaaaattgcttaacaacttgatacattcaattagagtagaagttctggggaaacagcagtagcaggtgaatctgaacggttgtgccatagttaaaaggaagacttcctgattggctttcctggagcagattatgcctcttagaggccaaactgcacctgggatttggtcctacaaaaacacagcagagcagcaaattcaggacaatctttgcctgttagtcttaagtaaaacaattatgaaatcattttttgaacctgatatattagcatgctgagtgtgttaaaggcaatcttatcatagacactgcatgggcagttttttgcattcaaaccatgtctatggagataccaaagagcttcaggaaagaccagataaatttcacaagattttttattttttacttcattttttcttcataaatttgagaagattttaacattatttttcttacctttgacttttattttggaatattctggtaatattatttaaacataattttaaatgaaatttgacttttaaaaatacaatmagcaaacttataaatccctcctccttcctcctgcccttgttaggtattatattttatttgtacaaagccatagcaaacattccaagcattcttttctatatctcatacttgaaatgactaattggatactgaaaatataagcaggacaattaatatattaatgaacaatattattttattaggcatttaaatattttgggataaagaagaaaaactgaaagcacacatctttttacacatttatttggagataaataatacacatctcactttctaggctgaagtgagaaaatatttttggtcgtatattggcataaggaataaacatcatattccaactgaacagttcttatttattacaattttctaaatcaatcaaaacaaagcacatcttcacaaagtaatggctagaacaacaataatttcttagagatatgttacatctgatctattttcactgtaagagcactcacttttaataacagctatttcaacataagagtattcttttcatggactttgtaaattaggaacatgatcattgcctagagcataatatatcagaaacatgttgtatttagttctcttttcattttagatttttctagttctccgtagtaaaaagtattgtaggtataacttatttgacatgaaactgggatattttatggaataccggagttggataaacattaacatttctgattgtcactctaactccaacaactaaacattgtaggcttttgagtttgcctataatccttaggatatatcgtgtatatcctaattttgcttcagtattgccattatttagttggaacaagatctgggaattgtgatatttaatttctttattgaaccaccatgtgatattggataagtcattagctttgcccaaacttgatgtgattatgtgtgcattactaataggtaagctaggatttatgtccactttggaaaaaaaagacaataaaaatatagtcttaataaggacaagattttgctttctttgctcagggatagaatttatcctgaagaatgagtgattgcaagaagcccaccatggccatgtaaaggtgacaaccagtacctggtctagagcctctccaaggatttttgcaactcagccacttctccattctacaagacttcaattcattttcttatgagctagaagagaaatattggtcaactttcataatttattgaggcagctgaggttaggtgggttatgaagaccccaatgattccatgaaagaggggagcaaacttcaagtcttatgactcttatctcatgctgtattcattggttgaagaataggttgcttgttacatggaaacaratgtttacagatatcatcaaagaaatgttgacatcgaaaagactgttacatattttttgctttttggtggctacagcaagattggcagaaatgtcttttacctcatccatcttaagtgagatgatgttgttagctattgtaggcaagctactgcagtttgcttatacacaattgcttcatgagacatttactggaagaaggttgttttgattttcctgtcatttgcacaactattttaagatattctgagtctcatttatgattccttatcagtgattgccattagctacaatttttttttctgttattttctctcctgggctttattggcatttgtataataaagagaagaattggtctctgatatggtgtggatgtttgtcccctccacatttcatgttgaaatgtaattcccagtgttgaaactgtggcctggtgggaggtgtttggatcatgggggcaggtccctcggtccctcataaatggcttggtgtactccccttagtgatgagggagttcttgctttgagttcatrtgagatctgattgtttaaaagtatatggcacctccccccacaccttgctcatgctgtcaccatgtgacaagccagcttccctttccttctgccatgactgtaagctcactgaagccctcacaagaagcaaatgccagctccatgtttcctgtacagtctgcagaactgtgaaccaattaaacctgttttctttataaattacccagccttgggtatttctttacagcagtacaagaatagcctaacacaatctggctcctgaagatgaaacaaattaattaatacatttcaagtattttcctaggtctccctctctttatatatagaggcataccttggagatattgtgtgttttatttcagactactgcaataaagcaaatattgcaataaagtgtcgctcaaattttttgatttcccagtgcatataaaagttatgtttatactatactgtagcccattaagtgtgcaattgcattatatccaaaaacactgtgcatatgttaatttaaaaatactttattgctaaatgctaatgatcatttgagccttcagtggatcatgatctttctgctagtgaagggtcttacctcaatgttgatggctgttgattgatcagggtaatagttgccgtatgttgggtggctgtggcaatttcttaaaaataaggccacaatgaagttagacctattaattggctgttactttaatgaaaaatttctctatagcatgtgatgttgtttgatagcattttacccataatataacttctttcaaaattgtggtcaatcctttcaaacccggctactgctttatcaactaagtttatgtaatattccaaatcctttgttgtcatttaaacagtgttcactgcatcttcaccaggagtagattccatctcaagaaactactttcttggcacacccagtagaagcaactactcctccattcaagttttatcatgagattgcagcaattacccatatcttcaggcttcacttctaattccagttctcttgctatttctcttacatttactgttacttctgccattgaagtcttgaagccctcacagtttttcaagcaggttggaattgacttcttccaaactcctgttaatgctgattttgacctcctcccatgaatcgtgaatgctcttaatggcatctagaatggtgaattctttctagaaggtttttaatttactttgctcaggtccatcataggaattactatctatgacaggtatagcctatgaaatgtatttattaaataataaggcttgaaagttgaatttactccttgatccatgggctacagaatggatgttgtgttagcaagcatgaaaaatccatttatttccttgtatatctctatcagagctcttgggtgaccaggtgcattgtcaaagaactgtaatattttgaaaggaatcttttttctgagcagtaggtctccacagtgagcttaaaatattcagtataccatgccataaacaaatgtgctgtcatctaggctttgttacatttataaagcacaggcagagtagatttatcacagttcttaagggccctaggattttcagatggtaaatgaacattggcttcaattaagttgatgactttaagagtcatcagctgcattagccccagcaagagagtccacctgtcttttgaagctttgaaaccaagcattgacttttcctctctagctctgaaagtcctagatggaatcttcttctactaaaagggtgttttgtctacactgaaaatctgttgtttagtgtagccactttcatcaattatctgggctaatctcctggataatatgctgcagcttctccctcagcacctgctgcttcaccttgaacttttatgttatgaaggaaacttctttccctaaatcttataaaccaacctctgcgagcttccaacttttcttctgaagcttccttacttctctgagccttcatagaattgaaaagaggtaggtcttgctctgggttaggttttggcttaaggaaatgtttagcttttggtggaaagtgacagacctgctacagtttctttcatttgaacacttagagtcattttaggattattaattggcctaatttcaacattgtatctcaaggaataaaaaagccctaggagaaggagagatggaggagatggggacaactggttattggagcagcyagaacacataaaacattgagtaattaagttcactttcttttatgggtgctgttcatggtgccccacaacaattacgatggtaacatagatcacagatcattgtaacagatataataataatgaagaagtttgaaatattgtggaaattaccaaaatgtgacacagagacaggaagtgagcacatggtgttggaaaaatagcagttgacaccgatttgccacaaaccttcaatttgtaaaaaaaaaamaaaacactatttgtgaggtgccataaagtgaggcacaataaaacaaggttatatacacacatttacacacagtaagttctcaacgttgtcgataggttcttggagactacaactttaagcaaaatgatatgtaataaaacyaactttaccttaggctaatttacataaacaagcagtaagctcctacagcatgtttgtcatagaamtatcaaacttctaagtaaagactcaaaacacttttaatattaaacattgaaataaatgtgagccaaacatacattcaagaaagattaataaaaacaagtaagataattatttacccaagttttggtgaatcagtgagtgatagtggttgtagtggtgatgggttgaatcaaggaataaatgtttgcaaagtgagaattataaggagcacctcctatcaccacacagttcaaaaacaaacaataaatatggcaggcttgctgagcacttttggaccccactgtttggtgtcaaaataaatttattttacaataatttatattcattcattttccaacctgcttattcctgttcagggttgtgggtggctggtgcctatcctggcaggtcagggtgcaaggcaggaaccagcccttgacaggactccattccattgcagcctcactcatacacacactcccacactcactccaacttggacattgtagatacaataattaatctaatgtggacatctttgggatacgggaggaaactggtgtcccacgagaaaactcaaacagatggggagaatgtggaaaccccatactgacagtggctctggctggcagtagatttttttttctcatcaaygtgtgtgtgtatatgtgtgtgtgtgtgtgtatactattgaggaaacagtgtcatgaagttaagtgattttcaatatagaaatcattttatagataatctatacaaccaagctgttttttaaagaatttggattgtttttgtgcacagaaaactcaacagtgtacattaacccaggttagtggcaagttctttagtctttgccttttctagcttggcaatgcaagccacagattttggacccaggatgttgcctcctcagtgctgacagatctcattatatctaaccttgtagttagtactgatagcttccaccagctcagccagaactcctttgtcttctgagttaacatgtgtgaaggccacagtggcacaagtattcctggggactggatgtcttttaggcttgccttctcttgatagtgcagtaaggaactcccatcttaggatacagggcgagccctcagcaatcagcttgatggaacccacatcacgtgcagtcactaccatctgagccttcttgttttctaccaaggtggtgacagtgttaacccttgctcaaaggacaggtgttatcttagtgggaacatcttctttgccagcagctttcttcttctcttgctttgtctctgctctgtacttgtgggtcagtttcagcatttgagtagctgtttggcagtccaaagcctagatgaactggttaattgcaggaggcactttcagccattcatagaggatagctttttgctgatgcagccagatgcagtggggccctttgacaaaacaagtgaggttccttttgagatggatgtgctgtccaakgccaaaattcttagaccttttctcaaacaggggattcaccaccttgttggccttctgcttctttatgataagggactagarccaccttctctgccttggccttctttcctttcagcagcttgggtggctggaggaagcaacaagaccaaacattttgtataaaggatcttatgatattttattgtaaaatatsctttatagactgtaactaaaggaaatcctagtggtcctttgggtcaaataaggaaaatatattgcatatgtacagctatttcctcaatgtccttatggaagacttarcaaatcacccatgacactctacttttgtccagaatcagcctcataatccttcttaacacagtgcttcagccagccattatcagttgattgtaattgatgtgagagatgaaagtaagtgccatgtataatctagtagacctctcatttttcacatgaggcaactgaggcccaaggaggccagtgaccttaaaggacagtgtgatagctgaaattagagctgatgttcccagattttagtttcaatgttctttttactccatcatgtactcagtgagccaacaaaatagcatgggtatgaaatttccatgcctttttagaatcagccttattcaattttctaatcttcaggtttctgagttattgctattattatctgacctgtctacagtctttttaaatggggacaaaaaagtacagttccttgaagagcatttaaatccaacccagcataaaaccagcccacagaatatatgagctgttgatgatattatgtatataaaactgcaattaccataaaaatacagcaagaaatcttagcatcccaatgtaactgtaaatctaataacagcaataacagaatttcttagagaaaaaagctgcattggcytgttgttatttttgatcctagcttattatctgggtcaactgggaggtttttaggaacatcagccattttagtcttagttctgtttggtcatcagaagcttatgatgacctagtgcagtgaaggaagcactaatatacataactgattgtttcctgtttctttaattccatgaatacttgaagaacaaaggaaatgaacatgctaggaatctgcatttgaaagtagtcatgcttacacttttcattgcagtacgctttgataaagtatgtagactattctttctgatctttactatctaaaactggatcctcctccttcctttctacatttttgttgatttatttattgactgtgtgaatcataggggatcttcatataatccastgtgtagagacttgacgtaaagagtcatataaagaatgcaggggcattcacgtgctatagcttggagctaaattaaattacaggtaggaaaaakctttcagaggtgagtgtaatgcttactaactgtttgcaagctttcataaaacagttccagagttagagctgtaggagaaataccttcttattgagagtggacaatcgactccaaatcatgggatatgaaattagggaaaattgcttttaaaaaatgtgtaaagaaaaagagatataggctaacaggataaactgagcttgagtagatcttgaggaagcttagggcagtttacctgatttcattctgcatcaacagaacaggtaagtgttgtttaggtcaacatttctyaaaaaatgggatctgtatccatgaacctcctgcttatttaaaaatgtggatcactagttcctaatggaggagtcagacatcttacagaaatctatctctacagttcacagaaagtagttttatgctttagttctcaagcactggagctctgttatgaggaacaaagtttcctaattcaccttctttaagtgaatttttaggtttgccatttaggttcccaaattcagttctgctgaggcccagttaccatttttcaacactaaaaagaataggaaaatgcccttttgtttcactttataaagtttcaaaagcatgaatcagaaaatcattttactttggaacaaagattttctaggaaatttaatcttttattattcaagataattcaaccaaacactttgagccaattttaaatattttgtctacatctcattagactaatgcacttttcttccttttatttttctagacttaatcacacagattcctataagtaattaggtttttcattctttctaaactctttatcttagcacttcrttcattcagtcatgacatagtaatgtttgtggaatcccagttgcttttattgagaatggctatatattctctcattaagtaattatttttctttatgtttaataagggagaaagtagcctattgcctcagattcaggagtaaagatgaaattcactgggaagacrttatgtttgaaattttccttagggttcctcttcactgggtgaattcagttttagtgataaagcctaaaagttctcaacatctctaaaaatattatctttcttactctaaagcatgtggaaaaagttggctttggagaagttatgtttggctaggaaagatactatatctcatctcaagaatgttaacacatatatattcatctcactctgctaccaaggaagggaaagatgttcagatggccacatcacttgaatagctgagtgatagaactgccttctaggtcactgttccaaatctgaactagcccattctgtccctcccccggccctcccccagttggaggagaatcctttgttgattctcacaatactatgactagacaacatttgggagcaaaaataaaaaaatatgcttctaaatagccttaaatgaattgttttgtctttgtgataattccctgtgactttatgcttgtgacttcctgctgcctgcaagtgatgttggaaaatggaaacacagcagtttattcacttttctttatcctgcatgtctcaagcttggactttggcagttgaagtaagataatcattttgtgccataaaagaagaaaaacagtttgccaacaggagcctaaatttaacattagaagactgggaaatatggaagagaggtgatatcccagcaacactactccaacacagtaatctggcagtttctgtattcccaatttatttttaaaaaacaatgtcacttttgtcagtaaagacttaaaagcaattttgaatgtgtgtgggaaaaaaatacccagaaaatttccccctaaacctgatttttattgcttgatttgtggtttaaagtattttcataatatttataagtaaaggtggtttcagcaagtaygaattccaccattttgtccacaggattagtggggagggattttgaattcagatcttagctttggtgctggatgcctttaacaaattgcygtaattgcttttcctttatccgtattttacttctctttggcagggtgaaataccagtttatcccaggtatcgtctgaggaaggtttggggagtgatctgtatgtttagattttctgcctaactttattaatgtggtatgaataaggagctttttttttttagaaaatgacactttatacaagtcagttcctctctattttctttatggacggtactggggtggcagcaggactcaccatgaaaactgtagtggtaactctgttcttctgactgcctcccatgatcctgtgtaggaagctattaagcctgtagttaagttacttccatttcctcttgactaaattgatataatgatagtaatatatgctgcgcttatctttcagtgtgtcagtcactgtgccaatcgctttatatgtacgaactgattaatctttacagctcctaggagtagatcttactgttatctccatttcacagatgaggacccattggagactgtattcaaatccaggcagtttaaatatagaaatatttaagagctgcttcatgctgcctcctacagcatggctgggcagaatagacacagaacattcagaaatttgagttttgggaaacatrcaggagagagatgtgacagtgagatgttgcctccaatatgaattgtccttgtcttctaaaaacagaatcctgctaaattaatgaccaacagtaatagcagctatacctcccagtttcccttgcagctgtaattatgctttgagatgcaagtaagattaatgacatataagtgaaatttttattgggtaacttttgcaaacttccataaaagttagtctacctgcacactttggctcyatcctgctgcctggaatgtggatgtcatggttggaactctagctggcatcttggactatgaggataaggccayacctaaggtggcggagtgagaagttggaagacgcctgggttcctaggtattttataaagcagaaccactacatcagctcaggagcactttacctccagactttttttgtgaaagcaaagtaaacttctgtctcatttgaagcactgtgattttgagtgtctttaacttgcagctaattgctcatttcatacctacttaacaatgtggattgtaagtagcttcactatttgtgcatagtaagccctccgtaaatatttgttgatttgagttttttatctcttcccattttaatatttagaatcatctatttgagttactttataagaacagtgacaatatgtatgtatattctacattcaaaatcatgctgtaaatgtaaaataattgggcaacagggcctgagtggttttccttttttcttaaagtaatgaggaagatccaaatattagaatacaacttacaagtatcaaggtaaaactcccttgccacatccatgtagcaaaccaaatgtactttaagtatgttactatttattaccatttgacttttatttgattttatttttgagacagggtctcactttgtcacccaggctaaagtgcagtggcatcatctcagctgactgcagccttgacctcctgggttgaagcgatcctcctgcctcagcactccaagtagctgggactacaggcatgcatcactatgcccagctaatttttgtatttttagtacacatgggttttcccatgttgtccgggctggtcttgaactcctgagctcaagcggtccacccaccttggtctcccaaaatgctaggattataggcatgagcccttgcacccagcccatttgccattttatattaaacattagatcagtggggtaggatcaatggataaatcaattagaaagagtgattactggaaaaatcacttatgggtttatctggatgttacaaatcagaattctgatatttaatattatgctacatttatggtacaatgaaaaagtacatgtgtttatgtatgtttatattgaaaaagtttcaaaaccaaataagtcctataatatcctattaatcataaaaaaagaaaaagaattggygggggacaagatgaccaactagacgcaggcaggtggaacggctctcatgaagggactcagatgactgacacactcctaacacatcttcagagataaaggcactaagaatggacagagggaagacgcagaagctgggctgaagggtgagaaagctggaaacgctacatggggctacagtatacycacactcattcctggcccccagtggctctgagggaacaggtgagttgcactggcaaggagcaaactgcttttgccacaggcctctggaaccctggcagggggagaccccttgaccactatggacactcaagatggcatggagagctgcttagagaagggttaggggcagcagccagctgatgtggagcccgaagagtttggtgcaggactaggggaactgtcagtcctgaactctgcagggtggtcttgcccatcagacgaggccagtctgacctgagaaccccttggtctgctgtcctttcccagagccccagcctggctacacctgcttgcagagcagcctcgggtgccctggggtcccacaccatagcttctgcactggcagattgtgcctgactggtagagagctccagcaggatggcccctacagccatgcaccaacccccatgctccctcccatactgcagctttctttaggcctaaggcaactccccacattgctttgctggcatgtgtctgtggaggtgggttttgcttttcttgaccatcagcatttgggtgtgcagtctacccttcctctccccactgacctctgttgcagacagagtcttggtgggcacagagtcagccagccctgcccccgccagtgctctgcccttatggtaacactctgcagagaatggtggatcctcccatgcctgagcaatcattcctgcttgcgaggcacagagacctatacacccagacctgcacccatcagtgccccactcctgagccaaaacaccaccttcagggtgaccacacacacagtcaccagcggaggccccccagctgcgttgactttgccactgtggtgaacacttgcagggaggcaggcatcctggcacctgccacccactatgccacagctgttgctactgctgctactggcacttgtgagcaagaatgggtcccactgtcatygcactctgaaacactttggctgacaccacccgttggagtgtactgaccagtggtctgggagcacctcattctcccccacctccccagtgaagtggattcctaacctcaaggagccagagaacaaagttggggctcaatacaagtcccccagagttacagcatgcagtccaggagttgggagctaagcattggccctgtaaaatcttccagaaatgaaggcagttagctgaattcactttataccacaatcaaacttcaaggtcatcaaataggataaaaggaaaaaaaccccatccaaaggtcagcagttttaaagattgaaggaaggtaagtccacaaagatgagaaggaatcagcacaagaaccctgataactcaaaaagccagagtaccttctttgctccaaatgaccacatcacctctccagcaagggttctgaactggattgagatggctgaaatgacagaaatagaattcagaatatggataggaataaagatcattgagctacagaagtattttgaaacccaatccaaggaagctaaaaatcatgataaaatgatgcaggagctgacagtcaaaatagccagcctagaaaagaatctaattgacctgatagagctgaaaaacacactacaagartttcatagtgcaatcacaagtattaatagcagaatagaacaagtggaggaaagaatcccagagcttgaaaactggctgtctgaaataagacattcagacaagaatagagaaaaaagaatgaaaaggaacaaacaaaacctccaagaaatatgggattatgtaaagagaccaaatctgtgactcatttttgtccctgaaagagatggggaaaatggaaccaacttggaaaatatatttcaggatatcatccagaacttccccagcctagctaaagaggccaacattcaaattcaggaaatgcagagaacccctaagatacttcacaagaagatcattctcaagacctataataatcagattctctccatggttgaaatgaaagaaaaagtgttaaaggcagctagagagaaaggtcaggtgacctacaaagggaagcccatcagactaacagtggagctttcagcagaaaccatacaagccagaggaaattgggggccaatattcaacattcttaaagaaaagaaatttcaacccagaaattcttatccggccaaactaagctgcataaatgaaggagaaataagatccttttcagacaggcaaatgctgagggaaattgttaccatcaactactttacaagaactcttaaaggtagcactaaatatggaaaggaaagactgttgtcagccactacaaaaacatactgaagtacacagacaagtgacactataaagcaactacataaacaagtctgcaaaacaaccaggtaacgtcatgatgacaggatcaaatccacacatatcattactaaccttgagtgtaaatggcttaaatgccccaattaaaaggcacagagtggcaagttagataaagaaccaaaaatcatagtatgctgtcttcaagagacccatctcacatgcagagacacacataaattcaaaataaagggatagagaaaaatataccaagcaaatggaaaacagataaaagcaggggttgcaatcctagtrtctgacaaaacagatgttaagccagccaacaaagatcaaaaaatgcaaagaagggcattacataatagtaaaggggtcaagtcaacaagaagatcctaaatacctatgtgcccaacccaggagcacccagattcataaactaagttcttagagaccttcaaagaatcttacattcccacaatataatagggggagactttaacaccccactaacaatattagccagatcatcaagacagaaaataacaaagatattcaggacctgaactcagctctggatcaaatgtacctgctaaatatatacagaactctccaccccaaaacaacagattatacattcttctcatgaccacatggcacacattgtaaaattgatcacataatcagaagtaaaacaattctctacaaaatgcaaaagaactgaaatcataacataccatgtcatggactatagtgtaataaaatgagaaatcaagactaacaaattcactcaaagccacataatttcatgggaattgaataacctcctaaatgacttttgagtaaacagtgaaattaaggtagaaactaagaagttctttgaaaccagtgagaacaaagatacaacataccagaatctttgagacacagctaaggcagtgttaaaagggaaatttatagcactaaatgcccacatcaaaaagttagaaagatgtcaagttaacaacctaacaccacaactaaaagaactagagaaccaggagcaaacaaatcccaaagctagcagaagataagaaataaccaaaatcagagctgaactgaaggagattgagacacgagaaagcatttaaagatcaatgaatccaggaaccatttctttgaaaaaattaataaaatagaccactagctagactaataaagaaggaaagagagaagattcaaataaacataatcagaaacaacaaggacacattaccattgaccccacagaaatacaaataacaatcagagagtattatgaagacctctaagcacataaactagaaaatctggaagaaayagataaattcctagacacatacaacctcccaagactgaaccaggaagaactgaatctctgaattgatcaataatgagttctgaaattgagccgtaataaatagcctatcaatcaaaaaagccaagaaccaggtggattcatagctgaattctaccacatgtacaaggaagagctggtaccattactgctgaaactattccaaacaaaagtgagaaggagggtcttctttctacctcatctatgaggccagcatcatcctgataccaaaatctggcaagacaaaaaaaaaaaarggagaaaatttcagactaatatccttgaagaacattgatgcaaaaatcctcaacaaaatactggtaaactgaatccagcagcacatcaaaaatattatccaccataatcgattaggctttatccctagaatgcaaggttggttcaatgtatgcaaatcaataaatgtgattcatcacataacagaagtaaaaacaaaagccacatgattatcttaatagatgcagaaaaggctttttgataaattcaacattccttcatgttaaaaacactcaataaactaggtattgaaggaacataccttaaattaataagagccatctatgacaaactcattcagtcaacatcatactgatgggcaaaagctagaagcatttctagtatttcccattgaaaaccagcacaagacaaggatgccttctctcaccaatcctattcaacatagtattggaagtcctggccagggcaatcaggcaagagaaagaaaataagagcatccaaataaaaagagaggaagtcaaactatcccttttttgcagatgacatcatcctataactagaaaacttcatcatctcagcccaaaagcttcttaacctgataagcgacttcaacagttttgcaacagagtctcaggatgcaaaatcaatgtgcaaaaattactaatgtttctatgtaccaacaacaatcaagctgagaatcaaatcaggaacataatctcattcacaggtgtcacacacaaaaaaggtaaaataaaacaccacagaatacagctaaccagggaggtaaaagttctctacaaggaaaactataaaacactgctcaaagaaatcagagattacacaaacaaatcgaaaaacattctatgctcatggacaggaagaatcaatgttgttaaaatggccatacttcccaaagtgatttagagatttgatgctatttctattaaactaccattgaaacacttcacagaactattttaaaattcttatggggccaaaaaagagcctagatagccaagaccatcctaagcagaaagaacaaagctggaagcatcacgctccctgacttcaaattatactacaaggctgcaataaccaaaacagcatggtactggtacaagaacagacacatagaccagtggaacagaatagagaacccagaaataaggccacacacctcaactatctgatcttcaacaaagctgacaaaaacaagcaatagagaaaggattccctattcaataagtggtgctgagataactggctagccatatgctaagattgaaaccggaccccttccttacaccgtatacaaaaatcaactcaagatggattaaagatttagatgcaaaaccaaaaactataaaaaccctgaagagaaaatagtcaataccattctgtacataggcatgggcaatgatttaatgacaaagacaccaaaagcaattgcaacaaaagcaaaaattgacaaatgggacctaattaaattaaagagcttctgcacagaaaaggaagctatcaaaagagtcaacagacaacctaaagaatgggagrcaattttagcaaactatgcatctgtcaaaggtctaacatccaacatttataaggagcttaaacaaatttacaagaaaaaaacaaccccattaaaaagtgggcaaatgacatgaacagacattttgcaaaataagacatacatgtggccaagaatcatatgaaaaaaagcttaaaatcactgatcattaaagaaatgcaaatcaaaaccacaatgaggtatcatctcacaccagtcagaatggctattgttaaaaagtccaaatataatagatgttggtgagattgtagagaaaaaggaatgtttatacactgtttgtgggataaattagtttgaccattgtggaagatggtgtggtgatttctcaaagacctaaagacagaaatatcatttgatccagcaattcaaatactgggtatatactgaaaggaatataaattattctattataaagatgcatgcacttgtgtgctaattgcagcactaatcacaatagcaaagacatggaataaacctaaatgcctatgaatggtagactggataaagaaaatgtggtacatatacactatggaatactatgcatctataaaaaatgtgatcatgtcctatgcaggaacatggatagagctggaggccattattcttagcaaactaaagcagaaacagcaaaccaaataccacatgttctcacttataagtgggagctaaatgatgagaacacatggacacacagaaaggaacaatacacattgggcctattgaaaggtgggtggtgagaggagggagaggatccggaaaaataaccactgggtactgaacttaatacctgggtgatgaaataatctctacaacaaaccctcatgatacaagtttacctatataacaaacctgcacatgtaccctgaacttaaaataaaagttataaataaaaaagaaaaagaaacacaagtgtgttccattgaacacacgtatgagacttcttaaatgcctgtttaaaatttgtaatgttataattttataaaaggtcttttttttttcaagtataagcatggacttttctccccatgctgaaacccaagtgaaaaatgacacagtatcttggactaggaccttgtcagtgtataagaaaaggtttgacaggtttgtgatctgtgtggcrcacacactaggcctggctgatggattcaatgtggggtgtgtatggagggaggtgaaaaataaatattaatatgacacaaatattccacctgagcaaatgagtaggtggaggggctgcttatagggatggaagaagttgaagagaagcagatccaaggtgtgtggtagggtgaaacagttcaattttgcatacaagtttgcaatgcctgtgagacatccaaaaacagaaatcaagttgtatatgtgagtttgaatttaagaggagaggtgtggactcgagatttaaaatttggagtttcagcttagagatgatatttaaagttatgrcagcatttgagatcatctagagagaaagtttaggataaggtaagaagagggctctgaaaccagtctcatgaatgtaataagaaatctacatggtatggtcaaaagattatggtctgtgttgggatctgatgtggatttctttccctctgggtgccgctgatctgcctgttgagacccgtcccattggtctaggatggcacttaatcatgcagaatcctgactgaagatacgggctgtttaagtcataagtaggaatgaagagtagaatcacataaatgcttccatcaaagaactgatgacatgggaattccagaggctccttctagagatacatagaattcagtgtgtaaagaagttagaatgtttctttctgcatctttaatctatcttctcttaggtgytttgagactagcttaaaaattaattcttgattgcactttgcaacyataaacatggggattggtgattgaataattagtgcttatcttctctctttgaaattggctacctttgaggttttacagtttttaacaatatcatgataagatcatatgttaagtgcagttagtgttgggccacaaagaactttttctgcaaagaaatcaagattcttacaggttttaatggaaccaaaagcgttgtgtggggtggagcaggagggaggatggtttagagaagaagctattgctaagtaatttagtgataaaatttgcaaaaattgaataaagacttagaatctattttaacagctaaaataactactttaggatttgttaattaaaaacagcagaaatgtttccttccaatctcaattctcttcttttaattcactgactaagggtctgcttttgtaatctcccccaaattctgtaatrtgcccagacttactatagaaagtaattaagacctgtatgatttgcactaaggctataatcaacgtgtagcccagtgtcttgcacacatttattcatttcactaacatttattgaatacctaccaggcatgcttattaatttcactagcatttattgaactcctactatgcccccataacagaacctactcatatgctccctttgagtacccagcatgaaatttagttctgtgagcattttgtctacaagtgggcatctttcwtgccaaaataaatatattgrccaatatttcttgctaccagaaaagattaaatattttaaaatgtaggcttgcacccaagctgctggttatctctattgtagtattgctgacatgagagggctttgcacattgttttttgattctgacaggattcagttaacagtaataacaactttttcttcctctcccctccctcatatgttctgcacataytcaaagattggctctgttctcagagttggctttttctaatttcctctttaaaatttctttaactttccatgtttttcatttttaaaggaggccgtgagactccctctagattaacttggctcagaagattactgagcttcaaaagtctggctttaagaggctttcccaaatctaattttgaagctatggtatccaagaaaaatggaaacctcatatttccatcaagggctcatgtgtagccagggtttttaccaagtttacaacatgccrtcacacttaattctgaggacatgtgcctagtttggccaactaaaacatatacagttccttctacttttccataaatgtaagcattttcaggaagagaaactagttcagagacagatcttcttgcttagaattttttttttttttttttttttgagactgagtctcgctcttgtcacccaggctggagtgcagtggagcagtctcagctcactggaacctccacctcccaggttcaagtgattctcctgccttagcctccaaagtagctgggattacaggcacccgccaccatgcctggctattttttgtattttcattagagatggagttttactttgttggccaggctggtcttaaactcctgacctcaagtgatccatctgcctaggcttcccaaagtgttgcgattacaggtgtgagccactgcacctggccattgcttagaattttgaatcttcaaattataaggagagcatcttggaaaggagtccttaccagtatcaatgattagcactttttttagggagctccattaactttcttaaattaattgcaaaattttgcatgtacttatttaataaatattaatcaagcaccttttatgtgctaggcataattcatgagtaaattttagtgtgctaccgggttggggttaccggagattacccctggtccctatgacttgctaggaggactcacaggacttgtatatggttttactcacagctatgatttatcacagtgaagagatattgggcgagatccacaaagagaaaagggaaaagaagcaaagtctgggaaagactaagttacacacttcttttagtgaagtcacacaggatacacttaattttccagcaatgagttgtgacaacatatatgaaatgttgtctaccagtacagtttattggagactcagtgctcagggtttttattgggggctgatcacacagcaccctccctctgcctagcacataccaaatttgtatactggccaaaggaaagcagatggtcagcataaactacattgtttgcacaaacacttaggtatagtgagctactcttaccagttctaggcatgtggaaaccctcctgaaacccaagtttctagatgccagccaaggaccaaccttttaagccttccttttgaagggtagcagttaggtctgctatgttaagttttttgtgaacagctagattatgacaagtgcattggggaaaataattttacagcaaggagcaagggctagtaaagctggaaagcaacgtggtctgcaattttaaataaggtgatcagagtaagcttcactgagaaggcaacatttgagcaaaggcttggaggtaaaaaggaatattccaggtgaggagaacagtcaatgcaattaccctaagttgatagtctgcttgtcatgtttgagaaagagcaaggaggccaatgtagctggagcagagtgaacatggagatgaaggtggaaaattagggtttggggagaggactgctggctataccatatgggaccttgtagaacattgtttgttctttggtttatgcatgtgtgcattttactggggaaagatccattagttttcatttcttttgattctgtgagcccccaacatccactaactgcagatctagggtaacttccatcattttacaggtggaaaactaagccctaagtgatgacaggtagcttgcttaaggtcacatgatcttcagtgggagaatgggggataaaatgtagaacattaatgtttcaatctttccatcaagattaggagaatcctaattattaatgtagttgataataaatggatgccacactgcttcaggatagttcaggcagaatgtgttcaattatttcttttggtttagaatagaaggggactggggtgcctaatcctgagtaagtagggggtaaaacaagtagtaaatacctaataggcattttctcctacatattagaatgtctgataattcaattaaatgtctttacacctcacatctatccctccttatgtaaaaaaaaaaaatggttttcattgcctgttaagccatccctcttttgcccccattatgattatatgcaaacaaagaaaaagtttattaagctgtctcctgattttaaagattcaactgtggtttttcacaagggctataaaaataaactaaagctgactttaaagttaacttctctcattggcaactctgcaacagtcacaccaagaaggtctagttgaaaagggtgaaacatggccaaagcatacctactgaacacagatccagaaagtagtatgtttgaccttaaaacccccgatgatggccaggcgcggtggctcagcctgtaatcccagccctttgggaggccgagtcaggtggatcaggaggtcaggagatcgacaccatcctggctaacatggtgaaaccctgtctctactaaaaatacaaaaaattagccgggcatggtgatgggtgcctgtagtcccagctacttgggaggctgaggcaggagaatcgtttgaacccggaaggcggaggttgcagtgagccaagattgtgccactgcactgcagcctggcgacagggagagactcaatctcaaaaaaaaaaaagaacaatgagaacacatggacacaggaaggggaacatcacacacgggggactgttgtggggtggggggacgggggagggatagcattaggagatatacctaatgctaaatgaagagttaatgggtgcagcacaccagtatggcacatgtatacatatgtaacaaacctgcatgttgtgcacatgtaccctaaaacttaaagtataataataataaaatttaaaaaagaagcaaaaaaagaaaaaaacaaaaagaaaaaacaaaacaaaacaaaacccgatgatatgtgctgcttatgaaatcaacagataattgctatctaattttttctttcaaaagaaaattatgctgaaaagaagatctacagtttttgaaacatttactgcttttaagcataaagaaatgaaatgttagatgcaaatagatcggtggtatatgtgtgctaaaggtacaatttgggtgacagctacrgaarggaatttaataatgccttttactattttgaaagccagaataaaaagtaaaagaaaccctttagaataaattttgaaargttaagttcagagctacttaattattatatggatttggaagtataggcatttaaaaaatactttatattttcaagggggaaaatcattaatcacctcctctgaatgtgaggaggtaaaacatggcttatgctattttacagataaaaaaatttctgtccattaagcagtatttccatattgtcatctttagggtggttgctgttaaatactttatgctatattatctcaaccaatgatgcaatgaatggctctgtcatggctagatgacataaaaccaaaattatctattactgttgaagagatgagatcaatgtcatacccaaaaaagcaagatcttgaggtctttccctctgagctttgatcccttccatgtattttgaactgcaaaaggccttgcttttgttgatggtggtggtggtgggagttactagatttaactattagaatatttctgtttgtactaaggcccttgacaaaaaatttaatagcttttgttataaaatgatgtgattattataaaatttaaacaactcagaaaaataagaacgcagaaaaacactccaaattccactttccagaaataaccattctcagcatttgaacatctttccagacatttctcagtgtgtctatattgagcaaaatatagctagatgtaattttaggaaaatgggatcacagtatacatggcattttaaataccaagtattaatttacttttacttgaatttaacataagaaagagagattgaaataaaactggaggagctgttgattccactcagataaatatttcattaccataaatgatatagccgatttacaaatcccattatcactattcaaaaagaataaactcagtctaagagtttgaaattaacatattttttctttcaagtacgactatttattaggagtcaatttcaattgttttctattctaatgtagtgatggtcataggaacagagcatgtttgaaagttatgtagaggcttgtagagcacaaagttaacatattaaagcagtgcaatcactagtgattttctataaaagatgaaaaaataacaaacatactttttaacagatcccctccccctcctctgatttttgatatcttattctttatacattgatttagtacattttttgtttgttctgtaactgtagttattaaagctatttaataacatgttccttgttccatttaaaaatagagtttgtgctcaacaccagccctattactattatttcgatattactgagtttgtttgtttgaatggttagattttgtggtctgggaatttgttaaggaagcacttgtaagtgctttttactaagcacttacaaagtgcttaattttactaagttcttaatatatttgagatggcctatcagtttagtttatagttaaaggacaactttgctgaatataaaattcttagttccccctccccgttactgagatactttagatattattatggtcagttcttcagtggatagattaatgagaggggtggaggtaaatatctgctaagttgtcaatcaatttgctgaataaccaactcacccaatttaatgatcaatggtaatattttggggtaaggaaaagatggggagtttactttgggtatgaattttgaatgcctgttaggcaataaaatgaagatgctgagtgatagagaggttgggctgaagatacatacttgaggtagacagaataaagatggcaattatgacatggaattggatgatagtacagatggagaaaagaaaaggtctgaggactgggcactgtgtgtgtactccagcagttagatgtcagaagaatgaggaggaatagcaagggaatctgagaaggaacttcattaagctggtaagaacactacttgaaatctcaaggacaaagtgaccagctgtgtcaaatgctgccaagaagactgaaacttgaacattggaatgggccacttagaagtcatttgggtcgctgataaaaatcaatgtagcaggcaaactactgataaaccttcttagagaagaaaaatataatcttacatataattatagaaaatactttttaaacaataataaatgatagtcaactctaacaataaatttggacattagcaattttatccatatgccataatgcttcctatgtcataatgtcttcctttgataataattttatgaacaaatgaaaccaaaacaaaacccttttatgagcaggagaaaggagtgagagcataaatgcagaacattttactcttgttgagtatttgttgccttcggggaataagacttcagagcaggttggggaatattatttatattttctgcatttatctctgtattgtttgatattacaatttacttgtattattttcatagttaaattatatactaaaataaaaaataaactatgtaataaacagaaaatatcaatagtggcaatatgtgacacacgaatgattgcttctcttgtcctgagcccatggctttaatgttacctgagagttatgggagtctttcctttgaattccatacttgacctcagagtctattgacacagttttatagatagtcatgcgaaaatgactgcagttagtcttgaaactgatttcctagccgtagtatagatgatttctttctttttagttttggctttctaattattcattttaattattaaatgcctatactatgcatgaaattacactaagaggaactctacttggaggaactaacggtctatgattcaaattatgtgcatcttctttttggggttcagtagaagcccaaatacttgctgtttatcttaaaagtgatattattccaggttctgtctgtgtgacattctcttttgctaactctatgcactctctctaggcttttacacctctgtttcaggaatcctgaatcagtacctctattccagacctctttttctcagtttggcatccttgtatccaagtcagcatgtctaatatagaacttcttatctttcctacctagtatgaccctcttcttttatatgctgtttgaccttgttgtttaagcaaagccattttgcctaaggtagtgaatctaattgatgcataagtcttaattttattgcttatttacttctcttktccttttcttttctacatatttgttgctactatcttggttcagactttctccacctctcacctatacttttgtagcagtctcctgcctcaggtctcatacgctccactaattggcattgccacaaaagtgatttttctctagcacaaattacataatatcaatcctattcttaaaattattcaatgactctctgttgccttcattagagtcacatgactggtgatttcacatgccttgtatacttcagtgatttgcccaactttgagaaaygctaaagtttattttattattattattattatttttttttttgagacggattctcgctctgtcgcccaggctggagtgcagtggcgcgatctcagctcgctgcaaactccgcctcccgggttcatgccattctcctgccccagcctcctgagtagctgggactacaggcccctccaccatgccttatttttttgtatttttagtagagacgggatttcaccgtgttagccaggatggtcttgatctcctgacctcgtgatccgcctgccttggcctcccaaagtgctaggattacctaaagtttattttttaggaagtacagacttcaataatttataatggccacagttattagtagtttagcmgtggtaatttactatcaataacagcttataatagatgtgcatttattggtgaattggctaaaattccttactttaccactcagtaaagtaaggaatgaacatgaaggtagtaatgtaggggtaatcttgaacagactctaatttaaatttaaaaagtaaattattcacaaattatggtactttgactttaatttctaacaaattacttgtgacatacttcataaatgattgtctattattatggttagcaaaagctgggttttagatcaaagtccagactttttaccacaaacaaaaccctccatgattcaggccagtcatttatttattcatatatccacccatctgtccatctatttgtcaaatatttgttgagcacccagtacatcctagaaaattgttacggtccagggacatgctaatgaacaaaacacaggtttcattgtcacagaatcaatggctatcgtcctcagacttctaaggctggtctttgctatgtgcatgtccagtctcctcttctcccccttattatttccagcgagaytgactatttatgattcccttgatgcactgaactattttgtttttgttggcttattttcctccctctgtgtagaattttctcaatatggtgatcactcagctttactgtcacttctctgttccttgtttctgaatgggacctccactgaaagccaagatacacttaaagccaaatttcttttaaatgtaatttaaggccaggtgcagtggctcatgcctataatctcagcactttgggaggccaaggcaggcagatcatgaggtcaggagttcaagaccagcctggccaacatggtgataccccgtctctaccaaaaagtcaaaaattagctgggcacggtggtgcgtgcctgtaatcccagctacttgcaaatctaaggcaggagaattgcttgaaccccggaggcagaggctgcagtgagccgagattgtgccactgcactccagcctgggtgacagagcgagactctgtctcaaaaaaaaaaaaaaaagtaatttaaatgtatatattttttcacaagccttgcagacttaacactttaaaaaatcagctcggtgtggtgtgattgtagtgaggtgaggtggtacgtgtgcgtgtgtgtgtgtttgtgtgtgtgtgtgactaaaaagttgatataattgatggatttggtgatccaatgtggtagaaagaatgttggggttgggatactaggggaaatgaattgaaaaaatgggaggctttaaaaacataagcttcagtattcaataaaatttactcttctagaacacattgttcctaaagattatgggatagttttatgctttccttgctttatttattcgtgcaagtttctttttagcagcctttttggtgttctctttcttctatacacttaaatatatgtctgtgagtgtgctttactaaacattcaatttttaaaatcaactttattgaggtatratttgaatacaataaaatgcacccattttaatggttgattgagttttgagaaatgtagccattcaggtaaccacaaccataattgaaatataagatttctatcactctagaaatttctgtctgcctttttataggcaagctcccttctcaatccccagccacaggcaaccacagatctgcttttggtcactatcaattagtttttcaggtatttggttttaataccatttttcttgtttaaagttacctattagattcccaacccccctccttccatgatcctttatagagcttggaagctgctctcattcttcctttatctgtctcacttttttgcttctttttccaatacccctcactcctcttgcttcattcttcctcttcaaataccattattaattcattttctgctatataagtctactgtagactttggccacaagtggttscctaaaaggcttcagttttttccagagtcaaaatcttttcacctccaaatttcaatagtatcacctcttttaaggcgcagaaggtacagaataaacctcataaattataattttgtaaattcctttatactagttaccttytctgtggcacctggatattgtgtatgaaactggggaaaagtaaaacaaaagatgacagttaagctcattttcacaaattatctttattataaaatacagtaatttataataactaggagtaagaataaagtggttgatatgytttggctatgtcccctgtgtccccacacaagtctcatcttgaattatagtttccataatccccatgtgtggtgggagggacccggtgggaggtattgaatcatgggggcagttaccctcatgctgttcttgtgccagtccgtgacttcttacaagattgatggttttataaggggcttttcccctgctttgctttcacttctctctcctgtsaccatgtgaagaaggatgtgtttgctttgccttctgccatgattgtaagtttcctgaggccttcccagccatgtgaaactgtgagtcaatttaatttctttcctttataaattgcccagtctcaggtatgtccttatagcagcatgagaacggactaatatggtaatattaaaactttaaaaattgtgagcacatttggggaatgaatgagtctgtgttgattttttcctcttacaaatttaatatctcagaaaactttgcttttaaaaagaagtttttktgtgtgtgtgtgtgaaggacatcacagctggttttagtgctgtttactttccttgttttatttatggaagtaggagggaattacttaggggtagtaatttaaggctatttcagttggcatttaattgggtttagatgtcggaagatgcatasagctagatacttaaatagagggtttacagtggtaaaatagactaggagaacaatcttatgaactttgcaatatgctttcctacttaaatatcttccaaggtgtgagcctttaagctttgccttcccttatctccacctacttatttaacccttctatcactctgaactgtgcaagaaataacattcttggttatttatttattctgagtaacgtatagctttattctgcctaagacacttcacgtaagttcctctggagcttgtttgggtaaatagaaacatctatttagttgctcctttaatatctacttttggwggcaattttttttaaaggaaggatacatttgcaggctaacagttcttggtacagaacaatgttgcactgacattttcagaatactctcaggagtataattctgctccttttggccggcaatggtatgattaataagggtagaatttcatttttttgttctatttgggatttctgaaatagycttggattaatttagaactacttattataattgtggtatattgatcaatagtaagttgaccctgtttgctgctgttttcatcacagttcctgttctgcaacagatcagtcaaaacaacataataacgacttctttctgactgtatttctgtgaccagctgcacacaaacacacatgtacacatcaacacacacacctgtatacacacacttattcttattagctcccttcatttctctctttgtgcctcttctattgtctcccaggcttctcatccatgtccacatcattttttctccttaattctcttttatcttacaatcatacttccacctcccataccttttcctacagagtgaaatgtaggaaaggtttatgaagctctttagacttgccacaaacatcagccaggagatgctgctgtaagatgacatagtatttcacttgatgatggtgagtgagtagtataatttttttacttggtwaatttatgtaagcaagcactcaagaaaaagtttgtgcatatttttttcaaactgagtcacaataaaggaagtgagagattttgtggctcttgtgacagccacaaaaaaatagagtgcattaatcatgttgcataaaaagacaataagaagcaaaggttgaaatgttaaactttttgagatgagtcataattgtaatggtgctatttatcttcaaagtttttcacaaaatgaagtaacatcctctcagyagtcacaattatatgagcacctttcaaagatgttggaattaaggttaagaggttaaaaagtcacttcagaccaagagtagaagtaaactttttgagaattaaaattcactaataggaaaaaaaaagttttgaagtaggaatttgtacctctgattctggttttgcctttgcctctaaatagctgtgtcatttttgacaggtctctcagttcctagtgacttacttcctggctcccaatgtccttaactttcaaatgagggattgattaactgggtctctaagtgaactttagtacttaaatagtttgattgaatcctagaattctttctttcctttgaatattatgctcagtcctcttaaatggaatgtttaattaatgaagtctttccatactcattatgcatataccacttaacatttaggctagaaaaaaaatgtctcaaagatgtatgtattagtctattttcatactgctatgaagaaatgcccaagatggggtaatttataaagaaagagagatttaatggactcacagttccacatggctggggaagtcttacaatcatggcagaaggtgaaggaggagcaaagtcatgtcttacatggtggcaggcaagagagcatgtgcagggaaactgccctttatgaaactatcagatctcattagacttattcactatcacaagaacagcaaggaaaaaactcactcccatgattcaattacttcccccccgggtccctccgatgacacatgggtattatgggagctacaactcgagatttgggtggggacacagctaagccatatcaatgtaattctgtaatttagtctcttgaatgttgaaaggatgatccagtaagtatgtaggccaaaagaggggaaggaatgataattaaatgctataatgtgctagtttggcaatttcctgtcatggagaacatgaatgattggagttttatgagaacacatgtagggtagagtagcagaatcccacaggaccttctgagaatggggaccagataatgttattcctcttagtggtagtttcatggatcttgactctagcactctaccattaataagactctttctttttgtgtgttaattcctaattccactggttaatttcatccatatttttcctttataggtcccgagtgatgaaatctgatttacctagccacttaccacttccacccattgtacagaatttaatgtacacgagaattaatgtactggtcacctaatggccactttgagatgcttggagcacagtctgaggtttgggggtataggttgtacactcagtcttagaaagaggtgataggcaaagcaggactcaatatctgatactgacatatctagaatactgaaattaaccactgtagcttttcaaggatagtcttcaaataagcatgatgttttccttcatgaaattagactagacaagcactgaatgggtctctgatactagtgctrtggtttatatgaatgggatatttagttgctgaggtaaaaacaaccaaccaaccaaccaaacaaacaaacaaacaattaatcagtagcatgttgtatagaaggcagagattcaggactgcaaaggcttttcatgccatctgttggaactcagtatatgacgatatgctatgacttttaatcaattagcattactgccmgtataatttgatcagttattagatactgctttctgctagttgacaagttgatttcctttacttttctataagacactgaagagagaaccgaaaatgtagcaatagaatccatttgcatttttttgcatttattaattatttaatcaacataataaaagatatttttttccatactttcctgatgaggaaaatgaagtccaaaaatactaagcaacttgttaacagccatgtgtctgttaaagcataatgccagagtttgaattcaggtagattgtttccagaacctgcagtcacccacaatgcataactttcccttcttgatttttacatttttttgtatcttccttcctttttatctcctgctctgagtctttgataggttttctctgtgtgcaaaatgtttactttcacttcccatgaacacttacattaaagtggaaatagtgtttcctctggaatactcttcccaggaaagccagatatgtgaagggttttaccttggatggatgggatctagaagtcaggtaaaatccttaatccttgtatttttttwwaaaaaaatccaccagcagagggctctagagaggctcagagccaaagctatcaagaaaatggtccaatgcagtgtgatgatctggggttgtgggagactgatggagaagaaaytctgaggagctattagctggtaaaatatcatcagcacacgcatgctgatttttcctctttttccggccactcattgccatttttgaaacttcctctgtaaaacttctttccaactcttgttcctgaggtttatggtcctggttttattaattaaggttcctggatgtcatctttagctacrtgttaccatttaaggatgtcaggcagtgtgtacctgagagttttctttgattaataaagagctcttcttcaatcacctatcttgcaacttgcataactttattggaatattgttcatgcttttgggagtttattccaacatattatttaaaagacattttgtgtcagtagtgtctcttactcaatataccccaatgtctggtataagaagaatacaatcctatttttcccaaactttatcttttattagctcgttctgatgaaggttccagttcctcccatctaaaaaaattaaaaggccaccactttccctgggctctataaatttttttttgctatcagttctttctatccctgactgttaagcttttttaaaagagaaatttgcacctgctttatctgtttcttcacctcctattttctcctcactttgcttatttgacttctagttccaccccacttctgaaactcctctggcaaatttcactgacttcctacttgtcaagcacactgattctttttcagacctcatttactcaacctataccatagaccaatatctcctcaaacgcttgttttgggtgtgaaatgccataatagtttttcttgtgttttctgatcattctgttttggtcacctttgcttatttttctttctgagctcagtcctgtattagcatccactgatatctcttctagctactcaaccagatagtcaccaggtcctattgagtctgcttccctaatctctcaaatgaagctacttccctccactttcacatctaccactctagtgcaggttcatccttttttctttttttaactgtaatggtatcctaacttatctccccacttctagtcttgcccctccaatctagctttatttatttatttatttttttacaattcacattgtgaccttttaaaaaggaaaatattactcttcaactccctgatttaaaattcttccatgattctctatagattttagcatagttagcatagggtacaagacccttctttatttctcccctacatacctatctagacttttcctcttcacttttcactttttactttaatacctcccattgtctctctctcttttttttttttttaatttttttttttttattatactctaagttttagggtacatgtgcacattgcgcaggttagttacatatgtatacatgtgccatgctggtgcgctgcacccactaacgtggagtctcgctctgtcacccaggctggagtgcagtggcgcgatctcggctcactgcaagctccacctcccgggttcacaccattctcctgcctcagcctcccasgtagctgggactacgggcgccccccaccactccctgctaattttttgtatttttagtagagacggggtttcactgtgttagcaaggatggtcttgatctcctgacttcgtgatccgcccacctcggcctcccaaagtgctgggattacaggcatgagccaccgcacccagcctaatacctcacattttctaatgcctttatacctttttatatatagcttcttctttgtacctcctcctcttcccttatcctcactccttctgcttgacttactatactctttaggtcatagttctgggatgtctcctccagaaagcctttctctgatcacagagtctagagtacataacctgctttgtaccttgatgaaatactaataactataactacctgcttattttttgtttccctttgaaggcagaggacaattttcctttttcctttgagtcaatagcaactagcataacgtcagacacrtagcagataccaagtaatgattgggtgagattggttagctgatccttccaacacctcaaaagatacaccttttattttatttagtagaaaaaaaaccaaaaatagttgtaaatagatttctttcatttcagagaaagccaagaggtaaatttgcaggacacatttgagggacacattcataataatcagataatatttatttcagtcttacttttattttctaacaaagctcagtttaaaacaagtttctgctgactgtccagaatcctttctaattcaagttatcagtgtcgtgaaagatgaaacattgatgagaatgtgtgtggtaaagcagtctataattataaacaaggcttcttattcttgtgtatgtacttgtcctatatagtgaagtgcctatggagagatgggtttgacaaggatggctgagacttcacattcagacaaattctgaatagatggatacaagcattgtataatagaaatagatggagataggggcacggtgaagtggtgctgtctaaaagtcaataatggggatgcagacccttaattttgcccaactccacattatatatgtttacatctcaagcatcaaggcaatgcgaatgttaaagtgtagtatagaactaagaacaaggaggaggctagagcagtttgtctagctgaaagcaagagtaagcccaaaacggtacataggattaaatgcaaataaagaaatatagcttataaaagagaaaggaattaagtaagtcagtaggttgtagcttgtgggtgaatggagcttagattatggcattcagaagagggaagggttctgatatgaacagaaatcctaggagaattcagtgacaggttagatcctcacttagcagatgcggcatggaaacaaggagagacttaaatatctaaataggggaaaggaggtgattataaaatgaataatagtaacaatccctgacatttctttaatatctacaatatactgtattatagggaacaagaaaaggggttggtcactaaccataaaagaactttcttattggaatctagttattagcttaaatagtaaatgaccattcctgagaaaccattcttgccatggaaattgcaaaatattttaaatttctagcttccttaaatacatgttttggagttttatcaaaacttgggtgtgttaacaaaagcaaattaggcctgcatgccggatctcctctatttgttccttcagatacatctttcttcttcagcctggaaggctgtaatgtacaaaattatctggttccctcgccttctagattctggttgaatttggccacttgggagtccaggttgacaactggaagaagggagaaaatgagactttgttatttattatattatccccttgttattgggtttcctagggtagcctgggtctcttgaccaaaggtcactgattctctcaaggtggttgtctctatggctttctctggtttcaaatacggatctgttctcttgtctctttggacctaggattggtaacagcttcacagctattagcacttggttactgcattataccttatgtcagtggttctcaaacattggtgcacattagaatcacctggatgagtttrttacamtacagatggttaggcctcactcccaggatttctaatttaataggtctcgggtgaggtccaaaatttgcatttctgacaggttcccaggtgatgttggtgctgctggttcagagaccacatttaaagagcctatgttttccttgtcccttgcctatagctttattaaattgtccttttattcaatcctttttcaattattctaatttggttataccatctgtttaatgctggcaccctgcctagtactctttcccactttaccaaaaatgttcctagtcaacagaaccaaaaatgaaattccggaattagttttgtcatgtattcaaagtgtacagcggaagaaaatgggacatgggcagtttatggcaggaggtggcataattactcagattatcactggtggtaacatggggatgaagtgtacatggaagatagattattggaggtcaagtggctgtggttcttaattgtatgtcagtgataacttatttaccattttattttattttaattgacaacaattgtttatatttattgtataaacattacatttttaaatatgtatacattgcagaatggctcagtcaagcgaattgatacatgcattacctcacatacttatcatttttgtggtgagaacacttaaaatctattttcttattgatttacataatacaatacattcttattaattgtagtcaccatattgtacaatagatctcttgacttattcttcctattgaactgaaattttgaattgtttaaccaacatctccccaatcccccattcctccagcccctcgtaactaccatcgtactctcattgtactctctgcttctgtgagttcaacttttttagattccacatataaatgagatcatttggtatttgtctttctgtgccctggcttatttcacctaacataatgtcctccaggttcaccctattgttgcaaatgaaaggattttctttctttctttctttctttctttctttctttctttctttctttctttctttctttctttctttctttctttctttcgttctttcgttctttctttctttcttttttctttcttgacgagtctcgctctgtcgcccaggctggggtgcagtggcgcgatctccgctcactgcaagctccgcctcccgggttcacgccattctcctgcctcagcctcccgattagctgggactacaggcgcccaccaccacccccagctaatttttgtgtatttttagtagagacggggtttcaccgtgttagccaggatggtctccatctcctgacctcgtgatccacccgccttggcctcccaaagtgctgggattacaggcgtgagccaccatgcccagccaggattttcttatgtttaaaggcaaaattgcattccttatatatatatataccactttttcttcatttatctgttgatggacacttaggttgattctatatcttggctattgtgaataatgctgctatgaacatgggagtgcagatatttctttgacatgctgatttcatttcttttgaatacatacccagtagtgggattgctggatgatatgatagctctatttttagttttttgaggactctccatgctgttttctataatggctgtactaattgaccttcccaccacagtgtacaagggttgccttttctccacattctctcctatacttatcttccatctttttgataaaaaccattctaacaggtatgaggtgagatgtctcattgtggtttttaataattgtaaagattgtggagtccctggcttcttcttatgtctctcaggaagttaaatagaaaaaaggagtaatttaaaaactaggcacatacaattaaggacatgtgtggacaaacgaagctctccactgcagacttgaaagagtttcccatctcttccagattcagaccaggtatggctgaggagcctctggccctaaatctaactcctcctggctcactaagggatttggctactcagtgtataaaagtattttacttttgctacaaaacataccataacatcatgttgtataccttaaatttatacaataaaatttattttaaaacttaaataaaaaatattgtacataaaaaaattcttacctgtctcacaggcagatgctgattaacctcaggaccaatctttgccacctcttattgactcaacatagcccagatgggaaggtacaaggcctggtccaggagaaacagtttatacactgaaagaggtcaagaaggtcaagaccccaccagtctgtattggcatacatggggagtgaatgctaatgttcatcaggctaaattgttgacattggtgtactcacctggaatttagggtttaatatgttggtctgagcacttgggagaggcattaatagtctatgaatatattaattgaagcctgaactcaatgatgacctatagtcaataaggtagaaatgtttgagattacctgacctactctagaggaaggaattcacaggcttggggaaacggaaatgctagaatggatcagccaactcctaaccgtactccctaggaaggccagaggatgctgttttgatgaaagcactataatatgcattggtgagggggataacagcattgttaaatagctctgtggttgctgtcctctgtaggaaggagatgactgtaggttatgccataatggaactgagtttcctgatccagtaggattcatgatggtttgacagtgatggagaccagctggtggcccttaatcattacaaacgaggtgtttgaaattacaacaagccacagggatggagttttgacctgtaagcatctatgggaatgattttcttttctgtattttttgtggggggagcggttttttaacctcactgtgtgtcagacttatgttgggggcttgctaaaacccaggttgctgggccccacctccagaatttytaattcaataggtctgaagtggagtctaaaaatttttatttctaacaaattcctaggtaatgctgatgctgctggcctggacatgacacttcgagaaccattaatctaargcaatagctaactgatgatgtagttctaagaatgaaatacatgtgcagccttccaatgtactgtcttacatrtataggcagaaaaattctgccttatgtcaagtcttgtgggcagaaacaatttaacttagtgttttcagatgtatgccaatttatatattaggtcctttcaattgaggaaaaggtcaggtctctttgtaaaagggccttgcaatgtagcaatggctgtatattttgcattttttccaagccatctctaaacatatttctataataatagaggaggaaactgtgtggtcctgatttatggatgaatctttatggcatactgagaccagctgtaattggataggtgctgcactaaaaccccayatggggatgaccctgaaagccagtgggaaagagaaatcttcacaatataaagaatcctacagccttctaccagggtgactttacacgggagaaaaggaaataatactcagaacttctgagttattcgattctggctttaaattcattctgatccccagagactctaaatgccaccatagtatttaaaagtcagagtagagatttacgtagatcttgatcatattctaaatctaacagcatttcttagtctcagaatatataatgagaatagatataattagtaactggtggaatcaacacgttggtttcttgatccatgtaatgaaggctattatgataagaaagggccaagcagaagctcctggaatgacatttttcacctagctgaggtagtaaaccaaaagtaacatcacattcctgagggaatgtcagagattagtaccaccataaaagatataactaaggcgagtggatcatgaggtcaagagatcgagaccatcctggccaacatggtgaaactccatctctactaaaaatacaaaaattagctgggtgtggtggtgcgtgcttgtagtcccagctacttgggaggctgagacaggaaaatcacttgaacccaggagatcgcactactgcactccagcctggcaacagagcaagacttcgtctaaaaaaaaaaaatgcaacatatgaagagtgactattcctactacatatttgtttaatttgactgtttggctgatgcaaaacatgtgggtcatggagcatgagagtatatttttgcagacttaagtaggttgtgatgctatttgcacatatagttccagttgtgcaacatttatgggaactaactagcacagccctttagaagttgttttattttccattaacattgatatgaaaaaatcagaagtagtttgcatttacatggcagggacaacagtatatctttacaggtttaccataagtaacacctagctgatcactcataatctagagggactttggtttcttttatacccaatagaacatcaaatatactattaaattgttagcgttatgctaattcggcctaacaggcaggaagaagcaagtactatagtaactttagatatatgcatgttggagtgtgggagataaatcctgtaaaatttgaagggctaaccacatcagtgaagtttctaggattagagtgacactaaagcaggttattctaaagtgaaaaacagattattaaacctgaaccttgaaccccatccaccatcaagcacaatgcttggtgagacacttcggattttgaatgcaatacatattaccttcggatgggctactgctgaccatttactggataaatgctaaggctggcagtttgagtgaatccaggagaaaggaaggtctctgcattaggtccttaggtcctgtctgcattacagcctatctataagatggtctcagctgttatccttgaaaaactcctggagtaaaaatcatctttgacttaacttccgatatgattcagtttgggattcccatgtgactcagatgaagccaacttaaaaagtacttgtacatcttaccattccaatgactgttatgcctcattaattttatggcccagcaggctcaatgtactagaaatgtatgcgatagacagaattactatttggagtttctggaagaaacctcaaaggagaatcatggccagatttcttatctgccaacaactattttccatttaaaaagcagtttttctggcttgcttctggaccctacatgaccgcaggatgcaaagtatgtgacctgacctgtccataatgarcaaggtgttatcgaatccagtgaaccttaaaataggatgtgcctaagagcattccagtagtaatcagatgtggcatattaagagcagcctgagagacccagaatgcccaccaagtaaactgcacaagcaggtgatttacactcccatggtacttgattctactatttctctgcctcttcttcagtccatatctatggcttcgtggggaatttcctatgatatgttaacagagaaggaaaatatgtggtccatttatggatggattgcatagtatactgaaaccagctataggggataggtgtaacctatgcagggaggaccgtgaaagacagtgggaagggaaatccttccagtgggctgaactctgagcactacatctagttgttaatttcctatagaagtaaagatgtcctaaggtatcaatatgcagtaattcatggatggtscctagcaaactgattggctggtcagggagttggaaagaaaatatttgtgaagttggtgacaaagaggatctggaggacacctcttggaactgtcatggagtgtgaggatattcctgtctcacattaatgcctaccaaagagattcacagtaaatgggacactcagttttcaggtggtcaaatgactcattctgtgaatgtcagtcaactttttccagctaccctgttgcttggtcagagagtccacgtacaatgtggctgtggtgactgactagaggtcatacaaagctcaacaatatgggtttttcctctacaaagctgatctgacttcaacaagttgctgactatttaatttgctaggatcagggaccagcactgaactcttttttttttttttttttttttttttttgagacagcgtttcattcttgttgcccaggctggagtgcaatggtgcagtcttggctcactgcaacctctgcctcccgggttgaagcgattctcctgcctcagcctcccaagtagctgggattacaggcacctgccactatgcctggctactttttgtatttttagtaaagacggggtttcaccacattggccaggctggtcttgaactcctgacctcaggtgttcttcctgcctcggcctcccaaagtgctgggattacaggcgtgagctgccacgcccggcccagcactgaacccttgatacagcatcattggtcatccaactaccaagtgacaactggattgcattaaacccctttcaacctggaggatgccatgctttgtcctcacaaagaaagacgcaaagtccaaatattgatttgccttttcttacagtgcttctaaaatcgctgccatttttggacttataaaatattttatccatctccatggtatacccataaaatcaccttcaattaacagacctttttatggcattagtgatttcaagcccacagaatttactgggtttactgtatgtatataattcagaaacagctagctttgtagaatgatggtctgacctcttaaatgcttagccatagagctaggtaggcgataatgctctgttaggctatgatgctgtactgcattgtggtgtttgccttaaatgagcatctaataatattttagagagaaaagaaaaaaaatgctataatttcaactgtgtttgcttcctccagaaacctctttgctgagataatataaattttgggttaaaaataatatcttacagggtcattgcttactcacacttcacctttgtcagaaattcttgttagactgagacatttaactttgatcaccctgaaaaattcatgatatctacagtgtctactatggaccctcccttagatgtggcactgcaatgaactgcgcatcctgagcatccgtaggtagtggccctgcatgtgtatggtacattacagttttcaaagcctgttgcatagcattttgtatcagcatctgagataaatgtgataagtagtataataaacaagatttaacagaataaaatatttgcatcacaggtgtgtgtcttctaatttaagttgattttattcaactcttattcttcttactccagctaattaaaacccacattgacacttttaggcaatgaacagcaaccccagatgttggctttactgcctgattttattgatttcatttgtttgtggctttagctgtgagtggctgggtacattagaacttggtatggaatctgccactttaggaattgaagactttatttactttaaatagctgcattatggcctatatataagcaggtctcagctattatccttgaaaaactcctggagtaagaatgttctctgacctaacttcccatatgattcaatttggaattcccacgtgactcaaatgaagcaacttagaaagtacctgtatatcttaccatgcccgtgactgtatttccttagctgctaatcctcttctattccagtaaaaatggctttataattttacaatttatgatctatctgttgtcatgaattaacttttaaaaaatcctgctttctttctgagaccttwaagaaagaattttcttttgagtattttcatttttatttcaagagaacaatttaaaatatgttttctcacagatagtaggcatttaattagtgatcatgaaccacttactacgttatgccccaaaattacattaaagaaggggtaattagtgatagaagccaatgctaaataaatacagaaattccattctactgaagtccacttcatgggggcaggatgtgtttttagtattarcatctttggggtgaattatgatgttgttgaaggcatttaattcaaygagtactcatttttattgtgtcastttttaccaatactgctaaagtaacagaacattctattcctctaatttgcctgagcaatatatcgtagtcattagcaagaattagaactgtacctaccaattactgaacaaaaattagggctgtaaataatcacaacacctcrgtctaggcagatgacctcatctgcttattttcctgccacgtataacaaaataatggttggtaaaggatattaacagctgttttaatttgaaattaaacttttataaatcaaatcagtactttcccccagtaaaagagatcactgagattgatttaactgtcagtgtcttaaatctttttaactcctgtctcagtgggagaactggggagtcacttttttagaattcctttccttggtgcaagtttcaggtgcatgataaatttatttgatttgacaatatacatagctttgtagtcattattcttcttcttaaaaatcaaaacattttatttgtaaaaatgttacctgaattgatagtgtgatttttaaaaaaaatcaaattaagaataatttgtggaacagaagggaacatattattgagaaggttaacttggtgtagttgaatacattttaagtttgaaattcttgaatgattgtatgtatgtaattaccctgaaattgtagcaacacatagtctttttccccacctatatcttgtgtctattggtatatttactcgagtattagatttccttatatatatttgggtctctaaatactcattgatttatttttttcagcaaacagttattgagtgccactgagtgccaaacactgtgcgaacactcaaaaagcgaggtgttggggacaacgaataagacctcatcctctttgtaggatgaaaaagccttccaaatagaatctataactttgactggtattagataagcctttggagattctttagtgactgcagtttgtttaccatgctcagagccaattgaacctagagcacttaaaatgtgtaatttatcgtatgtttattgcagcactattcacaatagcaaagacttggaaccaagccaaatgtccaacagtgagagactggattaagaaaatgtagcaaatatacaccatggaatactataaagccataaaaaatgatgagttcatgtcctttgtagggacatggatgaagctggaaaccatcattctcagcaaactatcgcaaggacaaaaaaccaaacaccgcatgctctcactcataggtgggaattgaacaatgagaacacatggacacaggaagggggacatcacacactggggcctgttgtggggtggggggagggggagggatagcattaggagatatacctaatgttaaatgacgagttaatgggtgcagcacaccaacatggcacatgtatacatatgtagctaacctgcacgttgtgcacgtgtaccctaaaacttaaagtataataaaaaaaataaaatgtgtaatttagaaggaggagaaaatttaatatgtacattgataacatgttccagtcataagtaatccttaatactttgaactacttagaaatctgatatagtgtctagtaaggaattgtataccataggagaatatttattaaatgaaacaaaattaattaaattctgccctgtaatagaaattgacattcatggatggacacaatttaagctgatttttatctgtaagctttatagatttttcttttactagggctccttccaactaccttctaagaggacctttggagatgttttcctcaaaacattaggttgaaaagtctaatctacttataaaaaagaaagtctacttgatcaagcttagcaactttattttcaggaataatttttttatgtaacctgatattaacaaggaaataggtagtatttataacttctttccatttagagaacttctgatggttctgytttattgactcttcttaatctactaattctctttaggaatttatatgattcaatatcctaaactagartggtttatttatctagtattggacaaagaggaaaaagtttcaagtgctgatagttaccaaacttccaaatccctgtgagcccattagagttaccagaaaacattaattgtgatacatggtgagcacacaggactttctgcattaaacacatctcaaaccacaatgatttgttcctatttaatattgccaatcagaaatgttgctctttgaaagtcattactatttttacttgaatctaaaatgtattaacagctttatggctttttattaactgattattaagtaaaactaaagctttcaaagttttcattattacaaacgttgataaaattgttctatcccttagagtatggtttcattgtagcagttcaaagaaaatagccaagtaggagtttatagatataaaaatgggagggggactaattatggaatctgaaaaagtaaaatgatgtggtatcatttgacatttaaatttgagaagtagatcagtatattacaatcattgcgcttattgttttacatgaaattgtggagaattgtctggattcccactttactttgttgggactcggaaaaaaaaatacctcaaaatgaaggtctcagaagtgaaagcttctttgactttctcctgccctcctgtctctcagccccattcacctacatccagccatagaaatgagaatccctcttccccagggcatgtcgtagaaactagaacttcttttccctaaagccccccataacacctaaaaatattactcaaactttctctctgccctgctgtgtaaaaactggccataaagaaattatctaactgacattgttttactgtaggtcttaagacccccacccgccattcaagagagagtcctgccccatacccggaaggaagaaaggcatgctcagagaggccaagaagagtctagacagaccttccccactcaacctattagcattaggtagtaaactttttgtccaatcttatttgagtatggctgttcatactttgttgaactgaagcatataaatggacaatttcccctgcatctttgggttttcattctgaaggctctcatgtacacattaaatacatttgtatgccgtttctgtaattaatttgccttttgtgagttgatttttccatgaacctttagaggctgaaggagttttcccttggtctctacaacttttatytttcatttttcatagaaagctgtgttaacactagtaaatcatgtgaagaggttacagtaatatgcaaagctttctttttgtgtgtgagtggcggtgtggccttttaaacaatctaggtatttatggtagatggttacatagtaaaacgaaccccagtgaatcagctgactatgaagtattgtgtgaggagataacaaactatttgggtgctcacaatggtagatgtacatgagcttctgaacaggtcacaggaaatgagaaaagatgaacttaaaataaatcacttgttagagataacaatgagaaatgctagagagaggagaaatgctttgtaaagaggtgggtgagcaagtgctgtggagacctatagaaaatcagtggaccaggatagatcattcatctttcacaccaagctcacaattttagccactcaataggttaactatctcttctgtgtccatgtaccatagatcacactgttaacaccagctgtgtcactattagtggggttatttttatttaccatagctagcatagtttgggagctcaccacgtcccaagcattrtacatgtattattttcttttacatatgttatttcattttctccttacagctatttaatgaggcaggtgtcaatatctccatttatagaaggggagactgagacttggagggatcaatttattatatagccaaaaacagccagagagcaatgtgaatccttgtgcatctgactccggagtccatcctttcaaccttatgtttttctatcatctgtaacatcacctattatattacataagaaagggtgaacaaataagcaaactcaacatcacmcacacatcaattatgtgtgacagactgaacatggattagcagaatcttcttttaatttctgagacatgtaagaggcagaatattttaggatgtatagctgcgaggggttgcagaactagtcttggagatatatcagagtgcttaattgatattgttagccatttgctctacatatttgttaacaatttgctgtattttgaactctcttactgtatgtctgtcatagttcttggaggaagctctggagtcagacatctttgagtcaaagatctggttatcctgctagtgatgtaaccttggtcacatttcttacctcttgttgcctcagttttcctggttggaaatggggacacatatagcatctactttatgaggtgtttgtgaagattcaaagtgataatacacataaaatgcttagaacacatcctggcacatagaaaagttgcataaatattagccatgatttttatggttttgcatatcttattaaattcycaattgtctcaggctatgttgatgaaagacacagtatttctacacctttaagacatgaataacttttaggctataatacaagacagtcatgcaaataagcatatgtgctcatgaatgtttgtgattaatttgtttaaattctctttacataacagrctaggatttgtggtgctacatgccacacaagttgtgcaggtctccaataaaccaaaataaaataaaaaaagcaggtattactccatcccttaacactgtaagcagggaatcactggagctgctagcatttatacattgtatgaaggataccacagttctaaagactgctratagagattctaaagactttggtgaggcatggtagctcacatctgtaatcccagtactttgggaggccaaggcaggaggattacttgaggccaggaatttgaggccagtttgggcaacacagtgagaccctgtctctacaaatgtttttttttttttaaattagcctggcatgtggtatrtgcctgcagtcctaggtagttgggaggctgaggtgggargatcccttgaacccaggagtttgaggcttcagtgagccactccactccatcatgggagacagattgagacactgtctttaaaataaataaataaataaatccatccatcaaccatccatccatccgtccatccatccatccatccattcatccatccttcctttgttggatccatgttacctgcttaagaaatgacaggcaatcaaaagataattgattagtttctcaagcactaataataatttagtatgttttgccctttgtctctagagccttgaaatacatgtactgaacatgttttagatgattattcctagatttgccttctttgtggtaagagatctttagaattttgggatatgagagggccaaatgtttgattaacggcttcccttttattttcttcctgtcctctgacaatcatttgttttgacacttagaccttggatgtaattaccctgatcctagtttcctcatctgtacaagagcaaaaatgatacctcttttaatgccttttttgaggatttactaagataatttatgtgaagctctggcatataacgatgtttgatgtactttaaaacttaggctatttgcaactggtgctttctttctctcctctctcttctctttttacatctaaggtttttaattggttttctgtctaataatcctgactcatatagtacagtactctccaaagttgaatacccagaaggcatgcacaatgatccagtggaacatctgaaaaatattagaaattctacggataattactttttatctaagtaaaaaacaaagtttagtaattatttaacataaaggctgagattagaacttgtatataatgtataaatacatatattatgtgtgaatgctgaagtttttctaaagagtgcttgataaaaaatttgtaaatcatttatctgttatttatttatttagagacaggatctcgctctcttgccaggatggagtgcagtggtgcaatcatagctcactataaccttgaactcctgggttcatgcaatcctcctgccctggcctttcatgtagctaggactacactactaaacttacctatcatttagtacctgaatgaagctttatgggtgacagacagaggattttrgaaaaactttctgaaaactttctttgggtccagaatttgagcaggtcacaaggaggtaatcttattacaggtgccagagtacaatgtgactcagtgttagtgcttggatcttttgattttttgcagtttattgtagtgtagcttcagtgtagttttagcatagttttattgttgttattgttaaagaaagaactatgttgcggaagctggtttgttccacattttctgttaaggttgcaatcttatttgaagagaaaaaatgcacagataatatgcagtacaaattcattgtttatattatgattagcagttgacaagatatccatcttataaactgaataagttctgtttaaattggttgcattggtaataaatgaaaagtggtgctaggctacttgttgggatttgtatgctaagaagattttctttaattttgaagcaaactgatagaagttcacacagccatcatctgtgcttctgttgttgggactcaaagacgtgtagtagaaagatttttcatcaagcttaactttacttaatgattaaagcaatttttgcaaaactgtgtcctacaggagaaatctgtattcctgttggatttcaaagacattttacaatactacttccacttgcaccagggaaaaaattttacagaatagtaagctatttgttttgaggattggactaatcaatttcagtgattataaacctctgatcttcacattgatgggttatgtaatggtgttgaaactgtgcatattaacaatacatgaaatggttttaaatgtcttttatgaacagtgtcaattagagaaggggctaaattgactgcaaaagctcatatttgatggcaaagatgctcttctactctcagtaaaagttgttctttttactgactcaaagtctatttggtactcttttaagactaaaactacacccctaattatataatcagggagagtactagagtgattataactacatgtttttctgcaatctttgaacacaatatcaaatgctggtgttctaagtagtctgtttccaaatatccaagtttagactggaccaagaatatatgttagaaaacatgtctgatgagcgtttcaaggctggtcacatcatctgattgcatttggaggacgcacattggcttgggctgtgagctgggtatgaatggctacaagaagaaaaatccttctataaattcaagtcatttgtatgcagtcagtgtgagaaatatgtgcataaggagtaccttttatggtgaacatacacaatagttccagaggattgtctttataatacatcatactatatgcaaagatatttagaaaatatttgcacgaaagtgatggcaaaaccattgactagtctggaatgggtttggctatcacaaagacaatctgtaagaatgttttttcttttctttttttttacaagatggagtctcactctgttgcccaggctggagtgcagtggtgggatctgggctcactgcaacctccgtctcctgggttcaagtgattcttctgcctcagcttcccaagtagctgggactacaggcgtgtaccaccatgcccggctaatttttgtatttttagtagagatggggttttgccttattgtccaggctggtctcgaactcctgacctcatgatccacctgcctccgcctcccaaagtgctgggattataagcacgagccaccgcgctcgggcccagcatgttttttcatgttccagtcaccatggagtcgctcagcagaagctcttgcttctagggggatttcagaggaagcgccaagaaattgtgttcaagaatctgtccaggtttgcagctagggtaagggtttctttcagtagagctgcaaagtcaaagcagaaataattctcaggcttgtgaaatgccttaagttgagacagctagtatttttatatcaactctagattaatattctgttcttttaaaattttgtagttctgtgttgtagaattttaagtcaggagttaatgcagagttaattttacagacatgaaaacttgtatcatgaaggccttcccatttcttgaatgtttttcttttgctacttagtacaacaggagaaaaattaggtgatttttttgggtaccaattttaagtttggtaagaatggaaagatgcttaaataatagataactttaagtaagtaattgcagagggggcagataaaagrcaccattcatcaagtgtcaactctgtgccagctatttagctaagtgctttacatgagctatataatgtaatcttcacattaaccctgtgaggtaggtaatattgtctccattttacataggaggaaactgaccatccagagaaattaacagattttaaaaatgtcctacaactagtaaatgacagaactgggatttgaactaagagctccaggctctaaagcacatgttcactttatagttttacttcccacacatggtcatttaaaatggcattatttagtcatagattgaatatagctgtcatgagaaatcagcttgttctgtgtgagggtaagagtcactaagggttatttgctggtttctttaaattgacttggagagctaagtctctaggagaaggcagatgtcttcatttactacctggaaggataaatgttgccacacttgcacaaacatattgtatttctagaaaccagcatacacatttgatgtggaatgaaaatacactctttgtttggcccagcccattaattttaaaatgcctagagcccaaagcagccccaaacagctggaatactacctgctattccaaaataggcactaaaatcctctatttataaaaaataaaaatgctcttcttttcttaacaagctttgttagtgaaaaagcaaccaaaactgattgcctggtgttttttcttactttgcattgagtcctgcattatattgctgttgtgatgaaatctgaagtatacacaaaaatcaaacacatttcctgcctgtaggaacctttgtaaaaaacaaacattaattatataaaaacatattcytaggccacacaatattaattttaaataattgagtcagtacaaacatatttttctattttatatagaatggattttctcttttcctttctatgtactttcctgtttacaaaacaagtgttactttaaaaattcattgtaattctttagactgcctcctctggatatttcatttttgatggctatttgagaatttattcatttatgcagtgtgaagttgtgcaaagagcagtagactgaatgtcattggcccaacttatagttttattttgtgaagggtagtgtctagcccagtgcctgatgtattgtaggcacttcttagatgcccattgatgttttgtaaaatctctgctagctaagtgactttgggcagttctctagccgtctatttccttattttaaatatgtgaagtttacggatgatttctaggggcccatagctagctctgcaatgctgtaaaggaggaaaaacaattttctcctctacctttcattagttattagttgggacttctaaatgtctaatttctaatgtttaaaagacattaacatgagaacagtgtcttctaaaacttctaatgtctaaaagacattaacatgagaacagcaaacagaagtttaataacgtgtactttctatatacatgatagctcagagaaatgagtaaatatctatttggagtaagtcttgaagaagtcacaaattccaggaacatgaagataatgggtgaggcagctagtcaggagcaaaaacgcttttaaacaattacccctgggcataggtgccacccccagggggtgaggggatgactgaagtcttatgtctctccaggcttgataaattttgtattcctcacatagcttagacttctctgagctatttttcttttttcaatatttttaacactcactatagaacttgttaagccaaatatgtccactgggaatgctataagcttattccaatgttttctccattggttataacattttaaggaaagttactcttttggaatgaggkttttgtagttaggttatgatccaagtgcaaatattaccctgattactttatagccatcaattggcttagataaaaaaatgatgatacattcagcctgatcaaatacctttttaattagactttgttcaattaaatttctcccaaagggtacatttgccattattaaaacattaatttttttttacttactcgctgtaagtacagataaaaatattcaaaatatatttaagtatgtgaactaccatggaattagtgttacttctttctaagatgttgcttttgaacaaaataatactaatttggttgcatgaattcttttgtcttcattgaaaagtcaattactttaaagatgcttctttgttctccgttaaatcaattcactcctaaatgtaattcaaaagcatagccccaggggagtacttttgaaatggcagagtggggacatctgaaaattcactccttaaaagcaatgagaacactggcaaaaatggtcaaaataactttttcagaactctggaaattaaggcttgcaacaagaaaaatggcagaattgatacaagaacaatgatttttgtggtgttttaatttaccctatttccatctccctctctctaggatcacagtagccttgtttgggggcaaagggagagcttccccactttccccaccccagccctctgaaggtttgctgaaaaatcactaacgtgaggcagattgattaataggagaaaaggcatacacatttattcaatgtgtatacacagtggccttcagaatgaagacaaagatacattatccatttttaggctgagattcaatgaagtatggacatacctgtagaaatatgattgttcaaaaggatattgttagtggtggcgagtccaaacaggtccgcagcaaccttcaattcttgcctcctctgaagaaagaatttgacygaggggcataaggcagagtgagagacccagacaagttttggaggaggagtgaaagtttattaaaaagttttagagcaggaatgacaggaagtaaagtacatttagaagagggccaagtgggtgacttgagagatcaagtatgtgatttgacctttgacttaggattttatacatttcattagcatgcttctggggtctgcatctctgcatctcttatatcctgattcttccttgcggtgggccatccagatgcacagtgacctactaggactttggaggggttgaatgcacagtgtgtttactgaagttgtacacatagtcacttgagatgttttttccttaccaactgagtgttcctagaggaaggtcatctgccattttgcctcttagggtgcgtgcttgagcccactcacccaactcctgagatcttattgggaagctgctgattaccagtttcagatgttatctgtctattgggagactgccttttcctggcactggctgcgaccaattattattttagcaagactgtataacaaccaccttaccatcacctgatggttgcctgacattcctggtgaagaagcagtggaccctctcctaccatgcttgtgtctcactaactaccttctataacaatatgatctagtgttaaaaaactgagtggggaaacccagcaagtcctgtctgtctagattcttcttgtcctctctgtgcagcagtccttccttctgggtgtgggatggggccccctctggaatgtcaaacaaaatagattagataatttctttatggcctgtttttacatagactatttttaggtttctaaggctggcttttgggaaaaggggtcctgctttctatgacccaccttggggaagagagattctagttttcatggctagccttgcgggagaatgggactgagagacaggcatgcaggagaaggtcaaataaaaatgtttgcttttgagctactgctaaggccttcattttgaggcattgttttctgagccccaatcttgaaagtcagtagtcacacaaccatggtagctgtgaaacccacagctgagcagccactgaaaaaagaagaatggatttggagctgcctcaaaagctccatacccctgagacaatttcataaattgtaaaactgygtttattgctttataatgtttaaagatgtaatttgtatcaaataatgtaagagcaaaacataaaatgtgagaaaagaaaacataaaagtagacttaggttaccatgggttaagcaattgtttttagatatgaagatccgcttccttctccttttccttttcttatttatgcttggataaatattacttcccttgagaagccttttcctatgaattgcattctctgcatcctactcaaatttgtgttcccatgggagtatacctacaggaaaacattcatcatgatgttatattgtttatattagtgcctttgaatctctctccacagctaggcttaggaacatttttgtatgttcaagactagcagtgtctgacatatagtagggattcaatatagagttataaaattttaaaataaattttggaccaagttgcgtaaggaatagggtagaattacttctaatagaaagtataagttaaaaaataatatttattatgatagtcttattttctgtttaatttactttaaatgataatgtgaaatcattatttgtgtaataggacatactggtattatcattaaaatgaaacttcacagttttctattggccacaatgattggcaactctctctgcgttgtcatatggacctatcatgaggttttctatgtagagagtagtcaatatttatttgaagaatcagtgaatgaatgaatgcatcttatggaagcataatccaaggatcttttccttagaaatcattatcattcttgttacattgaaaatgtcctctaaaaagtaagataaattgaatttgattcatttggctggtgggatatttatattcagaactaaagtgaattgattacatatcaattattcatgattaataatataatacaagtgattgtcccattagacattttttcatgctatatgacataaaggacagtaacaatctatgaaattgaagtatcttggaaaattaatttttattccaaataaacttaactaataaggagtccctgctgaattataaatatttaaagatatctgcaaattataaaccatcatatatattagaaaaaaattagtctgagtagagaagcagtgctgtgcatttttttcctgacttattgggctccttttaagctttgcaatcaaataaatttctctagtcactcagaagtgtaaataaagagcactcagcgtgctgatatattttatatttagtgaaggtgctgcagaaggaaaacaaaaggacttgcaactgaatcaaagtgatgaaatgtagtggattacatagatcaggcaataaataaactattgaccagagtatgtttaagtgaacatttttgttagaaaataactttgaaaatgctaaacaggtctttattgctactattggtcttatttagttaaatcttgctatttgattaaatcatttttgaggtgaaaaatatttgactgtcctctcattttttttttcaaaagtgtaaagatcatgacctaaaatcagtaataggagaaaaaataaagacagaatggtggagggaggataatgatgaaaatgtcaaacgtaaaaatgtgtagaattgctgtgttttgtggggaagcctactttccctctgatgttttgatgattgacacattttgccaaaataaactgacaatagacagacagattaacaggagaaaaagacacaaaagtttattattgtgcacatacatgggtatgagagtcccacagatataagactcaaagaaacagacagacagttgaagcttatataccctcttcattgggggagggaaatggaggaaatataggcaattttgagggattgtaaatgatttttagggaaattaaatggtcccagtgataaatgcaggaggcagataagggaacctgcacagggtcttcttgcctgggcatgcctgcaatgcactgggggcctatgtgcacactgggagaatggggtggagtcaccaggaattgacaccttatgcaggggcaggagtcgggcgtcttcagcttgtgtgtggtgacctggtattcagtctgtgaagtgggagccggttggcaggactccctcacctgtttgctgagagttttctttttgcccaatgaactctgctctccttacctttcaatggatctgtgtgcctaatttttcctggttgtgagacaagaacctggattttacccgaactaaggaggaaaaaaatcctgcatcaccaggagacagaaattagcttgtaaatggttctctttggcatttgaatgagctttagagacagacactattttctgacaaagtccatccagttttggttacattccttagtcttctttcctgccatagataattaaatttcagggcgggggacaaaagacaattctgtgccttttggaaagctcagataaaggaatttgagagagagggttccactctgtgcttggagtgagaaacaggagatcaaaaagtccttggttctggggctgcttatgaggccttttgatatcctttaatttaaaagaactcagcatgccaaagcaccatactttggggtattgttctctggactcctacaatttctatggtaaggcctattatttaatatatttttctataattgtgtaatagatatgatttttggtatcttttatgaagtaatgatagatgtcatctgtttttatcaatgaatgaaattttctctgtccgtttctttcattttctcagttttttctcttccacctcccctagtaaaccttatcagtttggagtagttgaaagagcactgagtcaaaagccttgattttatatctggctgtgactggaactagctgggtggctttaggaggttagattttgtgaaaggaaagtagaaactcgggaccccaattcaccatgccaaaaggaaaaagttaagctgaaggctgagtcagccgcctttccttttgttcctaagcagatagctacagataaaaggttaaatatctccccgtagctacatagtgttcaccttaacttatgtaaagtgccaatttaccaagcacaagacaaatacctaattgactattaccctatctgcccctttcctcttgcagtgtgtgtatttccatactctccctccttcccctccagcccgctttccccctttacatattgaagccctcaagttcatcttcggagaaagacagaccacagactgtttcggtgattttatgtttatttcttaataagggtatgtccttaaccctggcaaaataaacttccaaattgattgagacctgtctcagatacactttggtttacaaatgaatgattttatggctctctccaggttcaaaatgttattgttaatgtatgtatactaatagactaatgatgggttaattgttatgtgtccttagtcttttgagggcttggtgttgcttagactctaggttttatgactgactcgatgtatttggggtgcagtaaatgtcacttatttagtatggatcccatatgtcagtttttctgattactgctccataggtaaacaactcaggactcaacaccacctttgcattctccagaaaaaatttacccacgcctaaagcatcagtaagtaatggtgattgtgctgaatgttattttggaggtgaggactgagatctgattttatcttgcccaaattcctttctaaggggtctggggaatcatgccctacaaaccataaattctcatcagatgggttttatttaaccctgtgtatcgtggcttactttccaatctgactataggataagaagggaaaaaatcaaaatgttttaccccaaaatatatttccttgccataccttgaaattgacctgcaaagactcttgtgggaaaaatccacattctacagagaatctccttcccccttcgttttccttcctttctttctagatccaggaggcagtcaactgaaaggcaggtaagtttttaggtctgataagaaacattgtacaatctgctctctctctgaagtctgctatctgagagagtcctctgcacaataaaacttggtctccacaatcctttatcttaacctgaacatttcccttccactgatccccagtcttcagataaactcaactaattttcaaccagaaaatgtttaaattcacctatggcctggaagcccctgctttgagttgtcccgcctttctgaaccaaaccaatgtgtttcttaaatgtatttgattgatgcctcatgcctccccaaaatatataaaaccaagctgtaccctgaccaccttgggcacatgttctctggacctcccaagggctgtgtcacaggccatggtcactcatatttggttcagaataaatctcttaaaatattttacagagtttgactcttttcatcatcaaaggaaagcttttaccttgcacattccataacaaattactgtaaaaatctttgttatacctgtacgttctccagaaatcatctttgttctcctgttcctggaaaggggtcccaatccagaccccaagagaggattcttggaccttgtgcaagaaagaattcagggcgagtccataaagtacagtgaaagcaagtttactgggaaagcaaaggaataaaagaatggcagtccataggcagggcagcatcttggactgctctattgataatacttatagttatttcttgattatatgccaaacaaggggtggattattcataagttttctgggaaaggggtgggcaattcccagaactgagggttccttctctttttaaaccagacagtgtaacttcctgacattactatggcatttgtaaactgtcatgacactggtgggagtgtcttttagcatgctaatgcattataattagcctttaatgaaaagtgaggacaaccagaggtcacttttgatrccatcttcattttggtaggttttggccggcttctttaccccaatctgttttatcagcaaagtctttgtgacctgtatcttgtgccgacttcccatctcatcctgtgactaggaatgcctaatctcctgggaatgcagcctagtaggtctcagccttattttacccagcccctatttaagatgaagttgctctggttcaaaggcctctgacactaccatgctgccaaggagattctttacactttagtcttctcaggactaagaagcattcaycttccccagcttctgactacctttcctctaggttatcattatccaactttaggtttcttttccctctattttacctaataatctcctatctttattcaaactgcatacaaccacccatcartgtgctcagccaataaaggacctttctggtgtactgggagccagttgcatcagaaggcagtgggcattgaacaaataaccacagggattgccatggtagaaatagtcatcttatgtaggattatgagtttaagagttcaagataatttgamacaataaagtagagtgatgatcagcatattcttcttaattatatgaattgccacttgaaagcatgaattagaaaaaaggtaacattttaaagtagtatcttggaagacctgggatgcctataaacttagaagtttgattagaaaagtattaatgaataaggaatgatcaaccactttgggccagccttaacattttggtgatgtcttcttcaagatgaacatatgttataaaacactagttatattataatatatatatgtgtatatatagatttataattagaaccacaatgtatatataggcttcttaaacctttattatagaatatttgtaacattatcaaaagtagaaaaaataatgtaatgaacctttgtgtccctaacacccaacttcagtaattatcaattcacgatccatcttgtttcatctctgtcacacccacttcattcccctcacatattattttgaagcaaatggcaatcattatgtcatttcatcggcaaatgtatcaaccatatataattttatatagtttactttctctttgtattttatatatcacacattgccccatagaattaattaaaaaatacaaatacaatggatgcataatattgtcttgtgtggatatactataatttatttaacaatagctgtacttttggatggtttgtttctgaattttaataataccaacaatactgcactgagaatctttgcccataaatacttatttcagtatctgattgctttctttgcatagaattttagaaaggcagcaataagtatattaaacttatttgaagcctactgcaacaacttctgactggtgactatatttcaattttcaatacctggtttgaaaagtaaacaggcaaactcaacaaggtaatttttatactctccaatcagacaaaaacattgtttcaggaatttgttataatggataggctgtcctaaattcttccataatccattaaaattaattgtaaaattttgaggatgatgtttgcagatttaatttgcaactagtgacaatgaatggccagtcttggtaagtctgtattttggtgatattcttatgaagccccgttagtattatctgaacatttttaaagtttcctgaaacatattgcagttcattttatatgatcattctaaatatttataatgtaaaacccagaagtgattttccaactatgctcagtgccattcggattcttattaaggttctgagctagttttctgatccataaattaagaagactaagaagaagtggaaaaaatcagaagataataaatggaaattagtgaagggctagaaagcaggatcagtaaagacggctaaagaaattgtgttgatttaacctgaaaaggagagagctcaggaatatatgtgaattacagaagatagttcttaggacagtttataatgtgatacatgcctcctaagcaatgtaaacaccaatgggaaaattccagtttggttccactttttttgaatttagaggtacccttttgaatttattaatcttgattttttccatttcattaatttctgattttatccttatcattttcttctttcttttagggtttactgttattcttttttcaatttcttcggttttttatacgcttagcacattcattgtcagtcattttttaaaaataatttctaacacaaatatttaaggctctttattttcctccaggtaatatgtagctgttgtagtttgatcaaagtttctcatctattatctaatttacataaagacattttctttgatcctaatgttattttggctaagagttctacctccaaagccatgctgccaaggaccacagctgagctccaccacttatgtgtgcacgtgtggttatttagcaccttatttattctctttctgcctcaatttgctcatctatgaaactgggatgataatagcagtacctaccttatatagttgttacaaggattaaaagtgctaacgtatttaaaatactcagaagagtgcccaccacttagcaaggaccatatgcgttgctactattatttctctggaacatttttactgacttctaatgtattatcatgatggtcagaaaatgtgggttgtataatcttgattcttcawattgagatttgctttgctttctggcttagtgggtggtcaatagtgtaaatgtctcatgaatgctttaatcagaatatattttctattgaatatatctaatgattctatatttgttcattaaattaaataataatcatgttgttcaaatctgattcttactgatattttgtcagtaaaatttttattttattgagacagagtctatctctgtccctcagcctggagtgccatgacatgatcatggctcactgtggctttgacctcctgggctcaaggaatcctcttatctcagcctctgagtagctggggacacaggcacacaccactgtgctcagctaatttttttgtatttttgtagaaatggagttttgctgtattgcccaggctggtcttgaattcctgggctcaagcaatccgctggcctcagcctcctaaagtgctatgattacaggtgtgagccactgcgccaggccatctccttaatttttaactaccaaaagagatgtggtataatctctcatggcgattgtaaatttgccaatgtcttcataattcagtcaattattgtttcaaatatttgtgattatgctattgaggtcgtggaaatcaagaattgtaattatttcctagtaaatattcctattgtctttatccaatgacccttgtatactagtaactcttattggcctaaacatcttttttggtctggtataaaaacagtatttcctttattcttaacttattcaacattcttttatttaatatctgctttgtaactcttcttccatttcttttgtttgaatctttctatagttttctcttgaaacagcatgaagctgaactaagaacagttgtgagaatctctttgttcagtttaattattttactctaatttatgcttatcaatagattgatttgttttctgcttttaatttatagttattttccaatgtttttgttttatagtaaatttatggcaaaactttcatttaaatgcctaaatcttaagcgtacatattctgcattttgatgaatacaaacatccttgtaacccatcacctcagatagtttcaagttcctttatccctcttgtgagccaggagtgcctcccacactagacaaccactattctcaccttttccacccttcattagttttgcctgttctcattactttacattaatggaatcacacagtgcattctgttttgtgtaagtcttctttcacttgttgtgacatttttaatatttatctatgtcattatatataccagtagtttgtttctttttatgggaaagtagtaatataccacaattgtttatacatttctctattttttgacacctgggcatttctaagttttggttattataaataaaggtgctatttacatccatgcacaaggctttctgtggaacatacttttatttctcttaaataaataagaatgaaattatttggtcataggatagacatattttcagttttataagaaatggtcacactctttcctgaaggagttttatcattttaccctctgactgactaatgtataagagttctggttgctggaacttcagcttttgccagatgtgtattggcatctaatggtggtttaatttgcattcccctaatgaatataattttgagtatcttctcatgtgattaatggccatttatatgtctttctttgtaagtgtctgttaacatagttttcccatttttaaattgggttgtttgtcttattattgagttgtatttttatttatttttatcttttcccgctttctattgagttgtaagcactttcatatatggttttagtcatttctcacaaaaaccttgggaaatagatataattatttccattttaggtatgaggaataggagttatgatggttatgtgacttctccatagtctcatgagtaataaatgatagaactctgatacaggatggctaggatgaaaactgtgtaattgtaactactacattatgctacaaataataagtagtatgggactttatgtgagagagggaacccatgtgagctgagatgattaaagaaaataagtggaaatgatagattttgatgagtgacagatgagtgataaataattatttatcaagtagtggtattgtgttgtgggatatagaggtttgtaaaaatacctccatgcaaaagatagtcatgcacctacatggagtaataatagagagatcaatcagaaaatgtcctcaaaattataagattatttgaggccaggaactttaacaagtaattatcaagatgctttagtgcattgcaaattatgagaactaaaactttcttccctattctttgaacattattttgtattctcttctgctaaaatggtttggtttccacaacaatgaattaataaagtattaactttgcttaagatttttatttaatgggcattttatttatttattattattttttgagacagggtcttaccctatcgctcaggctggagtgcagtggtacaatgatagctgactacagcctccaactattgggttcaagcgatcctcccatctcagcctcccaagtaaccgggactacaggcatgcaccaccactcccagctaatttttgtatttttttgtagagacaaggtttctcgatattgcccaggctggtcttgaactcctaggctcaagtgatccatctgcctcagcctcccaaagtgctaggattacaagcatgaacaaccgtgcccagccttaatggacatttaaaaaaattgggtgctaccagtcttgaaataagttgggttgagtttggaaccacagggtattttaacttgagaaattacggcaacttcagaattatagaatagttaagtatagtagtgcatttaaagttagctcagttcagtccatgaactcctaagagagaatccagaaaagatacaaagttgtgacagaggtatagggaagagaatcacataaatgtatacagtttagtgggccataaacaatgttacttgttttatttttgtatatttactagtagccctctattcctagtttaaggcaatgtaagaatgtctgctgtgcaattaagccatctggttggtggtttatgctgtgaactagtaagcagcataacttgagagaaatacagataagtagataagtcctccagttatctgcatgactcttacttcacataaactagtgtgtcatttttaaactcttcaaccttatggacactttagggcttggattctttgtcaatctttgcttacttctactactggatgcctattatttttttccctggcattttgctaaatgagtttatatcctatgtggttgtgagtgttctaaaactgagttcagattaaggacaattgacagagaggaggccttgtttgggctccaagctatctgattttaaaataaagtgattagaagagtgtagttgtattagtccgttctcacattgctatgaagaaatacctgggactgggtaatttgtaaaggaaagaggtttaattgactcacagttccacattgctggagaggcctcaggaaacttacaatcatggcagaacacaaaggggaggcaggcaacttcttcacagggcrgcaggacagagttgagtgctgcgaaagtggggaagagccccttataaaaccattagatctcctgagaacgaactcactatcacaagaacagcatgggggaaccacccccatgattcgattactccacctggtctctcccttgacacatgaggattattgggattacaattcaaaatgagatttgggtgggaacgcaaagcctaaccatattagtagtgtaggaaaagaaagattgacaggcatcaattaagaataacctcacctattccttttgtttccagtggatgtgaaattggcaggcagataaagccgcctgtttgttcactcatgcatattcctatcacagcatttttataatattggaattacagtccactagattgcatgatttggagagtaacaccaattggtttttgttaatcattgttttaggaacgcttagatttctgaaactgatataggttcatttgaaaataggttcaaattttgacatattgtcaaatttctacatatagatcacagtaattaccatgtggggacttaagaatttttctttgttgttattatcaaggtagtatggcttctttacgaattagcgtcacatataaaaactcaaaacaatggtagatttgtgagcaaaattagccattagccactctcttgtattgactttaatagaagttgcaaaagggtaattttgttgcttacacaaaagctaatattcctttagtgactgcagctttctatttctggagttcacttatacggagcacatttttactgcttgtattattctttaggaagcttaagacagcccttatattaaactttaaatactccctctccaaaagtttatccaagaactagaatggtgaacttaatctctgcaactttgcaattagtgtattaacttaagtactatttttggtatcactgtgctctgcaagtcatctggttaacgtgtttccttttgtagaattttaccagagcatagcaattggaacacaaaataaacattaacagacttttctttgtgcttgcgtttggttataaggaaaagtttttttytttgctgcttttatccttttaaaaagtgcttttaaaataagaggaattatgtttattttaaaagagcaacatgtcaagatgcgaatagatgtgcctatcctaatagattctctagaaagataatgtttaatttttgtagacgtgtatactcgaaaaagggacaaatcaggttctgtattttcagcttttttttttttttttgacaaatactggtggtgtaaattatccagctgttcttcctttgtatggattttgtagtactcagagcgatttataggtctagagtgcagctgctgaaagtaatttattctcagttctgtattaaacccatcatatacaaatgcattagcattcagtacagacctcaaaggcataagatatttttttcccttctgagttgttgtcctacaaatgtttgtaggatataccaaaacagcatcagaaaattattggtttgatatgcacttttagcagtgctgcttttagcattcctatttagagtagttgaaatccactcatttattgatataaaaggaacagtcaaaatgagtcttcctgtcaacattaacagattggtaatactaggacttcaacttgatctgctcatttgctgctcctgccatatgtctactaatctgatatgttcaccatttcagaaacttaattatttgcatttttttggaggagcacttgtttggaaataagtaagggaaattttcacatttactttattttttcatttcttcttaaagacatctattcctcctttagatggacaggagctattctgattaataacataaacagagtttacagagctcaatgcatgtgttgcttgcttatgacttctctaaaacaccttcacaaaatattgaatgttcacaaaatattgaagcacatttgaaatgtacacagtgcttgagaataataatcctcaaaatgtatgtctagctatttattcagagaataagattttctcattattatctattaatataaaataaaacatagctttcatcctttcccttttaatccttctcatatacatttctggactaattttttaaacaataaatctagataagccacttgttcataaaaaatctttaatgactccaacctttctgttatatgaattataaaaaggttaacttgactctcaaggagccccatgatcttctcccagactatttactttatttattttttactactcccctgaatccaccttatgttccagccaaaatgaatgattttctgcactcacatgtgccatactgtccttctctcatgctttatgatactattttactcttagataattctctgtctggattcagatgttcaaatcctatttccaatgaccacggttctctgaatgataaggattttcctttaaccatctcttttggacattttttttatttttagtagttattattgcatggcttatattccttggaagattataaactcaattaaagattgagatattttaacttttatccccaacaaagcctagggcaatgtcatttgcatatacaatagctgtttaatatttgttgtatttaactggaatctgttgttaataaaatactggtttaactgaaaattgaattcaaaatgtttaatggttgttgagaatgcctctgagatgtgcattgtgcagtctaagtatggaactgcatattaaaagtaatttacgctttataataattgaagttcttaaagcacccaatgtgaccttattaaaaagtctcattttgaaaaacaaaaaaggccgtagagggacccaaagcttttttgtttgtttgttcagaggctgggtctccctttgttgcccagtgaagtggtgtgatcatagctccctgcagccttgaactcctgggctcatgcaatcctcctgccttagtggccaagtagctggcacwacaggcatgagccgccgctaacggctgattttttatttatttatttaatttaatttaatttaatttaatttaatttaatttaatttaatttwtttttgtagagatgggagtctttctatgttacctagtctggtatcaaactcctggcgtcaatcaatcctcctgccttcgcctcccaaaatactgactttacaagcatgagccaccatgcttggccactgttaaatgattgattctaccaggagataaaccagtattgagtagtttatttctcatatgagtttgttttctgatgatttgacccactatgccaaaaccaaattccacttattcacaaatttcagttatttcagattactcattttctcttagaaaattttaattttttaaattttatcaaattattatgtgcttaacccctcttcacttcccaattattttccagagacaactatttttaaattcttggctctttcttctgatatttaactcagtatttgtaaaagataagagtaaactactgttttcatttaattttcacttttaccaaaatagtacatataataaatcaaataatgctataataaaaaatagctgtcccatgttccagcctgtctcccagttctcatgcctcagaggcaactattttaaatcttttaattgtttcttctagtatttatattcatatttctaaatatcacacagtatactgtttttcttgatgtttcaaggttagatctttatagatttccttttgaagaagattataatttttgggaggccgaggtgggtggatcacgaggtcagaagatcgagacaatcctggctaacacggtgaaaccccatctctactaaaaaatacaaaaaaattagccaggcatggtggcaggcacctgtagtctcagctacttgggaggctgaggcaggaggatggcatgaacctgggaggcagagcttgcagtgagccaagatcgtgccactgcactccagcctgggcaacagagcgagactccatctcaaaaacaaaaaaagaagattataatttaattttcatatcgcttttacatgcacacacacacacagaacttcttcctatcctttcagtaatttcgtgtttttatttcagccagtatgaagtgattatgctattattactatgtaaatattttttactctgaatcacatagtgtaaaatggctacagtttgttcttatatttcttttcgttttatccagagttaagaattgtttgtgttttaatttcttcgttttctatgtgcctactaatttgggtcagtcttttaaaataaaatccaaagccctgtcaatgtgatcaaacctattgtaattgtcaggatagaccagattatctgaagtaaaaaagcatgcccagaatttcaaaagctttcaacaacaaaagtttaattctattaaagttaatattatttttaattgataaatcataattgtattacatttatagcatagaatttgatgttttggatgtatgtatacagtgtggaatgattaaatcaaattaattaacatatccattacytcactatttaacttttttcttgtggtgatacatttgaagtttactctcttagttattttgaactatgcaatatgttgtttttgactgtagtcaccctgctgtgacatagatcttaaagtgtattcttcctatctagctgaaactttgtaccctttgaaaagcaactcctcatttctgagttactcatctccacaaagttaattccttatcatgatagttactcactgtgggtcagctacagatgtgtccacatcatcttcctttgaggattcaaaatgctggaatctaatattcaatattagatgatatcaatagtctagattatatcatattctagattatatcaatattctaactgctatctagaatattgccagtcttgtgccagagggggaaaaatgccaaccgcatgctcgctctaaggtttcggtgaaacatcacattcaaacacatttcattgcccaaaggaaatcaatagcaaatagccagccatggaggggacaggggaggatagcctcccctctgagaggggtagaacatatatattttttttgaacaaaaatacagttcactgcatgcataagatgaagtgtaagttgaattgtttagtgttctttcttgtcttttgctttttcattttctgtagtatcctgtccttattttaagattgtaatcttaatcatttacctttctgaggatactgataaaattttttgatgacttttttctctttctagcgtatatcagcttcttccagttttaatttttttctctgtttattttggtctctctttttattgaaatctttcatgaaatgtttggtgtttcttgggtgtcagtctaggtttgaatgaagcattaaaaggctgatttgcagatctgtttctaggccttgtcgattgayctgtttcattttggaatctccggggtgttaggacctagcactttgctggagaacctcaagctgagaataaagatatttttctctgcggcaggtcagtttttccaaggaagtaatctttgattccttatgtgtgtggaagatgcctggtttccaggtttttgcacatgaagagatagaggctgaggaggaggcatctcttaactcaacacatggatgtttaattaatccactttttttccttgctcttcacagtacctgatgtctctgagtgttgagctactccagttaaatttatcccatggaaaatgcggtattctcttggtgcttgtatctagtgcagggagtaggagggaggtgtgtgtgggcattttgtaccccatagaaacagactttaaaccccaaacctccttaagggttctgtgaagtgaatcaactctcttatctttattccccttttaaagttatagcttcccctccctgctaagtaagttatccatcttttgttagcaccctccttgcaaatatgctgaaaatctcattcagttaggccttttatttgttttgtatgtgtctattgctctttcaccattttagggaagtcttggggaaagagaagatataaaaaaagtataatcaagtcatcataaatctgttgatagaatttcaaagtaacggaatatgagccttcaactgatcatggctgggactttgtgatagaagctataaggatgaatggttgagtttgattattttaaaagatggaaatgtggagaaagttgtcacagttccagaaataggacagacaaggacttatactaggtatggcaagtagaacagatgagctggtgtacagggtttgccaggttgggaacacaacttagagagctttcaaagctaggttgcatattttgatgtttttatagcataagaaaatcctattaaagtagtgactgatttcaaaaatttacccttgatacgaagtcattatatctaattgttaccttcaaaacactagaattggatttttcatagtcttttctcgatgccttcatatttacttattttggaaatggtgaattacggcatcatgcagtggaaagtttatccaactgttgagcaatttgggatgtatattgtactttgttattaagttacttttagtcctcagtaggtcaatttttcggagggtgaacctctatctctaacatttcatgaatctaggaagttatggtatctataatgagaagaagagaggagaaaacaaacacataaaagatgaagctagacaggtgggaatctaaatctaaaatttgcagaatagaggaattccccaaagaccaggcatttaatgtctgttccaattttgtagctcttatgaattttggaaatgtgctgaggctttggaggcagtgatttgaatgtgaatcatgtttatcctactttctaactgggcatgttacttacctcctttgagtcttagtttcctaactgtaaataggtgaaatagtacctcatatagctgtttggagatatagtgagacagtatacctggaacatagtaagcccttaatagttattattataactttgaaaaaatttaatagtgaattttgcaaagggaatctgaggcacaaacaacaatgacttaggagtctggcaggctttagtttgaatcccacttctggtccttcctaccgccagggctttggactagttactcaccctttctgagctgctgctgcttaaaaatgggtctatctggatcaagtatactaaatgagataaaacatgtcaagtccctaacccatcatgtgtccttaataaactatagtatattattcatttttgatatttccttaatataaaatattgtaaaataatataacttcaatgctagttcaaatgttacccttttttttttaaagaaactttctttcagatacacacacaacagtaaaaaagctgacgttatcaaactgctttattgtctgacacttttttttattacaattcagttccagtagctttgtgacttaaatgtaaattttatctcatcagcattgcctcatttattggaattgaagttctcgttcccaggggtaggtgtcctttttggctgtgatttgctacttcttcaccagcgacagcagaattctcattacccttggtcctgccagaagtggaagtgtgtgtaaatcctcagagtgtagggtgtgaatcagttggcattttatagaatttcacatctggtacttcttcttttttagtttgcatatcctttccctggcatagaaggaagggttaggaacaacatccttaccaagatgaagcagggaggctggagagtggaagatcgaggtcttctggtatcactttaaatcctttcttgarggatgagttgtttttccttttttataatgaataggtgcttgtaacaaatgatggcaaccatctgcccttgttaatataccccttggactgtcatatcaaaggaaaagattctgcacaattcttcatgccacaaatcaacgcatttgtagccttttctccacctctgacttatatctctcagaacggggcmaagacatacaggaaagttgttgaaagtgatgtttatgatgccgtaataaaaagatcccagatcacaatagtactaggtctgaaatcactgcaattcaatcaggttataaactggagtgttgttttgggcttctggggatgatgaagttgatggctgaaacaagaactcatttgtaaaagaaaggtaccagggccttgcagtgatgattgactagtttgaataaatactccaccactgcttgttatattaccttgggtttcttgccatctggacctgctaacctgtagagacttagttttctccaagtgctgtgttatggcatcaagttttatccccttctccctactaactagttcctatacaagtaagatgttaattacttgaacttatacagttcttcctttttaaatattttctcactgaagactgattgaaaacaccctggagtctgtcatttcagaatgagccgtaatttattggaactcttgcctttgctgattagcggtgctatttttcacttcccctttgtgttattttgcattctcatttttaacattatttctttgcttttgtgaaataatttttttcctgacaagttttaaatcaatttgggttttatattgttgtttaatttgttcccctttttgtctctagcagggatttttccccgccaaagatccacggacagccttttgtgaaatcacagagggagtatgagctgttttttaaaaaaactgtttaaagcggtttcggtttttatgatttgtgaaaatacagacttctctgacatccacagatcctagacctctcacattctagactgcctttgtaggatacccttatgatttagtattccatcctggggtgctatttctgactaatataagttggggaatctcatggtcactagtaataagctttcctcccctttcaaacwctgcattagtacctccaggggtcagctgcagagccagtttatcctcttgcgtggatgttctgcttcatgacttttgaaaatagtcacagaaaagtcaagaaaatcaccccttttgatcctgcatataaaattatttttatgatatagcagataataggttggatgatgtatcttattatttattgtgggaactaaattacttgaatgccaatatagtattcatcctattatacgtgaaaacttgtggcttataataataattatgccttttctcttctctctttctcttttcccatttatttttagtctaaaaagtatcagatcattgaaatattgaatgagattgagcaatttatatttaatattattgtacaatattataccatgcatcattaaagtgtattgagtattatatttaaatgagatagtatacatagaacagttctcaacacatagtcagtgctacatttgtgttagtattagttgattttaaaaaacatatccaacttatttgtatagcagaaccctgtgtagctacatacataaagaaaaaaatccccaacatgaactagaggcagcatcactraaaatgagccatttttctctgatttctcttttctgaattgtttttctggaccaattaccccttgctgaccatcctgactactatagttttgagattttatagtaaatagagacaataaaaatattttgaataaatgtgtgtatttgaaatgacagcctctttgagctataaaaatgatttgattcagggaacatccgtggatttttaaagttgctctatattcataaatctggtgatgttacgcaatgtagttctaagccagaattaatgagaaagcatacctctgtttcctccttactctgcttgmttatgcattatataatcagttttcacattaagatgccttaatttgttagtcatcgcaaaatgcctcactcttggcaaccacagtgttggtatttctgacatamagtttcccaaatgttgtttttgaagaccattcatatatttttcacrtttcatggttaattttaagaccttttaactccttgaactcagttaaattgcaggtggtttgctgagcacttctgtccctcttgattttaaggcttggctttgaattgggtttgggaagattcaggataccttttgtgttcatttggtaatctcattattttaactcatctgtttgctaatttaaactgtgtttgtatgcataaataaataaatagagttgtcagggtcagccctaagcaaattttggagcacaggaaaccctctgcttattaaaaaccagtccccaagatgacttatagacaggctgaccacatgaatgaccactgaggctttctatcagagcacttgataacttcactttcttttgtcaaagaaatggatttagcagtgaaagtcgctgggcgtggtggctcacgcctgtaatcctagcactttgggaggccaaggtgkgtggatcacctgaggtcaggagttcgaggccagcctgaccaacatggagaaaccccatctctactaaaaataaaaaaattagccgggtgtggtggcacatgcctgtaatcccagctactcaggaggctgaggcgagagaatcgcttgaacccaggaggcagaggttgcagtgagccgagattgagccactgcactccaggctgggcaacaagagtgaaactccacctcaaaaaaacaaaaaaaaaacaaaaaaacaaaacaaaacagtgaaagtcacgtagcatgttatgattcaatgttatttatacctgcaatgcttgcatttcaaggacggcattattggtaggacacttcttgcctaatggtttggatctatagaagaatgaatttctaggtgttgaatgtgagagatattttggagtgaggagacttcctgggcacttaaataacagctactacatttttttctgtgtttaagggagtccctaaaattattttgtggagaaactattttatatttgttgccaaatttcttcattaggactacttacaaagagaaggctaattataaaggaacagcaaatgtcatagtgttttgaatccttttcatacataagacttccattctgcactgtggctacttkgggtcctcttccgagtgtagcatcttctgagtttctgttcctcagaagctaggttcttgcccactctttccttctccattatcatgctgaatgagaaacacctaacctctgtggtcccactccctccagatgatggctcttatttaggaaacgatgccgttattgggttcatttgttatttagcgcagcgctaatgtatataaaataagctgagcaaatacatgttacttgattagtttattctttagggtactggcatctagtaaaggactgctgaagaaattgtgctttaatccaaggtaatggattatactaacatatagtatatatggtatgataattatattttgatgatgaaactacatgccctaggcagaacagtagaggaggtgtgtttgggaaaggggcccttccaacactatcccaattacactttacaggaaactgcctgtgctacttatgaagctacttcatttgactaatagtagaaaagaggcagaatcagagagcaaggtcacctggtatcctgcagctgagaaactgagaatatgtttgccaattaggcaaaaacatagagggtcatgggagttagaagcaaggaagcgggaacataaagtggcgcaaaaatagtcatgaagtaggcagcaggcagcaacctcagggacgtatattttacagtgtaagtgctctcacatgcatattatcttattatsatctttccaaactctccttgtgataagtattattcactctgtaamgtgatccaagcttctgcgtaaatgattagctcaggtcttgttaacttactggggagtaggtgagccaagattgtattcagctcttttaatgctaaatgcttttttttttattgtttgtttttgcattatataacttcagggtcagtgttgagatttgatgttttagatttatgttcagagctttaaggctgataaaaaagatgttgtaaagatatgtctccaatctataaaaatatggagagacaactaagagatacacttaaagagtgattatcttgggtttcactccgcagaatgggtttaggttctgcagactgggaacttgtgttgtagtagtaagtagttaaaagctaaaatgtgagcatttaagattatgttttggagaatatagttgtccctctgaatccactggtttcctatctgcagattcaatcaactgtgggttgaaaatatgtggggaaaaagagcacaacgcaacaataaaaataataaaaagaaaaaatatagtacaacaattatttacatagtagttacattatattaggtattatgtgtaatctagagatgatttaaaggatatgagaggaggtgtgtaggtttgctacaaatactatgctattttatataagagacttgagcatctgagaattctggtatcagtggggatcctagaaccaatgccctctggtacgaaggacaaacatattcttgagggaatatttgaacacctttaattctgaaacaatacttggcttgaaaaatagcatatttaaattacatattgatacaatgaatgtttttacactgagaaagtgactaatttttaagattcattcaacctttggggcttcagttttcatggaaagggatagaataaagcagacatcacttaagggtaaaaaaaatcacagttgaaagatagatcttattttgtgttcttactacaataaaataaaattttcaaagttgtcggctaaacaaagtgccatgaaagttctctaggtgttcgcttttggaaaactataaattgttactttaagaaaatttgggtattatgamaagtacttttaagaaaaatcattgtggccgggcactgtggctcacacctgtaatcgcagcactttgggaggtcatggcgagtggattacctgaggtcaggaattcaagaccagcctgaccaatatggtgaaactccatctctactaaaattacaaaaattagccaggtgtggtggtgtgcacctgtagtcccagctactcgggaggctgaggcaggagaattgctggaacctgggaggcggaggttgcaatgaaccaaaatcaagccactgctctccagcctgggcaacagagtgagactccatctcaaacaaacaaacaaacaaacaaaggataaccattgttgaaatgagcaaggaaatgcagatttttgaagagggattgcatatgtagaaggaacaaggaaaggacttatccttgttaatctgaaacccaggtgactggcagattgtctgacacacacattaggcccttaataaatgttgggagtataaatgatttcatgaactcttgggcaagaagtcagttttgttaaactttgtgatgatgtaaggagagtctaaacagctattgcttttcagcttctggaagtcacacctgaacacttcatgtttttcagaaaacctttcagatatattcacaaaaatttacacaaaacctcaattctttattctattttatattatctgtaatattattttccattattgkttttaattaaagaaaaaatttggtttttcttatccaacttgtcaaaaaaaccaaaacaaaaatgacgcaagacaaaacaagaccaaaaaaacatgcacgaaacactagtccacccgctgtttaagagaactttgtacttgcgttttgtggagcagagtcagtgtactggagcataattattatatacaaaatctcactaagtagaacattaaagttataaatataaaagaagcacaagccaagaaacacaagatatcacactgtaatatttcccacattatatgtaataaggcattcatgtaggaatataattagaaacaagaacactgctcaggtataatgtgagaaaattaatgtggcaatgaaaacattagcttttgcctttcctagtttaaactgaaatttgtgctttcagcattgcactctaggagtctttacatactttattctccagattactttttgagttagaaaatcacaaaccctgtctttatctccccaagagcctgcttgttcttaaaacaacaggctcggaattatagctatgcaattatctctcacacattggtcttaaatgcccagctgtgtaaacatcacatgatgattcaagaaactatttagataactattgtttgatattgttttatagttataaaatgattatctgctatcagaattctaaaattataaacatgtttatagctggaaactcgtgaaatgtttgaattatgagtaagcaagtgtttctataagcataaaatcttagcaaagatgcatttttttatttaaaggaagacattcataaacagagtttgcattttgcaattttaattttttttatttaactaaactttttcttaactatttaaattgattttgttctaaaaatttcactaaaaaaagtaccactgggtatttttaatgtccatgatactgaagtttttgcagttttcctccctgtattgctgtgctacctccctttttgatcttaaatgattttaattaaagcttagggtgaatattttatgttgtgttctgtttatccttcctggtgggaaataaatgtctaacatcactcagagacttttcaaagcaatgttaaattcccagataattcactctaagaaaatctagatcatcccatcttatgtcatttaatcgaatgtaaggataaagagactttagggaaaaagcagtcatttttattgggtaatctttcagataaaccatctggtaatgatcaaattcatgtgtcccatcatattatgcaaaaaggagctgaagcgatgtggtttttatagtctatattgttcttttaataatgaaaataaatttaatgccctaatatttttggacatcaagacagatcaaaagaaggcattyggtaaggcagtgaaattattaagtaaacaattcagactgaagcataatcttggtatacaatcaagataataagacattgcttcactagcatcaagagcaagcttcctagtttggtgaacaatcaatgcagttagaaaaaatgcatttatgccaaattaaagaaagagcaaggcaagagaaaggtgtggcaaataatattttcctaatggtttagctaattgtcttaaatctctaagcttcaaaggtcttagtgtaatctagtccagtttggtgatagagaaaataatataatttaagggtctaagaattttaaaggagagaaatccktttttttttgctgctgttcttattgtctcttttatctgttatatatactctatatctattatatttaagtgattatttctctggtggtgctggttttcagtggtaagaattcactaagaaaaaaatctcatggtgtattgcaagaattagaagagtgttttctgctggttgatagctgaatgacattaaataagccattgttttcttagattattaatttatgtaatgagcacaatataatgggatcaaatgagaaaatgtatacaaaactaaaacactgtgaacctctaggagaaggttttcagttcttactggaaagtccgacagcctagcagttacacacatgggctctggagctaaaatactttggattaaatctcaccttcactgcttatcagtgttttaacttgaacagttaatatgtttgcatgtcagtttctttataaaatgaagacaataatttgcttcatagggttattagaaggattaaagtatttaatagctataaagcgggtatagcagtaagcaccagtaataagcactatacacagagccaattagcgtctgtgcttatgtaatacatagaagaaacataggtctcaggattgttggaatcttaagttgtgtaattttccttctgcatattatttgactaagatacaattagagaattttggagttgtaatagattttagaaattattgtagttttttaaattaattaattaattwattwatttatttatttatttttgagatggagttttgctcttgttgcccaggctggagtgcaatggcattatctcagctcactgcaacctctgcctccctggttcaagtgattctcctgcctcagccccctgagtagctgggattacaggtgcacaccgccatgcctggctaattttgtatttttagtagagacatggtttctccctgttggtcaggctggtcttgaactcctgatctcaggtgatccacctgcctcagcctcccaaagtgctgggattacagtcgtgagccaccatgcccggccagaaattattgtggttttatagcatagaaacaatcacacaaaaattttagagtgacacttcaaaatttaggcctttcatttgataaacagtcatgcatcatttaccaatgtagatacttgtgagaaatgcatcattaggcgatttcattgtaaaacagcatagagtgtacttatacaaacctagaaggtatagcctactacccacctacgttacatgatacagcctgttgctactaggctacaaacctgtacagcatgttacttactaaatactacaggggattgtaacacaatggtgtttatttacttaagcatatctaaacatagaaaaggtaaaaatatacgacattacgatcttacaggaccaccattgtatatgtggtttgtcgttgactaaaatgttattttgttgtacatgatgatattagaatagtgagcttgagagacctgttaatagaagtagcattacattgggctcagagtatagatttagatcagaaagacctaggttccagtgccatctgtagtagcaatcctattaccttggatgagttatgatccttctgtgtttctgttattgtcaataagaatggtgataatgattcccacttcacagggaagggaaaataccttgaaccttaccatctatatagcagacacttgatacatgttagtttttatttatccctctctcttacttcttcctcttttctttttttagggggcttttcttagctgcaatttgttcatgtttctaattaatttataagtcactgcatagtttgaactaaagtgagtctcgggggccactttggggcatttcttttatgagcccaactttgaatgtcttcttttttctgccagtattttccatatgaaaggtagcaagatggtaaatcctgaaaaggacaacagaggaacttgtaaatatttagagcatatagttgaaaataaattggtaagaaaggaaaactgtattgcagtttaaataatctctctctctatgcatgaatcatagaaggaagggaaagcacctagaatactgccgtttatatagtggacacacagtacatatttttcgtagttcattcctggtatactggatcctgagtctgaatagccagtcaggaaggaactatgggtatttgagtggccctcatattgcattaccttctgggcctcctgggcccataaaacccagaatttggccttggtattgtgctttgttctgccagtcatggttcatcatcaccatcgtttttcatttatgatttcctttggtgttgctgcattggaggaaactgcrgggaacagctacaatctcccatggtattggcattgccggttacctcctgactctgcattctctactcccaacagttgaatcccctgatggcctccattatatacttatgccattcccaggacttgacttaagtgtaggagagggaaagagagagagagaacatttaaatcatctcgctcatctcccacatcctagtctttgaactatagattaaccccttgtagccctatttaactctccacattttccttgtatctttctacttgcatggtctaaaaatatagtaatttccctttatctgaggtttcagttacccacagtcaactgtgatctgaaaatattaaatgaaaaatctagaaataaataatttgtgagttttgaattaaacattgttctgcataacattttgaaatcttgtgctctcttgctcagtcctgctgagatgtgaatgatcttttcctctagcacatctatgctgtatactayttgcccgttagtcacttagtagccctctcggttatcaggttgactatcacagtattgcagcatttgtgtgtaagtaatccttattttgcttaacatggccccaaagcacaagagtagtgatgctggtggttgggatatgccaaagagaacccataaagttattcctttaagtgcaaaattgaaatttcttgaattagtaaggaaaaaaataattgtatgctgaggttgctctatggtaagaatgaatcttctatccattaaattgtgaagaaggagaaagaaattctagtttggttgtcatacctcaaactgcaaactttacagatacagtgcataataagtgattaattagatggaaaatgcattaaatttgttggtgaaagacataaacagaaaatgtgttctgattgacagcatgttgcaccagaaaacattgagtttatttgagaatttcagcaaggagtctcctgaaacaagtgacaccaagccatttatttcaagtaagggatggttacacatgattcaggaatacacrgcaatagtagcctaacggtatgtcacaatgcctatgtaattcacctcacttcatgtcatcctgtgggcatcgtataaactcaaatcattacaagaagaagggtgagtacagtatgataaggtattttgagacagaaagagttagagaacacattcacataagttttattacagtgcattgttatacttgttctattttgttattagttattgttgctgatttctactgtgcctaatttataaattaaaatttatcataggtatgtatgtataggaaaaaacagtacatatagggtttgttattatccagggttttaggcatccactgagggtcttggagcatatcttttgcagataagggggatgactgtactgcctccttcaacctcagacagtagatgagcttctaattctccacgtaatagctaccttactccttagtccttaggtcttttttttttttttttttgagacagtgtttcactctgttgctctgttgcccaagttagagggcagtggcacaatctctgctcactgcaacctccacctcctgggttcaaacgattctcccacctcagcctcccaagtagctgggacttcgggcacacaccaccatgcccggttaatttttgtgtttcttggtagagacagagtttcaccgtgttggccaggctggtctcaaacmcctgacctcaagtgattcacctgccttggcctcccaaagtgctgggattacaggtgtgagccaccacctcctcaggtcttgattctctttctaaacatctgaggccactagtgatgatcttgtggaaaatagtttcctgatgctggataccatgtctctctgtgtttacgttaatactgcccctccctctcttcctcaaatcttgaattccttactgttgtgacctgaccatacgatggcaaattctagaaggggctctatmtgtaatttatattgagattattttctgttgacaaacgtgacctggcctctttaagtgctttaaaccagcagttttccaacccccgtcccttgatcttgacttcctcttcttcctcattggttctgagctgccaaagtattagcatccttcaagtctgagttttactattaggacaggctgcctcntcactcctctttctgatgacatatgtatgggtatgtctttgtctttatttctaaccactctattaaggcataattcacatatcataacattccctatttaaattatacaattcaatagtttttagtatagttacagagatgtatgacaatcaatatataacctaattttagagcattttccttacctccaaaagcaaccctgtacccattagcagtcactcctgcccccaacccccagataaccactaatctgctttttgtctctatagatttgcctattctagagacatttcatagaaactaactcataccatgtggccttttgtgattggcttcttttacttagcataatgttttcaagattcatccacgttgttgcatgtatcagtactatatcccctttcattgacaaataatattttgttttgtggatatactctattttgcttacctgttcatcagttgatggacattgaggttgtttctactttttggttattatgaagaatgctgccataaacattcatgtacaagtttttatgtggacatatgttttcatttctcttgatttcatactgaagagaggaattactgggtggtatgataattctatgtatgactaacattttgaggaactgccaggctattttccaaagtggctgtaccattttacagtcagcctagaaatgagtgaaagttttatttcctccacatccttgccaacaagtgttattgattatgggcatttttatcatagccatcttagtgggcgtgaagtgatawctcactgtggttttatttgcatttctctgatggctactatgttgaatatctttcatgcatatgtgatctatttgtatagagatggccctccatatgcgctggttccacattcacagattcaaccaacagtggctgaaatatacaggcatccctctgtatacatgagggatgagttccaggaccctcaggtatacccaggtactcgagtcttgaaatctgccctgcggaacccatgtgtataaaaagttggccctctgtggccgggcgcggtggctcatgcctgtaatcccagcactttgggaggccgaggtgagcagatcatgaggtcaagagattgagaccatcctggctaacacagtgaaaccccatttctactaaaaatacaaaaaattagccagacgtggtggcaggcacctgtagtcccagctactcaggaggctgaggcaggagaatgacgtgaacctgggaggtggaggtggcagtgagctgagaccgtgccactgccctccagcctgggtgacagagtgagactccatctcaaaaaaaaaaaagttggccctctgtatacttagatttcatatcccacaaatcctgtcttttggatccatgtttggttgaaaaaaatctgtgtaagtggacctgtgcagctcaaacccatgctgttcaagggtcaactgaatctgaataaaaaataaaaatgcaacaatagagataatacaaattaaaaatacagtataacaactatttacatggcatttacactgtattaagtattgtaagtacagcaggtcctccaataatgttgtttcatccaatgttggtacctagctgggaccactaactgtgtgaagtatgcgtgttctacccatgtctgtgtgggttttttctgggtctccagttttctcccacatcctaaagatgtgcatgttaggtaaactggtgaatctaaattgtcacagtatgaatgagtgtgggtatgtgtgtgactgagccctgtgtacaatggaatggtatcctgtccagggttggttcctgccttgcacctggagctgccatgataggctctgtcacctgccacctttaatgataataattgggtaaatacttaccttagtctttcttaaatgtatgtgtggctcacatttatttcaatgtttaatattagaaatgttttggtctttatttacaagctcggtaatacatacggtagaaagttaacccttgtttatatcaattagcctatagtaaattgattttgttacattgttttgcttaaagtcacagttcccaagaaccaatcaaaaatgttaartgaggatttactataatctagagatgatttaaagcgtatgataggatgtgatgtatgtaaatattatgccattttatgttaagaacttgaagatcatagattttggtttccatgagggtcctggaaccaacaccctgtggtactgtgggatgactgtattgtctttggagtaatgtctatgcagactctttgcccattttttaatgagtaattgttttattattgagtttttatagctctttatatattccagatatatgacacatcatatatataatttgcaaaaatttyctattattctgtatattgkctttttactttatagtactctttgataagcaaaattttttagttttcatgaaatgtgatttatctatcttttcttttgctgtttgtgcttttgttgtcatatctaataarttgccatctaaaccaaaatcacaaagatttactcctatgttttcttctaagtgttttatagttttagctcttatattaaaacccatttatgcctgaggttgcaattttttgaatttttgcaatcagaccttggcaatgaccttgagcagtaggatataaataactcccacatccttagcattccaataatggaacactaggcataaataggttgagacaggcataaatggtctgtgatccattttgttaattttctgtatggtgtgaggtaggagtccagcttttttcttttgcatgtatatatccaattgttgctcaggtgtggtggctcatgcctgtaattccagcactttcaggaggctgaggctggcagatcgcttgagcccaggagtttgcgaccagcctaggaagcatggtgaaaccccgtctctctaccaaaataaaaacaaaagcaaaaaccagccaagtgtggtggtgtatgcctgtagtcccagctctttggggggctgaggtgggagaatcacctgagcccaggaggtccaggctacagtgagccaagattgtgccactgcactccagcctaggtgactaagcgagatcctgtctcaaaacaaacaaacaaaacaaaaacaaaaacaaaaaacacgaaaaaagaatccagttgccctagcaccatttgttgaaaagattgttctttttttctttgacacagggtctcactcttgcctatgctggagtgcagtgacacaatcagggctcactgcagtttcaacacccagaagcttaggtggtcctcctgccgcataccacacccaccttcatccccaagtagttaggactacaggcacgtgccaccacacccagctaatctttgtatttttaattaagatacggttttgccatgttgcccaggctggttttgaactcctggactcaagtgatccacctgccgtgagcttcccaaagtgttgggattacaggcgtgagccactgcacgaggcctgaaaagagtatcctttctgtattgaattgtcatgatacccttgttgaaaatcaattgacaataaatagaaatatttaattttggactctgatgtctattacattgatctatatgtctgtctttatgattgtaacacactgtcttatagttttgtagtaggttttgaaactgggaattctttttaaaagaattattaatgtttaattgatatgtttgtataatagttgtacatatttttggggttcaggtggtattttgatacaagcatataatgtgtaatgatcaaatgaggggaattcttccaacattgctctttgtttcaagataattttggctattctgagtcccttacattttcatatgaattttaggattacaaaattcatttttgcatttaggatctgcaaaaacacagttggaattttgatagaaattacattaaatttatagttcaaattggggaataatgtcatcataaaaatactgttttctaatccatgacatggaacgtctttaaatttatttatgtcttgcctaattcatttcaatgatgttttgtagttttcaatatactcatcttgtatttctcttgttaaatttttttactaagttttttatgttttgatgctattttaagtggaattgttttcttaatttcagtttgagatttttcacagcaagtgtctataagtacaactgatttttgcctattgatcttgccttttgcgaactgtatcaatcttatttattagctctactgttttcagcggggagtgtactccttaggatttttaacacataagattatggcatctgcaaagagaggtagttttatttctccttttctaatctgtatgccttttatttctttggctttcttaaattatttgactagaactagtgcaatgttggatagaactagtgaaaggggacatccttgtttagttttttattttaaggaggaaggcattcagtttttcactattaattatgattttagctgtggttgaagatttatttatgtattttttactgaaattgactgtctctgagtatgcattccttacacatcaaatagtgaataaaaatgagaatgaaagtaccactcacattgagatagcaaaagctagagaaccttgaggaacataagccggacaattagacaactgttgaggtcctgccattttccttgcgcattctgcttgtaaaagaggtgtgattgaagagagctgagtcttcctagaaaggaatttttccctatttaatataggaacagttgtactccagtaacttatcatttaaagatccatgtctcatacctttaagtgtcccatgaatttgggtaatgctcaaaatttactgttgaactgtagtaactctgaatcagttatcattgctgtaaatttataagatattccgtgatgtttagtagcaaaggtagccttatgcttcatttgtactatgggggtcgctgtgatatgtttagtcataaagtcaacttgatggcaataaaggaacccaagggctcttgctaactctggtatgctatatggaatgaatttttgaatggtttatttctgcattagaggcaaacaccaaccttctggggttgtccacattccagcatcttgcatctgttgtatttatgatagaaacaagagaggaaaaaaagagtatttagtcatctgctgattccatttggtgctaaacacatacttctctctagagtgcaagaatgctaatttattttatgcaccagggtggattgaagccattcctagagacatgaatatttaaattggcaacaactaaacagtgaatactctgcatatagatgattcatgctctgcgtacagttcttgagtaaggcaaaatcgttattaattagggatctggattttaaatacaacttgccatctaattggcagtcatacgcagttgacctttcaacagcagccattgtgttttgggttcagaagctttctatatgaattctcgcaaacatgaaagatgacctaagtagaatacaaaaccaaatcctaagatatgcaggtgaatgttctaatatttgcctctagaatgagagccaaaagggagcaggaagtttatgctatttgtatgccctttatctgtcttccctgttgtaactagataattctctggtttttttttttttttttttggagacagagtctcgcactgtcacccaggctggagtgcagtggtgcaatctcggctcactgcaacctccacttcccaggttcaagaaattctgcctcagcctcttgagtagctgggactacaggtacatgccaccatgcccagctaatttttgtatttttagtagagacggggtttcacaatgttggccaggatggtctcaatctcttgacttcgtgatccgcccgcctcggcctcccaaagcactgggattacaggcgtgagccactagcacctggccaattctctggtattttattgccatatgataggataactttttgcatgtgtgatcagtaaaatatgtcaaattaattgaaaattcttgatttgggttgctgttcattcattcatgaagtaaatatttatcacctcttatgtaccttcatggagcttacgttccactggagaagacagaaaacaaacatgataaataaatgtagtatatattagtgacaaatagtacagagaaaataaagcaaggaagggaaatatggcatattgaggttggaattgttgattgaacttttagacagggtgaccaggggaggtctcactgaaaagtttatttttgaggaaagacttgaaagaagttagggagtcatggatctagaagagcatgccggccgtgggaaggcctaatgtagggatgtgcctggcttcttggataagcagcaaggaggtccatggagctggtcagggtaagcaaggagagtactgggagtggggtcacagagatacataggatggtctgagccaagcagtgacatggtaagttgtagaggtaataagaggtcacatttttcataaatgaaggtaaaactgatgggattttctgacagactggatgtgggatatgagagaaggggagaagcttaaagatgacaacaaagtgtttggcactggcaattagaagaattgctgttaactgaactgttaaataccgtaagaatagtgggctgaggggcactatcaggagctcaaattttgatacagaatgtctgagatgcctactagcaagccaactgactttcataccrgttttctggactagcttttacgtggtacatttagaaatgtgcatcttcctctctctgaagcatttcttaagcttttcatgctttccttataattcctatggtaattattatctatttcactaattttagccaaatttattattttagcatatcattatctaacaatttctgaagaacagaggactgcagagctgggtacttgattttacttggtatttctattttctcacagctctaagcacaattccactatataaatacttgttgaaatmagtttttcagaataccygaaatttagcaagattatcaacctaagttacctctgttttcctcgatcagatgaatctagttattggttaacatagggagcactaatttaactttctgaaaagcatgtcaagtgtgagacatctttatctgcattcttctcagtcttgtttctgttggggaatgtgttagaaattaggtatattttagaacatcctgagagtcaaagcaataggttctgaaagacacaccttcttataagtgattaaaaaccatcatcactggttttttaaaagaggcttagaccagaaaactttgaagactagttcataaacaaatctacttagcctagtcagggaagattaaaaaacatttccattctagactgagcatatctgagcttttttgcagttgtgatttccttttacaaaagtgcaatttttatttcatggaaaagtaaattattttatggcagtgaccctcaaggttttctcattactttaaagtggtgagaggtgttatcaattcattggttactctcagctagttcctatgcaaggcctagtggatggaggaatgaagacatcattttggcctcaggaggaactcatgatttggtgagagacacagacgtgtcaacaaatagttacagcaaagagtaatagtttaaaatatctgctagactagtgccatataaagggggcacatgagtgaagtctgtgtgtgatagaatgtaagaatccacgatgacttaaaagatgaatagtcatttcctaggaggtgcaggggagactggaacatagctcatgcaaaggcaccagtggaacctcatggattctatgtatctggagaaaagagtgaccgtgacaggagtagtaggaagtaagactagagagagaagccagagaagcatgcttgtctataacaaaaaatatgagttttcttatttgtggattaaccatcattagaaaattttacattggaggagtgatgaccagatttaagttttaaagagtttcctctgatggtatgacagagaaaagattggtcaaaaagttctgtcttactaaatatttctgtagtctctcatctcccttgtgttcacgtgcacttccttaattttatccctaattatttctcctctagactagtgctactagtgaggaacagagcaagggtgtatattggagaaatagttaatgagtgtaataatagaccttacctaatggtgggggttgggggggttggaaaagtcacggatattcctcacgtttctttttgatcagctgaatattagggccatgcagatggaatgctggagagaaacatggggagtgggagtgtaggaaacacaatgggctcaacttcggacatgtttgagactcaacttgagatatgcagctggaacttagaggagaggtaaacacctctcagtttaaatttaggttgctgtcatctaagaaaacaggggagaaatattgtaaagagggaatatggctaatagtttgttgcatggagagacatcaaataagaaaatgctggaaaagtctttgacattaaatcatttaacttcattaataccctaaaaggtaggaattgttcacattttgtagctgaagtgaggttaattattctgcctgaaatctcctgctattggagtgtttttgcactgggattctaacctcaaagcttatgctatttccattaaaatgaggcagacttcctgccttggagttgctcctcattcagtccttttggcttattgtaggctcatcaggcccggagacatgcatttcctatctttccgaggtcttccaaggtcaggcacatatattgcatgaatgcacagcatggtgactgaattaataaggctcacagaaacatctgtgctagtatattagattcagggattcttttggtttggtcaattggatctgaatgtgtttaaatcggggcagatacagtatagtgtgccaaggcctcaccactccctatttactttcatctgccctattcacgcttcctgcttaaacatttgagtttgtagtcttagctttaaagtcacaccttatagcaggcatttcaagctatttgaattaaactaaaaagcaaaacacttttttcctgtgggaaaatcaaccattagtctacaaatatgccatatttagaatgtttcctttatcaaagttagattgaaatattcaagattatacttattagtttcattctttctccacatatctgacttatatttttgagcattctaaatgaccttatggaccacactttaatttttaatcttgtagttttgacctgaggtttttgtatcagccttgttctaaaactgaattcaggaaaatgtttctaacttagttgtattagttacaacarttctttgtcaggaagatatgcctgaaatatatattctctattgggtcaccgcagatgggcagagttaaaggagagttttttgacaggctttaagagcagatgtgggagctactgacaacaaatagaaatagtgtcgagtagaaagagtgttgagacaggagccagtcttggatcctattcctagtggggccattaaatgagaaagtgattagagagtacttgaatataggaagcatcatagctgcttggtaaatgttggctttctgaaaaaaatcaccatcaccactttttattaatatgtgtgtgccttttgacaaatgtccatttcttcttttgacaacaagggataccgctttttatgatttctcatagaactccttgtggaagaatggctggaaatatgttgaacagaataaatcactacacaaatgtaatgaattattaactaggaagttgggtcaacatccctgggctttggaccctatttgatctaagtgattctgtttgctctttgagatgcaccataatgttcaggaaacaagtggtctgtttctcacaagaaaacttaaataggaaggaattgcaaggataaaaatatttattgatttttgactaaattaaaaaattcaactttacttttataattgttaattatgctttagaggaaaaattttctgacctatggatttttttttttttgaaacagtctcactctgtcacctaggctagagggcagtggcrtgatcttggctcactgcaacctctgtctccaaggttcaagtgattcttatgcctcagcctcccgagtagctgggattactggtgcacaccaccatgcccaactaatttttgtatttttttagtagagatggggtttcaccatgttggccaggctggtcttgaactcctgacctcaggtgatccacctgcctcggccttccaaagtgctgggattgtaggcatgagccatcacccctggccctgacctatggatatttgactcttcttgatagattaaatgatgaaacatatgcaccaatggaaaggatgcattaagtacagccactgaattttgctaaaatagcccataacttttttgtttttctgtgtattccttttactttttaatcatgcggcagatggcttcagataccatttattttgagatataaattctaagcaaacaatagacaaatgtaatacatattgtatttgcttcagatgaacaggaaatgaacatagtgcatttttgaactttacacacacacacatgtgcacacacacccccctacattttcttgactgacacagtagtccgcattagaattaagtgataatgttttcctcataggtttctttggagttaatattcaccttggtgtatttcagttacccaaggtatgcattaatggcccagaatgcacaccttgggagatatcttaatactattatgatatggtttctcagtttcctatttgaatttgaagaattcttttattttctcttttattgaatctgtcctatttctatgaaatgacaaatgggaaataaggatagaaaagtagtaaaggcctctctctgctcyttaatgatgcttttattgtaaaatcttgcatttttttaattttaatttttcttctcaaaactttcttttacctgaagcytactgttgtttcaccatcttatatccttcagctcagttaagactaagtttccatttcytaatttaagttggccaaraacattaaattagcaggtgtttgtgttattttgtttcctaatagaacatgaagctgcccaatgaccagtgaagcaattggtatgcagcatcttggcagagagaagactggagacagaagccaacccataatggaatccaaatagcaaagtatacatgggcttttctgctgcacatcttaatctcaaacaaacaaaacctctttttataagctccctttccttcccttaccagagtggttttgtcagcttcagaaacctcatttaaacacctggaagagaaactcagtaatttgtatgtagctctgctttgttgagcagagtatatgctgagctattccatgtgggcaggaatgtagcttcgtaaggaagttttctttgattctcagaaatgcaggtttgtccaacggttcatggaatcagttgctgtgaaaacctcttaggtttgctttttctgatggtcaggctacaggagctttctcttcttatttttatatttcagacttttttttcttttttaaaaatatgagccctcaaagtggatacaggattcttacagatggacagaatatctaattttctcattcttcccttaatgacatgggtaatatgacaacatagccagtccatagctagtttataccagtgtcctttgccaaaagaaggctcacactgtagatattggctttactttttgtttttcatttccttgattttatgtgaagcttttttaattaaagtataacatacattcagaaaaatgcatagtgtgaaataaacagttcaatgaatttttccaaactaaacacattggtgtaactagcacccaggacaagaaatagaaaattaccagaaactgaaagattcctcctccctgtttagtctctaatcaccccccaaagaataaccactattttgatttttaaaatgataggttacttttgcctgagtatgaacttcacatagatggaattaaaccatacatactcttttatgtcttgcttttttttttttttatcacgtgtagctgtctttttttctttttcattactctgggttgtgtccaggtcgggactattacagacagtgctggtatggaacatttttgcctgtgtctttagatggacataggaacatatttccatatgtgtgtatcctctcctaggaatgaaatagctgggtaacagggcatgcatatactcagcttcagtaaatactatcaaatcattttccaaagtagtcgtaccaacggcctcactaccatttaatgtgaagatagttatagtttaattttgctcttcagctttctgtggcattgccatgcataaatttattcaaactctctggattaaggtatattttccccatgttttatttcttggagtaatcatatctggagtttctatctccttttgagcatattgacttcctctggcttaattcttattcatttgtctgtttccttaacaaaaatgtattaaactcctaatatgtgctgtatactactagataatgaggtataaaataagtaagccatagtacttgcattcaagagaattataatgaagtagtgaagacagaagtatgaacagatataatttattttactcaaatctaaaaagctacttctatgacctagtatctccagatttaagtaaagaagcccattaacaagttatcaagttcgttcatgatttacagatgtttttatcatgcgttttccaataaaaatttcccctttccaaggtgaacagacctcatatttttaagctttccagaaacagaagtcattctgttcaaaattgcttttaaagaaaaatcatttgttatcttaaggtatgatgaccatgattacccacagtagtttagattctaactctgtagcctgcatgcgttttctggcctatttaaaaatatttttaattgaatttttttttttttagtttagtatttgctgatacccttcttgctaatataaatatatatttggccttttgggctagcacataaaattactgggttgatatactcaaggaacaatttacgatgactcctagattcttctccttattgtaatattcaccctggatgcaggtcctgtagccttcacacacatggctttagctcccaactgtgagctggtgtttcacatatcyctatttctggcccagactctcctctgaagtctagattcatgtgtattgtattttcatttggatcttgtgctgatatattacatttggcagattacaaaatgtgttcacctttttcttccaagtacattcttctctctgtattctcattgtggtgaatgcatcaccacttccacgattgctgaaacaattctctagatgctttcaaatatcttctcttccctactcccatctagatataccaaaatcctaccatttgtacctcctaaaaatttcctggatctctcccactatagcctagcaatagtgttcaggcacttattgtctctttcccagacctgggttattgcctggtctctctgactgcaatttcattctctccaatccactcaaaaacccattgccagagcaatctttgtaaatacacatctgagcttgttgctttcagagttctttagcagagcacgtgaaatgtctcttgcctacctttttctgctggattcatcaccattcatgcttaggtttcctgtatttgtcatatcacctgcagtgacctgcaccttcctcgccttttcatgcttcagacctttccacatgctcttttgttctgcattgctcatagggatagcttctttttttttctattatacttaggcaatgtttgaattttttaattttaattttttaaaaaaatttccataagttattggggaataggtggtatttggttactagagtaagttctttggtggtgacttgtaaaattttggtgcacccatcatctgagcggtatacactgcgccatatttatagtcttttatcccttcccccaattccacacctccccaccccaagtccccaaagtccattatatcattcttatgcctttgtgtcctcatagcttagctcccacatatcagtgagaacacatgatgtttggttttccattcctgagttacttcacttagaataatagtatccaatctcatccaggtcgctgcaaatgctattaattcatttctttttatgactgagtagtattccattgtgtgtgtatatatatatatatatatatatatatatatatatatatatatatatatacaccatagtttctttatccactcattgattgatgggcatttgggttggttccacaattttccaattgtgaattgtcctgctgtaaacatatgtgtgtaagtatctttttcatgtaatgacttcttttcctctggggtagatacctagtagtgggattgctggatcaaatggtagttctacctttagctctttaagtaagatccaccctgttttccatagtggctgtactagtttacattcccatcagcagtgtagaaatgttccctgatcactgcatccatgccaacatctactgttttttatttattttttgattatggctattcttgcaggagtaaggtggtattgccttgtagttttgatttgcatttccctgatcattagtgatgtgcattttttcatatgtttgttggccatttgtatatcttctttttttatttttttattttttatttattattattatactttaaggtttagggtacatgtgcacaatgtgcaggttagttacatatgtatacatgtgccatgytggcgcgccacacccactaacttgtcatctagcattaggtatatctcccaatgctatccctccccaccccccccaccccacaacagtccccagagtgtgatgttccccttcctgtgtccatgtgttctcattgttcaattcccacctatgagtgagaatatgcggtgttttgttttttcttcttgcgatagtttgctgagaatgatgatttccaatttcatccatgtccctacaaaggacatgaactcatcattttttatggctgcatagtattccatggtgtatatgtgccacattttcttaatccagtctatcattgttggacatttgggttggttccaagtctttgctattgtgaataatgccgcaataaacatacctgtgcatgtgtctttatagcagcatgatttatagtcctttgggtatatacccagtaatgggatggctgggtcaaatggtatttctagttctagatccctgaggaatcgccacagtgacttccacaatggttgaactagtttacagtcccaccaacagtgtaaaagtgttcctatttctccacatcctctccagcacctgttgtttcctgactttttaatgactgccattctaactggtgtgagatgatatctcattgtggttttgatttgcatttctctgatggccagtgatggtgagcattttttcatgtgttttttggctgcataaatgtcttcttttgagaagagtctgttcatgtccttcgcccactttttgatggggttgtttttttcttgtaaatgtgtttgagttcattgtagattctggatattagccctttgtcagatgagtagattgcaaaaattttctcccattttgtaggttgcctgttcactctgatggtagtttcttttgctgtgcagaagctctttagtttaattagatcccatttgtcaattttggcttttgttgccattgcttttggtgttttaaacatgaagtccttgcccatgcctatgtcctgaatggtaatgcctaggttttcttctagggtttttatggttttaggtctaacgtttaagtctttaatccatcttgaattgatttttgtataaggtgtaaggaagggatccagtttcagctttctacatatggctagccagttttcccagcagcatttattaaatagggaatactttccccattgtttgtttttctcaggtttgtcaaagatcagatagttgtagatatgtggcattatttctgagggttctgttctgttccattgatctatatctctgttttggtaccagtaccatgctgttttggttactgtagccttgtagtatagtttgaagtcaggtagtgtgatgcctccagctttgttcttttggcttaggattgccttggcgatgcgggctcttttttggttccatttgaactttaaaatagttttttccaattctgtgaagaaagtcattagtagcttgatggggatggcattgaatctgtaaattaccttgggcagtatggccattttcacgatattgattcttcctacccatgagcatggaatgttcttccatttgtttgtatcctcttttatttcattgagcagtggtttgtagttctccttgaagaggtccttcacatcccttgtaagttggattcctaggtattttattctctttgaagcaattgtgaatgggagttcactcatgatttggctctctgtttgtctgttattggtgtataagaatgcttgtgatttttgtacattgattttgtatcctgagattttgctgaagttgcttatcagcttaaggagattctgggctgagacaatggggttttctagatatacaatcatgtcatctgcaaacagggacaatttgacttcctcttttcttaattgaataccctttatttccttctcctgcctaattgccctggccagaacttccaacactatgttgaataggagtggtgagagagggcatccctgtcttgtgccagttttcaaagggaatgcttccagtttttgcccattcagtatgatattggctgtgggtttgtcatagatagtgcttattattttgaaatacgccccatcaatacctaatttattgagagtttttagcatgaagrttgttgaattttgtcaaaggccttttctgcatctgttgagataatcatgtggtttttgtctttgcttctgtttawatgctggattacatttattgatttgcgtatattgaaccagctttgcatcccagggatgaagcccacttgatcatggtggataagctttttgatgtgctgctggatttggtttcccagtattttattcaggatttttgcatcaatgttcatcaaggatattggtctaaaattctctcttttggttgtgtctctgcccggctttggtatcaggatgatgctggcctcataaaatgagttagggaggattccctctttttctattgattggaatagtttcagaaggaatggtaccagttcctccttgtacctcttgtagaattcggctgtgaatccagctggtcctggactctttttggttggtaagctattgattattgccacaatttcagctcctgttattggtcctattcagagattcaacttcttcctggtttagtcttgggagggtgtatgtgtcgaggaatttatccgtttcttctagattttctagtttattagcgtagaggtgtttgtagtattctctgatggtagtttctatttctgtgggatcagtgatgatatcccctttatcattttttattgcatctatttgattcttctctctttttttctttattagtcttgctagcggtctatcaattttgttgatcctttcaaaaaaccagctcctggattcattaattttttgaagggttttttgtgtgtctatttccttcagttctgctctgattttagttatttcttgccttctgctagcttttgaatgtgtttgctcttgcttttctagttcttttaattgtgatgttagggtgtcaattttggatctttcctgctttctcttgtgggcatttagtgctataaatttccctctacacactgctttgaatgtgtcccagagattctggtatgttgtgtctttgttctcgttggtttcaaagaacatctttatttctgccttcatttcgttatgtacccagtagtcattcaggagcaggttgttcagtttccatgtagttgagtggttttgagtgagattcttaatcctgagttctagtttgcttgcactgtggtctgagagatagtttgttataatttctgttcttttacatttgctgaggagagctttacttccamgtatgtggtcaattttggaataggtgtggtgtggtgctgaaaaaaatgtatattctgtcgatttggggtggagagttctgtagatgtctattaggtccgcttggtgcggagctgagttcaattcctggatatctttgttgactttctgtctcattgatctgtctaatgttgacagtggggtgttaaagtctcgcattattattgtgtgggagtctaagtctctttgtaggtcactcaggacttgctttacgaatctgggtgctcctgtattgggtgcatatatatttaggatagttagctcttcttgttgaattgatccctttaccgttatgtaatggccttctttgtctcttttgatctttgttggtttaaagtctgttttatcagagactaggattgcaacccctgcctttttttgttttccatttgcttggtagatcttcctccatccctttattttgagcctatgtgtgtctctgcacgtgagatgggtttcctgaatacagcacactgatgggtcttgattctttatccaatttgccagtctgtgtcttttaattggagcatttagtccatttacatttaaagttaatattgttatgtgtgaatttgatcctgtcattatgatgttagctggttattttgctcgttagttgatgcagttttttcctagtctcgatggtctttacattttggcatgattttgcagtggctggtaccagttgttccttccatgtttagtgcttccttcaggagctcttttagggcaggtctggtggtgacaaaatctctcaggatttgcttctctgtaaagtattttatttctccttcacttatgaagcttagtttggctggatatgaaattctgggttgaaaattcttttctttaagaatgttgaatattggcccccactctcttctggcttgtagagtttctgctgagagatccgctgttagtctgatgggcttccctttgagggtaacccaagctttgtctctggctgcccttaacattttttccttcattttaactttggtgaatctgacaattatgtgtcttggagttgctcttctcgaggagtgtctttgtggcgttctctgtatttcctgaatctgaatgttggcctgccttgctagattggggaagttctcctggataatatcctgcagagtgttttccaacttggttccattctccccgtcactttcaggtacaccaatcagacgtagatttggtcttttcacatagtcccatatttcttggaggctttgctcgtttctttttattcttttttgtctaaacttcccttctcacttcatttcattcatttcatcttccattgctgataccctttcttccagttgatcgcatcggctcctgaggcttctgcattcttcacgtagttcttgagccttggttttcagctccatcaactcctttaagcacttctctgtattggttcttgtggttatacattcttctaaatttttttcaaagttttcaacttctttgcctttggtttgaatgtcctcctgtagctcggagtaagttgatcgtctgaagccttcttctctcattctccgtccagctttgttctgttgctggtgaggaactgtgttcctttggaggaggagaggtgctctgctttttagagtttccaatttttctgctctgttttttccacatctttgtggttttatctacttctggtctttgatgatggtcatgtacagatgggtttttggtgtggatgtcctttctgtttgttagttttccttctaacagacaggaccctcagctgcaggtctgttggagtacccggccctgtgaggtgtcagtctgcccctgctaggggttgcctcccagttaggctgctctggggtcaagggtgagggacccacttgaggaggcagtctgctggttctcagatctccagctgcgtgctgggagaaccactgctctcttcaaagctgtcagacagggacatttaagtctgcagaggttactgctgtctttctgtttgtctgtgcgctgcccccagaggtggagcctacagaggcaggcaggcctccttgagctgtggtgggctccacccagtttgagcttcccagctgctttgtttacctaagcaggcctgggcaatggcgggcgcccctcccccagcctcgctgccgccttgcagtttgatctcagactgctgtgctagcaatcagcgagactcggtgggcgtaggaccctcccagccaggtgcgggacacagtctcctggtgcgccgttttttaagcccgtcggaaaagcgcagtattcgggtgggagtgacccgatcttccaggtgcggtctgtcacccctctctttgactaggaaagggaactccctgaccccctgcgcttcccgagtgaggcaatgcctcaccctgcttcggctcgcgcacggtgtgtgcacacactgacctgcgcccagtgtctggtattccctagtgagatgaaccctgtacctcagatggaaatgcagaaatcacctgtcttctgcgtcgctcaagctgggagctgtagaccgagctgttcctattcagctatcttggcttctctgtatatcttcttttgagcattgtctattcatgtccttagcccactttttgatgggatttttgtttttttcttattgatttgtttgagttcattgtagattctggatattagtcctttgtcagattacggattgtgaagattttctcccattctgtggattgtctgtttattctgctcactgttccttttgccatgcaaaagctctttagtttaattaagtcccaactgtttatctttgtatttgcttttgggttcttggtgatgaaatctttgcctaagccaatgttatcgtatagagtttttataatttcaggtcttagatttaagtccttaatccatcttgagwtgatttttgtataaggtgagagatgaggattcagtttcattctcctgcatgtggctagtcagttatcccagcaccatttgttgaaaagggtgtcctttcctcactttgtgtttttgtttgctttgtgaaagatgagttggctttaagtatttgggtttatttctgggttctctattctgttccattggtctatgtgcctatttttataccagtaccactctgttttcatgtctatggccttatagtatagtttgaaatcaggtggtgtgatacctccagatttgttctttttgcttagtcttgctttggctatgcaggttcttttttggttccatatgaattttagaattgctttttctaatcctgtgaagaatgatggtagtattttgatggggattgcattaaatttgtagattgcttttggcagcatggttattttcacaatattgattctacccatccatgagcatgggatgtgtttccatttgttttgtctgtgatttctttcagcagtgttttgtagttttccttgtagaggtctttcgactcctttgttaggtatattcctaggtattttattttattttattttttgcagcaattgtaaaaggtgttgagttcttgatttgattctccacttggtcactgttggtgtatagaagagctactgatttgtgtatattaatcttttatctggaaaatttgctgaattcttgtatcgttctaggacctttctggaggagtatttagggttttcaaggtaaacgatcatatcatcagtaaatagtgacagcttgacttcctctttaccaatttggatgccctttatttctttctcttgtctgattgctctggctaggacttccagtactatgttgcagaggagtggtgagaatggccatccttgtcttgttccagttctcagagggaatgctttcaacttttccccattcagtataatgttgactgtgggtttatcatagatggcttttattccattgaggtatgtcccttgtatgccgattttcctgatattttaattataaatggatcctggattttgtcaaatgctttttctgcatctattgagatgatcatgtgatttttgtttttaattctgtttatgtggtgtatcacatttattgacttgcatatgttaaaccatccctgcatccctggtatgaaacccacttgagcatggtggattatctttttgatatgtttttggtttcagttagccagtattttgttaaggattttagcatctatattcatcagggatctcggtccataattttcttttttgtttatgtcctttcctggttctggtgctagggtgatgctggcttcatagagtgaattagggagggttccttctttctctatcttgtggaatagtgtcaaaagggttggtactaattctttgaatgtctggaagaattctgctgtgagtccatctggtcctggatttttttgttggtaatttattaattactatttcaatctcgctgcttgttattggtctgttcagggtatctaattcttaccgatttaagctaggagggttgtatttttccaggaatttatccatcttttctaggtttctagtttatctgcataaaggtgttcacagtagccttgaatgatcttttgtatttcagtggtatcagttgtaatatctcctgtttctttctattttttttttgagatggagtttcactcttgttgcccaggctggagtgcagtggcacgatctcagcccactgcaacttccaccttccggtttcaagcgattctcctgcctcagcctcccaagtagctgggattacaggtgcctgccaccacgccctgctaatttttgtatttttggtagagatggggttttaccatgttggccaaactggtctcaaactcctgaccttgtaatctgcccgcctcagtctcccaaagtgctgggattaccggcgtgagccactgtgcttggcctatctcctgtttcttaatgaggttatttggattttcgcttgtcttttcttggttagtcttgctaaccaattttatttatcttttcaaaaaaactaactttttgtttcatttatcatctgttttcattttgtttcgatttcatttagttctgctctgatcttggttatttcctttcttctgctgggtttgggtttggtttgttcttgtttctctagttccttgaggtatagccgtagagtgtcagtttgtgctttttcagtctttttggtgtaggtgtttagggctgtgaactttcctcttagcaccgcctttgctgtatcccagaggtttttgttcagttcgaagaatttttaaatttccatcttgatttcatttttgacccaatgctaattcaggagcacgttatttaatttccatgtgtttgcatggttttgaaggttccttttggagttgatttccagtttttttcccactgtggtctgagagagtgcttgatataatttcaattttcttaaatttattgaggctcattttatggcctatcatatagtctgtcttggagaaagttccatgtgctgttgaataaaatgtgtattttgtggttgttggatgaaatgttctgtatatatctgttaagttcatttgttccaaggtataatttaaatcaattgttcctttgttgactttttgtcttgatgacttgtctagtgctgtcagtagagtattgaagtcccccactattattgtgttgctatctcattgcgtagatctattagtaattgttttataaatttgggagctccagtgttgcatatatgtttaggattgtgatattgtcctgttggacaaggccttttatcattatataatgtccctctttgtctcttttggctgctgttgctttaagtttgttttgtctgatataagaatagctacccctttggccaggcatggtggctcaggcctttaatcccagcactttgggaggccaaggcgggcagatcacctgaggttgggagttcaagaccaacctgaccaacatggagaaaccctggctctactaaaaatacaaaattagccgggcatggtggtgcaggcatgtaatcctagctacttgggaggctgaggcaggagaatcgcttgaaactgggaggcagaggttgtggtgagctgagattgcgccattgcactccatcctgggcaacaagagcaaaactccatctcaaaaaaaaaaaaaagaaaaaaaaagctacctttgcttgcttttggtgtccatttgcatgaaatacctttttccacccctttaagtttatgtgagtctttacatgttaggtgagtcttctgaaggcagcagatggttggttggtgagttcttctgcattctgtggttctgtatcttttaagtcgagcatttaagccatttacattctgtgttagtattgagatgtgaggtaccattgcattcatcatgctctttgttgtctatgtactttggttttttgtttttgctttttaacttgtagttttgttttataggtcctgtatgatttctgctttaaagaggttctgttttgatgtgtttctaggatttgtttcaaggtttagagcttcttattagcagttgttgtagtggtggcttggtaatggtaaattctcttagcatttgtttgtctgaaaaagactgtatctttccttcatatatgatgcttagtttcactggatacaaaattcttggctgataattgttttgtttgacaaggctgaagatagggtcccaattgcttcttacttgtagggtttctggtgagaaatctgctgttaatatgayaggttttcctttgtaggttacctggtgcttctgtctcacagctcttaagattctttccttcatcttaacttcggataacctgatgacaatgtgtctaggagacgatctgttcaggctgaattttccaggtgttctttgtgtttcttgtaattggatgtctaggtctctagcaaggctggggaagttttccttgattattcccctaaatatgttttccaaggttttaggattctccccttcctccagaacatcaattattcttaggtttggtcgtttaacataatcctagacttcttggaggctttgttcatattttcttattcttttttctttgtctttgttggattgggttaatttgaagacctgtctttgagctctggatttctttcttctacttgttcagttctattcctgagactttccagagcttcttgcattactaaagtgtgtccaatgtttcctgaatttgtggttgttttttctttaagctatctatctccttgaatatttctcccttcacttcttgtattgttttttggatttccttgcattaggtttcacctttctctggtccctccctgattagcttaataactaacctcctgaattctttttcaggtaaaacagggatttcttcttggtttggatccattgctggtgaggtagtgtgctttttgggggtgctaaagagccttgttttgtcatattaccagattttttyttctggttccttcttatttgtgtaggctctgttagagggaaggtctagggctgaaggctgtttttcagattcttttgtcccaaggggtgttcccttgatgtagtactctcccgcttttcctatgggtgtggcttcctgtgagccgaactgcaatgactgttgtctctcttctgggtctagccacccagcaagtctaccctgctctgggttggtactgtgggttatctgcacagagtcctgtgatgtgaaccatatatggctctctcagctgtggataccagttcctgttctggtggaggtggcagcggggtgcagtggactccgtgagggttcttagctttggtggtttaatgctctatttttgtgctggttggcctcctgccaggagatggggttttgtagagagcatcagctgtggtagtatggagaggaactggcagcgtgcaggtcctagaactaccaagattatatgccctttgtcttcagctaccagggtggatagggaaggaccatcaaatagggacagagctaggcgtgtctgagctgagactgtccttgggtgggtcttgctgtggctgctgtagggggtgggagtgagattcccaggtcaatggagttgtgcacctaagaagattatggctgcctctcctgagtcatccaggttgtcagggaagtgggggaaagctggccatcacaggcctcacccagctcccaggcaaaccaaagggctggtctcactcccaccgtgcccccaaacagccccaagtctgtttccaggtggtgggcaagctgggcttgagaacttgccccaggctacctgcctgccaccttcaaatgaaaacggcctggttcttcccccacgctgtggagtctgcatgctggattcacaccctccctcaagttctggccatgaggcttctcaccctgttcaaattgttacgaagttcagctggaattttccttctccctgtggtgcttccccctcccccaacccctgcttctctggctgccctcccagtggatccctgtgatgccaggcaggaatggcctgactggggacccagcgagctcctagggactttctgctgcttcctctctatatttttttttgcttggctctttaaattgactcagctccaggtaaggtcagaaacttctcccgcaaacagaccttcatttgccccagtggggttgtgtattcaggagaggaggctctccctttcccacttccgcagttggggcactcacagtatttgtggtgtctcccagattttgcaggagcagtccgcttccttcaaagggtctgtgggtcctccctcatagggataacttctactcactgtttaagattcaccttctctgaaatcccaccacttatgacaacttggatgaacctgaaggacattatgctaagtcaaataagcccggcacagaaagataaatattgtatgattgtatttatatgtggaatctaaacaagtcaaactcatagaagcagttttaccatagttgccaggggttggcatgtgggggaaacggggacatattggtcaaagggtatacactttcaattataagatgagtaagttctagggacctaactcacagcatggtgaagacagttaataataatgtattgcttacttgaaatttgctaagagaatagatcttacatgttctcacagcacatacacacaaacgcaaagggtaactgtgtggtgatggatatattgattaatatgattgtagtaatcattacacaatgtatatgtatatgaaagcatcatatagtacaccttgaatctacacaatttttatttgttaattgtacctcaataaagctggaaaaaagattcacattctctgagaaattttatttaatcccttcaaactgagagactgtcctctatgctgtgggtaactctattttagttcccatgtaaatgtgtttatttgtctcccctcctgatctttatctttgcatttccaacatttagcacactgccttgatgcaaagtcgaggctcagcataggagaggctcaacatagtacaggttgaaggaatggttgaattaattaactgatagcttaaagccctccacttgtattttttaaaataatattcctaaatatattttgttctcttgccagggttaaaactcatatgttacttctctacccacttgcacagactttaaggtctttttaaatcccatctgtgtgtttcttcgtcagctggaaacatttaatgtcttcttaacttggaaatctcctgtgagctttcttctggagcatttaaaaaaagattataaataagtatcaatccttgaggagctgaattctttatacttctccatccaaagaaatccctgattaactttactgtttaatgcctattttgactttatgtaaaattttagggtaaatggacaaacaagaacctttgaacctatggtatcatcagttaaaataaaacaactacaaacaccactaccacaacatacatttaggaggtgacagtcattaatttctcttttatctgtgtgcctatttactacattaagtttatcatgcttgatgtcctttgggagaaatggtcatgccttgtcagttttccttacataaactctgccacctgcccctttgcccctgtccactgctgtaacgttatatttgttatgttcactgatctagtcctttttcgcaggcgtcaaggacttgctatttgggctcatggattctgtaattgccttgggcagagatgacaaagcataggctccaaattcaaaatacatttgtatttttaacatttcaaagtccccatggcattaaagttactacaatttaccatcagattacacattgctaccattagagcaaaagaaataattttaactttagcttcttgattataatctatgttcaagtttttcacctttcagaaacaaactaaaccttgacactgtccttctaaataaagaagcataatgtataggtcacttcagagagaattatgtattaagttgtgattgtacagtaatatcagagaatttgccttacctttttctaaatatttatacttttaattattactcatctgaggagctgtgcatcctttctaaacattaaactatttatcctctaagttacactgatgactgtaggtagagcttgtacaacgttgtgggaaatacaaaaatcactaagattatcagtacagaaacagtacaccaagtttgacagatgtaaggaataaaacaattccgtattctttctacaccttttctctattttccacttatattccatttctgatgtgctatgtactcaatcttgtgagagggtcggcagaagtatcattatcccatttttacagatagaaagacagacaccgaaagagatgagttacctagctcacagtgctaatgacagaactaaaactaaaacccagaccacatatacaagggggaaatcgtagcaagccaagaaaaccatagtgtcttttcttgggtgattagtgactatgaacagtgggttgatagctacttctaactgtcctccctacattttgtaacgaagttaatctctccaaagcctgagtgaagtagcagacagtgtttattttcagaagggaaggaactaaaaatatagtagcacaagccatttattaacctcatgcaacattattcccagagtagcagagtcttgtgaaaaggcataaggttagcaatcagtagacttaggtttagatctctgttcctttactagtttctatctccttgcaccaaacacctgtttagttaaaataggactaataatagcagcctcattccctcaaagactattgtcatgatcagtaagatactgtatagaagcactttataagctacatgatattatacaaatacaagtcctcattctgtgtagcaaataagaaatttttccactttgggaggccgaggcgggcggatcacaaggtcagaagatcgagaccatcctggctagcatgatgaaaccccgtccctattaaaaatacaaaaaattagctgggtgtggtggtgggtgcctgtagtctcagctactcaggaggccgaggcaggagaactgcataaacccaggaggcggagcttgcagtgagcctagatcgcgccactgtactccagcctcggcgacagagcgcgactctgtcataaaaaaagaaaaaagaaaaaaatttttcctatgtaggaaataatgtcacatagtttttaggataagggcttggaagttatactgacgtgggttacaatacaagaaataccaccatctagctctgccacttggctaagaaacttagtctcttgaaaccttagtgttttgagttttaaaatgggaataatcacatctctcatgagtttttataaagattatatgaaatgttgtatatgaagtgaatgaactattgtaaatgtcccttgaattagttttttttaacttaagcttttatttgggagtaattttagatttacagaaaagttgcaaaggtggtacagagagttcccatttaccttttttccagttttctccattgttaatgctgtatcttacatttgccactacaaagaaatggatactgatgcattgctattaactattaataatggttatttggatttcagcagtttttcatgaatgttttttctgttccaggatctaatcctcagtaccacactgcatttagttatgtctccccaatcttctctgttctgtgacagcttgtcagtccatctcctgttttccatgatgttaatggtcttgaggaatactgcccaggtgtcatttaggatgttcaccaatctcattttgtttgttgcttttctcatgattagactggaattatgggttcctggagggaataccacagaaatggcatacttttcctgtcacagtatatcaaggggtacatgatatccatgtgatatcactgattatgttaaatttcatcacttggttaaggtagggcttgccagatttttttcttgtatattgagctagttctgatcgcctatcacttagacagggcattctctttcctctcttctctctgatgtaatgctattcatttacatttactgcaaattgtcatctctgaagaaataccttctcggaccattcagcctaaagcagcttttcctttcaagtcaatctctatgacacttcacttttgtgttttcttcatagcatttattgtcacctgaaatcatctcgtatatttgttcatctagttcattgtttgtctgtaggccctttccccccaaaagaaagaagaacaaggtccttgtaggattttttcatatctgtacactggagtccagcacaaggrctagaatatgctaagtgctcagtaactaattgttgaataaatatcaaagaaagaatgatataggattaatttattagtatttctgaaaaagaaaaatagctgaatggtgggaggtttcattagtgttcttaactcaattggtctaattttaacggagaggttaaatgcaattatcaacatctatggaatgaggtaatcagcatccttgtaattcaagctcccatgtaatgcacttaataatgtgaatgccagagtattttagctacttataaggatttgactgacaaggacttgactgaatagtaatggatctttacacatctgctytacggggacctttacttattaactgtgtcattgtttatactgcagaatttttaacagaaactgaaagaatgtagaaataatagatgcccttgattataacttatagctgacttcttcatgtctattatcttttcatttatacttacaaaaaaagaagctttttaatttaagtctttctcccataacccattgtaagataccactctttttatttacyttctcaggacttaaaatctccaaatcagagagatgaaattgcaggagcccgagcttcactgaaggagaactctcccctcttgcattcaatttgttcagcttgtttggagcattctgatgttgcttccctcaaagcaagcaaggacacagtttgtgaagaaattcagaatgctctcaatgtaatttcaaatgcttcacaagggatccagaatatgacaaccccaccagaacctcaggcagcaaccctgggaagtgcccttgatgagctggaggtaagtcgggagaaagrtaaastgtgatctgatgtcctaatacagtaataataataataaaacagaagaagatccacatgttggcgtttagagcatgagaaaataaaaaatccagattagtctctatcaccttcttgagtcttccaaagaattgattaacaggaaagtactctgttagtaaacttctgactcctgtacatctctgccaaggaatccaatgaatttgaagtgggattgttaattagatcgaaatgatgactttgttttatgtagatctacttatgaagcataagatttattcactccacaaatacttattggcattactgttctatgtgcttgggacatatctgatcacttcccttgacaaatttttacattttagcaggtgattataggcaaaaaataaaaccaataaacactgtagagaacaaaattgtatagatgttacactgagaaggtgagataatgccaaagccttgaaagagttcaggaatcgggcagatgaagatctagagcaaaggcttgaaggtatgtgccctgtgtttaagtgacaacataaaaaccagggtgtctaggtgaagacagcaaagtgatgagtagcaggagctaaggttggagaaccaaccatttaggagtgtgtatgcctttaaggactttggcttttactccaagttaaatgggaatacactgaaaggttttaagcaaaggtgtgacatgctgcgactcgtgtcttaaaaggactatgatagttgcataaggaacatagactgaaggagaacaatgagaggaactgaaaaaccaggctggaggctattgtagtaacccaggttccatttatacactttacatgaaccacctcatgttttagtttagactagagtggtgttggtggacatcagtgctaaattttgtaaatagagtcaactgaattttgatagaatggatgtgggacatgaatgaaaggaaggagtcatggctagtgttgtaggctgggtcctccagaatcacacacagaatggagtttggaaaacaaggtgttacatttgggaaggaaagagggaaggagcgggactggatagaggaagaagtctacctgacagctagacccgcaaagcctaggccaatcagcagggagctctggtgagagcattgccctccagagtgtaccttgtcaggcagaaatggccaggcctgtatgtctctttcagtcactggatgcaggttactctaccctgggaagggtatgacctttaggggcctgaaacactctatatacacactgaatatgtattacttttgcaccatgataaagctggaaaaaattataagttgaaccattgttaaatcaagtcagggaccatctgtagtctgtatctggggagtgccgagtgtgatacattgaaatttgttagagtagatagataggatcatacrggttgagcatcccttatctgaaatgcttgggaccagaagtggtttggattttggaattttttggattttggaatatttgcatatacctaatgaattatcttgggaatgggattgatgtgtaaacatgaaattcatttatatttcatatataccctatacacatagcctgaaggtaattttatacaacattttaaaaattttgtgcatgaaatgatgttttgactgcattttaactgcgacctgtcacatgaagttagatgctgaatttttccctagtgccatcacattggcattcagaaagttttagattttggagcattttggatttcagatttttagattagcaacgctcaacctgtatagcacatttttcacagtactaaaacacaattgtgtcagagaatgctcscataagagctccagtttatctcagacaatgcattctgtattttaggattaaagaagaagacatttccaaattgttcctccttctgagacctcttctcttttctctttttagttgaaagtgactgccacaggcacaaaatggcagtggttggagaggaggagaaagtgtgcgtgttatgtgtgtaacttcagtgggagtgggcataggcagggcaacagtgttctcttaagaaaggcagactcagttgttcttcatgaggcgggaaggggtccaaaagatatttctctgagatcctaatgaggattctaaactgtctgaacaacctttgaaatttagttctagtcaaaggtacagatgcacaaactagtaaaaaatgcctaagttttctatattttttatatccaagttacaaatagctgctgtggctgactgaactagataaagcagaatttattgagcatttaaccttttttaatgatttggtaaattaaatggttgcacttttcattatttacaggaagctgtattggtaaaggatccaaaataacctttgctctattttgctcctgcaaatayaatactatgaagtaaattgatgtagtaaatactctgttgggagtaagtctcattaaatgtttatagtgtggaatgtatcagagtgcttactcaacaaccatgctgaagcttttgttaaatttttcrttctggcccttggctgggtgtgagtatgaaacctgaaatttatgagtggagaaaatagaagttgaattggaacactatactggctaaatcaattgayttattggaaaggccagtgtgaattataggggttttcttctgtatttgtggctgaatgagagctgagaagtgctgaattgtagattaagagaattttgaaaatgttatgaagcaagaaacttcaccaataaaaattgctttgaaaattccaagtccattaagacatattgtctcctgtgaggagggaaaaagcagctgttgtcattgtggtacacaagaactaatctgaattcccatgcaataaagatgataacaaatgatatgtatgtatattttcttatttttagagagctgtcatattcactttttttaacttttttacatattcatgtatcatcattcatacagtcattgtttactgttatatctccagcacctagaataatgccctaaatgtagtaagtgctaggtaaatatcaatgaatgcatgaatgaatgaatgcaataatayggcatgccattttgtgattttgcagtgaaaagcattttttccttacccttatttttttctccttcctccgactgaaagtggatgtatttgggggtatatggctctactttaacttttaaccaggccatgaatttatagtgatggaaactaccagaagcacatgtaagtgatacactgctcagaatcctttctgtggtaaggcagcacaaagagaaaaaactttatatatattctcttctctcagcagctgtccagccttagtcagagttccctgttacttccaagatactctgtcttttactaagggtaataattttggggaagatactcctcatgttcttacattttcacctgttaggagaaaacaggatctctgttagtcagattagcatttagaagctaaagaagaaatagatatcactgttatctagaagcacattaatatgattttaaaaaatggtttggtttctagatatatagtgaactataagaactaaaagagatgaagaaaatatttttatatacataaataatctgataactgaattatggaaattatttgaggctgatacaaaaagcacaaaatccaaactagtgagccaacaccagcattatgctgggggatggggtagctgcttttcaattatggcctggagcttgaatcttgaaagactgtgaactgaagacaaaagataaattctgtatcctgccaactggaaagtcccgtaagatacatttgcatgttactgggaatctttaaaatttgaccaccttgttggagaaatgaaaataacactaacccgaatagcaggagatgttgggagaacttttgactagcatagccttggctctgggaagctcagaaaaaaggaacagaatccatgttggaattttctagccataggcctgtccttatctggactttgggtcagcattcatattatctgtgtagcctctaaaaccccgtccaaaaatctagtttaaaattgccttatcctggcaatacctccagagatctgccagaaggaaactcagattctttctgcactttatacacagctttcaaaaaattctcatacggttccaaggaagatggttttcacaagacacacaaataagccatcttgagtaacttcatagaatgaacaaactacagaatcaggtctgcaaacactgtagatattgaaattataaggtactgaaaaaagtattttaatatacattattccctaatgaatatgttgaagaaacaaaagactgtcaaaattgaccaggcagagctatctaaaatgaaaaatataatgatgaaaaattcaatggttaggcaaaacaggtgattaggttagagaattggtgatctgaaagatatttgaagaggttactttgagtttcccacagaaagacacagaagtaaaaagtattttttgaaaagcagttaagatacatgccatgacaagttctaaaatattataatatacaattcagaagagagagaagtataaaacagataatgagaatttcctagaactgatggaagtcaccattctctatagctaagaagcccagtaaatcccaagcaaggtgtctttaaagaaacctatatttacacgtatcatagtgaaactgaagaacgccaaagaccaaaagaatatttttaaaagaaaataggaaaaaaaagagttacctatgaatgatgactgattatctgtgaatgatagccgagttcttaaacatgaatgttacaagatagtaaatcattctcagagaaaataactgttaaccttgagttcaatacatgatacagctgtttttcaagaaaaaagataaatatatttttacccagtcccaaacatgaatagtttattgtcaacaacttttcactgaagaaattgttaaagaaaaataaaaaaattatcctatcttaagggtgcaaatgcaagaatttgtaagcagaggaaatggtaaacataaggatttattactgcttacatattactttttataaatgattaataactatgtatactttgtataattaaaattgtagaatgattgtgtctggaaacacagtgtataattaggatggatagaatcatagttaaatgttctagggtctttatatattttttggggaaggataaaaatattgacttatattaggcatttatcttaataagcatgttaaaatgtctatagtaactactaaaaatgtgtagtcatagactgtataattgccaaatatggaaaaggagaaatgcaatgagaaaataagaaactcagtttgtccaaaagaagaaaaaaatggaggaaaaaacactgtggaaaaagaaggatgtacacacagtagaaaacataataaaataaatccaaataatcttggaatcataataaatgtaaaaaggaaacctaaactctccaaagacaaaagactgacagcttagaatataaaacgaaatctagctatatgctgtttataaaaacacatctaacacttaagaatcaagatagtttgaaagtcaaaggataaaacgatatccaacaaattctaactgaagaaagctggtatagctatatcaatactagtaaaaatgctaatgacagttactatctactgataggataaattcaccaggaggttgtaacacattcttttcgaggacacatggaaaattaacaaaaattgacagcatactgagtcatgattttcaaagcactagtattatacaggccacctagaaatgtatttaggtaaataagtgaaattaccctactatttggaatcttttttgaaaaccatatctgtataactactgggtcatgaataaattataattgaaagtaaaaaatacttataactgagaaataatgataatgtataataacaacaaaacttgagcgatatagctaaagggagtacatagaaggaaatttctcacctatacatgcttatattaggaaagaagaaagctggatgttaaggagctaagtttccacttggagtttgaaacagacaatataaaaaacccagaaggaaaaaattaataaagataagaatagaaattaattaaatcacaaacaaagatacagtagagaagttcaacaaagccaaaagtgtattatttgtaaagaccaataaaattgacaaactgctggtgagataaattaagaatactgaaagcagacaaaaaacagcatgtaagagtgaaagtcagaagaggagtcataactacagggttatgactaaatactaaatattataaatactaaaacactaaaagaatattataaacaaatttatactgataaaaatgaaaatttggatgaaatggaaaaattcctaagaaaatataaattaacaaaattgactcaagtatagacaatctgaatgaaataattaaatagaattagtagttaacagtttttactgaaagcaaataggaggctcagatagtttgatagaatactataaacccttccaggaatatgtaaatgtatttctacagcagtgtcctgagaatagcaaacaaacaaacaaacaaagtagctctcaatccattatatgaaattggtgaagcaagtgtgaaacgatgctacacaggtcagataagtaaggaaattcacatgccaatctaatttatgaaattagatgcaaaaattscaaacaaaatgtgaataaactgtttagcactagataaaaaagtcattatgacaaagttgaatttattccaggaatgtaatgttagttcaacattagaacatttactgatggtattcacctcattaacaagttagaagagaaaaactatataataatctcagtagatacagaaaacatttgaaaaattcaatataatttatttaaaacttctagaaagctaggaacagaagtgagttttcttgataaagggtttctgtaaaattctacagtaaacttcatagttaaatttgagtaattaaaaacactccctttaaacttagacatgaggccataatgaataaaaatgagtaaattatagtaatacatgtcaatatgaatgataccaaaacaaaaagctttaccataaaagagcaagccgtataagaattcatacagcatttttacttttatataaaggctcacacaagcaaaactaaacaacacatttctagtgttacagacatgtctggtaagatataaagagaaggaagagaatgatttatgcaatattgaggagtggaggagtggggagaaagaggttgcatacacacatcaggagctttaaagctactgagcatattgtttttcagaagctgggttggtagatgaatgtgtgttatattattattctttattcatacattctcttatgtttgaggtagttaataatgaaattgaataaagtgtgttaaaatgggtggtaaatctgagaataagtgctacaacaatgtactgtttatatttaacaaatatttattaaatctattttctgtgtaattaatgtctgtgtgaacccttgtgctaggtactggcttaatacaaatttaaggtactagcatcttacatttgtactatttagggtgtttatctgcacattttattaatagtatcaaattgcttcatagagcacataggtcaggagttattgtgtactttatagaggagcaaactactcttctgtgaggttgtgtaacttgtacaaagtcaaataaacaggaattagaagagttataacttgaacacatatttcgtgagccctcccaacaattactctttccaaataatgctcttgtgacaaatgatggagactgttggaatacaattaggtcttgagtttaatacatttatttgtttatgcatctgtctttgctattggatgaattatatgagtagaggaataatgccttattcatatttatattgtcaccgcctagcaagktgccaggtacatagtaattgctttaaacatatttattgaaaaagcaatgaattgttgatatttcagaacctagtgtgaggttttaatgcatctaataaatatttacccaataaaagaaggacaacatctcctttatcttgatgattaaataaaacacatggatagtaatgagtattagaccttgtttgctcttggcttcttgggactcttagaccccatgatgtacatggcattatagatcgtgttcaaggtttgctgttatatggacccgatgtcaagcttggagaaaactctggcagccagttatagtaatgtttttttttttttctccaaaacttgaaaaaaccaaaatgaatccacagcaagtttttaaaaacaaattcttataaaatgtttgtatcatgagtctcatgaccatcagttaatcatcagtatttattaggtacttgttctctatttccacattgtcatgtgcttaatgggagctagaaaataagtaaaaataaaaagcctccaatcctaaaaattgcatattcaggagataagaataccataaatcaagcaataaaagctagcacaactcttcctttagatcctcactcacatgacacaggtcgggctttcttggatgccgattccttgatgatgtttagttttagggttagtttagcgttaactagggaccatacttgtgagcactgcaaaatgagaaaaggcatgaaggaaaaataaatatgagagctgatgaagggattgtgtaataggagtggataattcacactgactactgattgaaatttatagaggacctcaaaatagaacagtttttatttttatttattattttttattgagcccccccccatatgcagtatggaaagttgatttcatgtatagaacttcacatgcaacagaggacgcatatctttcaaatagctatggaaaaatggatccaaaatggatccacaaaaatggagcaaaggctgcaaagaaaacctcaataaaagagtcaccacaaaaaagtatgtgggatgatggacatgttaattagcttgattcagtcattcctcagtgcatacatatatcaaagcatcaggttgtattccacagatgtgtacaaaaaagaggcaatagatgaatgacattaggaacatgtgtcttcttttttttagtttgaattttaaaaatctgaatttttattttcttctctgtaaagaattttctttttagcaattaagactactatttaattatttactagattctgcttttatttttatttttattttgagatggagtctcagtctgtcacctggcctggagtgcagtgacacaatctcagctcactgcaatctctgcctcccaggttcaagcaattctcctgcctcagcctccagagtagctgggactacaggtgcatgccatcatgcctggctaattttttgtatttttagtagagacagggttttaccatgttagccaggatggtgtcgatctcccgaccttgtgatctgcctgctttgctctcccaaagtgctgggattacaggcttgagccaccgtgcctggcctgcttttatttttattaacttatattttctaatttcttaggttaatttgctgatcttttataatatcttgaatatatttattgagttaatttttagtctctctttttctgtttttcttacttggtttttttcttttgtaaactcattcatggtgtcagttttcctctgaacacctatgtttaataagcagtacttttatctgtattttaaaaaataggtgttagttttaacttagtttttttttctttgccttatactactagaagtgtgttttaaaaatgttaaaattggtttttggtgttttaaaattgttttttgtttatttttgtcatcctttaaaattaatttctagttttactgaattttggtcagaaaatataggttttattttggaaaatgtttggaatttttttgggggaacactgaaattttttgtggcttaattcatgttttgaaagttgtatttatacatatttgaaaaaattgtgtattctctctttgggaggaagttttaaaagttcgtaattgtaataaataaagtgtcttcattcttacttctgttttctgtttcacctgtttgagagaggttagttgaagtctttcacattacagcaaaataccattttctccttgtatttctagtggtattttgttccatacatttaaaaacttatattaggcccgtgcggtggctcatgcttataatcccagcactttgtgaggccaaggcgggtggatcacctgaggttaggaggtcgagaccagcctggccaacatagtgaaaccccgtctctactaaaaatacaaaaattagctggacacggtggcgtgtgcctgtaaaaccagctacttgggaagctgaggcaagataatctctggaactcaggaggcagaggttgcagtgagccaaaatcgtgccactggactccagcctggtgacagagtgagactctgtcttaacaacaacaacaacaacaacaaaaaataacaatacccttatattattagatttagaagttttcttgactcctatgacttcctggtggaaggtaccttttattattataaaatgttcctctttattttaatagtgtctactctgattcaatttgtctggtattaatattgatattcttggcttcctttttattagcattttcctggtgtatctttgacaataattttattcatgtctagattaattaatttcataaggaatacatgaatttattcttgtaaaataattatacaattatggaaattaagaaaaaagttaatgtctcttttcacttcacctcaattcaattcttattgccagtgataactgcaattaaggacttggtatatattttccagacgcttttctaggcagagacacattttcttttctcttctaaaactcttattaagatgaatgttggtctgtctggatgagtcttgtggcttttaatttttgtctcatactttgcatatcctttycattctgtgagaatttttggctttcttttctggtcactgattntgatgttagctattttcattccgctctttaagtcttcaactgtctagtttttatttttgcaataccattttaaatttccaagaataccagtggtgttttctgtggctwtttttttttttttttttgagacagagtcttgctctgtcacccaggctggagtgcagtggcaygatctcggctcactgcaacctctgcctcctgggttcaagcaagtctctgcctcagcttcccgagtagctgagattacaggcgcctgccaccaggcccagctaattttttttgtgtgtgtgtttttagtagagacgtggtttcaccatcttggccaggctggtcttggactcctgacctcgtgatccacccacctcagcctccaaaagtgctaggattacaggcatgagccaccgcgcctggcctggctgttcttatagctatgataaacatttgaatctcttttagaatattaattatactaattatgtttccttaagttcttctgtttgttgagtttggggactctaattctgttgatgtttctcaaatgtttggtgattaaccacttgcacaagaatcactttgggtgctagttaaaagtgaagatttctgttcccaaatttagacatactctgatgatgaggtcatgaatcattttcaaagacgagccttcccaggtgatccttaagcacactaaatgttccaaaccattaatctagattatacagtattattagctgctgtatatttttcagttagactgagtattcgggtaatcttgcaggtttgtaagattgtaaggttctgattctaggaatgctaggtcaagtcgctatactggagggagggcaacatggagatgtaggtggccctttagaacatggaaagcaaatagtttatcttcttggagaagaagcttcttgtctcttgtggtagacttgcctagtttttctggtagcagaactcatcctgagttctgttacaattcccacagaggttcttaagctacagttcatggggattcatatgtagaattcagggtgtctgtggacttggatgagaaaaatamatagttctttattttataaagttctatctgaaatttatcactttagttattaatattattaaatacaaaccacagtgcataagatacctaagactttgtcacctatagaaattacagatattttcataccacattatgtcatgtatgcttatcactatgtctgaattatgagagttattaggctgactgctagatcttattatttcatgttaatataatgactaaaaaattatatctgtcaatggaattgatttccatttaaaattgtatctgttatttttatgcattacaatttttgttttgttttgttatgagatgaactctcactcttgtcacccaggctggagtgcaatggtgcgatctcggctcactgcaacctccgcctcccgagttccagtgattctcctgcctcatcctcctgagtagctggtattacaggcgcctgccaccacgcccagctaattttcgtatttttagtagagacggggtttcaccatgttggcttagctggtctcgaacgcctgacctcaagtaatccatctgcctcagcctcccaaagtgctgggattacaggcgtgagttgttttgagaaggggttttagtttttatgggatattggcttgattgttctcccctttaattacttcgcagacaatatgttcagtagagactgaattctagagtcctgattctagattctagaatctagattctagaatcaggtgcaggctctagaagcctgattctagagtcctgttggaaactcttaatttttttttttttgaaggtcttttcttccctaagtggaagtgctttttgttgagtttttgctaatagcctgttctttgtttttcttcctccctccctcttttcttcctttcccttcttcttccacaatttccctccttattctttagtttcttaattggttcctttcattttattgagaagttaaaacatttgcacatttacatatttaaatgatacagtaatctccagtgagttttggggaaatataatttaaaacaatatatcctgccaacccaggatacccttcacaaaggaaaacaattttataattgataagcattaaaccagaatgtgatatataccacaggcaatcagctaaagaaatgcagagacataaagaaatctcaatgttttatatagcttaggagacacaacccattagatacatgttctcaagataaatgataactattcctcaagtaagaggacttgacagtaccatttacatacatagttcatcctaaactcacctggtaatwtgaataactgtctctgttcactaattgcctttatccaaaggaactttttatatctttttgacagaagacaartttgtaacttggagccaggcacccaccaaagttaggctcctgccttcccacagaaactgggagatagggacactacgttctttgatgattatatttaaaagagatggtttccaggttcttgagaaagacattctcccaagattcttttcatccttgggttgaaaagctggcgagaagcttatttcacttttaagaagatttacatacgtttcaaagggcagagaaagactcaccatgacaagttttctaaagtaaatggtaacgtgtctctcccttttttccctaggaaaattatattttgcttcttttaagatctgtatttatccttaccttttcctcagaaacaagtattttaaaccattttttggtgttttagtccagagattgttctgtatatacaagtgtgagtataactgaggggtaaattgttagcacagtacctgttctataaatgtttgttgaatccacacttcactctgttctcaagcctcctgtaacctagcaagaagcaaacagggaagtctttatggaaaggaaattgagctaggccttgaaggatgggagattttgatagaatgtttaatgacttttcacagttatctaaaagggggtttacaaaactctgatgcctataaatatatgagagtttgcaattttggtgggtaaataagaactaaataaaattatttactagtaagaggccccttatctgccagaaaaccttcatacaggaacacaccattaaggatgaatagcagaacagaattaaagttggtcttacttgggactgaaaccgactttgcaaaaaataaaacatgagaaaattatgacataaaagagatctgatataaccaacccccatcttgcctttaacctccaaactgcccttaattattctgggccagggccaagctaactttgggagaaatttagtttatartttaaatgttaataacccttcccccaaactaaactgcctttgtaaagctaataaaagaccaccaggttasgaagagatgaggatcctgaattmtgctaaggtgtagacataaacaattaccagccattattctggaggtyacaagatttgcaactcccgcaattactcctgcagataacatcactattacagagmgagcctaagatyggccttttgagatatcttttcaggtttttacatttctgaggacagtctacccctgcccatctgtcatgtggccccacccaaactgactccttgtcccaccaaactatccttgaaaaaccctagcctctgaattttcaaggagattaatttggtaataactccayctcycacatggcatagctgaccttgtgtctattaaaatctttattgcaatgctgtggtcttagtgaattggctttgtgcagtgggcaggaagaacccattgggtcgtttccggactgtcatgtcagtttgattaatcagtagatcaacatactttgttttagatcycataaattcagctttcttattagtagctgtattagtctgttcttgcactgctatgaatacctgcgactgggaaatttataaagaaaacaggtttaattggcttacagttctgcaggctgtacaggaagcacgagagcttctgggcagcctcaggaaactttcaatcgtggtggaaggtgaaggggaaataggtatgtcttacatggctggagcaggaggaagagagagggggggaggtgccatacactttcaaacaagcagatctcatgaaaactcactcactctacagtaccaaggggagatggtgctaaaccattcatgagaactctgcctccatgatctaatcacctcccgccaagcccctcctccaacattagtggttacattttgacatgagatttggggtggggacgtgcgtatccaaaccatatcagcaggaatcaagacatttcatagtacatatctgggaaaaaaatacttttaggtctaagagatttgctttatcacttccttctaataaaagcccatttccttcttaggaagttgaattcctaagttcatattttcttcttttaaagagagggctaatatcactccttttctgtattaccagccatattccagcagtcacaagacttggaactccctcaattactcctgcaggtaacatcactacaccttttctgtagtaatgaaatgggaatttccagcccaagctcattaataccgtattacagtatctgcaacaggtgagaagataatctggcttggaaaccagattttgaggaaccatattgaatgccaagctaagaaatttggactttgttaatgaggaatattttgtcatggaagggacaatcaaacaggtattgtggaagattaatcagtaatgatgtgtagattattttgcatggtttaatggaagcaagaaaaatcaagatatttttataatatttcaggtaaagtgtaataaaaacccaatgtaaaggagttggaatggaaaggagagggataggtatgaaaaaagaactgacagttgtagtgactggaagtggcccaagatagcttagatatccaatggatctatgcttggaagaatggtgacatcatatcttcagtaggagggygtattagtctgttctcacactgttaataaagacatacctgagactggataatttatagaggaaagaggtttaattgattcacagttccacatggctagggaggcctcacaatcatggtggaaggcgaatgaggagcaaagttacttcttacatggtgccaggcaagagagcgtgttcacgggaactcccttttataaaaccatcagatctcgtgagacttattcactaccaggagaacagtatgggggaaaytgcccccatgattcatttatcttcacttggccctgtccttgacacatggggattattacaattcaaggtgagatttgggtggggacacagtcaaaccatatcagaggataaactgaattgggagaagtaagataggaaatggaacaagggagacagccaaaaagaaagagatacaagcttctgagtattcaaatacctttttttggagttagttttaggaggtaaatcattttaacacaagtatacatggtatgtaaactaaaataagcaattaattatttccataagtattccttaaagaatgttggttaaaattattccaagttcagaagattatctagcttttttttaaagcagatatgtccagagttccctttttatatggctgtaggtaccatcataataatataataaaaatttgttttggaaggttacatttactatgtaaagtgatattacagttttcttttttttctaccacctggtgcaaactttctgtctagcatgatcggtctgttggataaagcacttcgttcaaaatggaatgatgtttattttagacatgttctcagagtaaggtgaaatcaagaaaagagaagtagcctatgagaattattaattcttacattaaaaattagtaaaacataatttttattagtttttattagtttggtcttgcgaattccagctttaatttagaggaatctgtttttacttttatcaagagatggagggtagtaagttgtagagttccttgttttaagatacagtttgataaaatatggttagtagtgtggatcatagtatagtattttgctttgtagggtgttgattatggctttattatggagaacattgttcagtggccatgctgttcctagagtgagcgcttatggcttttgttactgtcaggtgttcactgctaagtttaagatttagggttttccaaatctagccatggatctataatttacaggctttattttcatacttttgtatttacagtaagatttggaaaggcaagaagggtatcgggcaattattttttgaaactgaattgaactttatgttatgaatagaacctcaaagcttgttttctgagaccaatcgaaaaggaaaaagaagtctttgtaaattctaaaaagaaatttttgatgaagatactattgactttgaagaaaatattgccaacatattagtttttatcataagcgtgattaacatttaaaagaaatggcaaaaatgtcttatgttttctttgacaaatccagggctctcttcatgggtgtgtctcacagatggaaggatctcatatttggtttaattacctgaggttgctatattaaaattctgaatatattttgaacaaggtaccttatacttccacattgcactgagccttccaaatcacgtagctgatcgtggatgaatcttttggtttctttcaggttgacttggactctgcttagttcccatcacctgataagaactcncctttaaacatgtgaaatggaggatataattgcaattaaagtaaagcctgataatttaggttgattattgacatctaatcagtttggactaaatgcaagttatatgttaacaaaaatctcagcttcgttagccacaaatgaacacttgaagttaaatgaataatttggtaggcaggatccaaaagagcaatgtctaaaagcttcagagtaaaaggaaaaaatggaaagcacatgtaccctaaaacttaaagtataataataaaaaaataataawaaaaaaagaatagacataaggtgcctgccaatactctgactcctctccaagcctactataagccaatcaattggcatatgtcatgtcctgcagatggaaaagsagtatgtgcaaacatgtactgtacagatgcatggatctgctctgcagctgctggaggttatatttgttaagcagcctgacaatatccatgagttttgaaaaaggtagttgcattataggaggtagactaatcctatttgtttcacgtggaaaccatgctgtctctaacaggcatagtggcttgcttcttcaatgcctagaatgagtctgacaatatttttttcctcacattactatcttagtcatgtgagtgttgagtcagtcttatggacagggagggaggcccaatgcagagtaggaactccggtgatggatgaagcaatgtaataaatagatacagccaaacagatgagtgacccagagacagagagagcatccgttggggtcaattgaccctttgatgaaaaaacaggaggaaacacatactgagacacatcaaactgaagatagtgagaatagtctgttttagttgatattttctaatacttaggaatttctaagtcttaatatttctaacttaaatatagggcttaaaatatttgtaacaaggtataatgtgtatggtgttcacattacagttgtttttgtgaaacggaaagaaaagtgcatgcgtgactgtcttttgggctttagggagttaatgaggaaagggcagtaggctgagcagtattgtctacctggtatatgacttgtgggcatctttgcaggtcatggcttgagcatgggaaggcattaaagaattttgacttgatacagactcctattcctggccttcctggtatgggttgatttggagatgggatcactttacctcattcaggcaggctacaatttaccaaggagcctccttggaaccaccgatgtttagagggataatttttggtgctgatgcagaggcagtatcaaccaagaatcttggttctataggaattttatgccttctttagggagtattaaactgcctttctttattttaaaagtccccttaaattgagaagttggattctcttctctttttatcaatagtaagaatttctatttttttattcatgcattcctgagcatattttgaagtttctacatactttccccccaccagatcttcaaatatggaatagcaggcaaggtcacaagtaagttaatttaaaaaccctttaaatttaatcatttctcatacagggtacagaaaaaattcagccaatttcttcctatattagttttcatcaggacccaatatatctctcctgttcgctattgtgatatgtgcccctgcttgtctctctagataaagcactccttctcagagattttggccttcatattcaattgctttttcctgtctgcaaagaaaaggggcaaagtattcttaccatacttttgcttggtattcgtagtagttaactagtgttttataatatcctgataagaaaagtctggagcggtgttcagtgatgggatttttcttgatggmattatgtattgttaaatttaaaggatatagtttatgctctttaatagcacatcccactgcataacgtcaatatctacttgaaaaatagtctagttatgtagatgatactactctttcaacattaatttcattctgaatgttgttttgcatcccatttgccaaagctatgtgaatattgtaaagttcaggaagggacatgctgaacacctgcactttataaaaatacaaaaaccttcacgtctgtaatcccagcactttgggaggccgaggtgggtggaatatgaggtcaggagattgagaccatcctggctaacacggtgaaaccctgtctctactaaaaatacaaaaaattagccaggcgtggtggcatgcgcctgtagtcccagctacttgggaggctcaggaagaagaatcgcttgaactcgggaggcggaggttgcagagagccaagaatgcgccactgcattccagcctgggcaacagagcgaaactccatctggaaaaacaacaacaacaacaacaaaaaggaaaaacaaaaaaaacttgtagccatttaaaattttctatagtgatgaaagctggatttttatttggcaaagttgtcaggtacctccacagttatccctttatcacttaaatgttctcttgaatcatgaaacacagaagcgtattggttttattacttgcagtgtgaatgacacaagagtgtttagcaaactgtttctttactttcactttctttttttgtcactttctctcttttcccagttcctcctcttctatcctgtcagtccccttctcaactctccttccatccccttttctctttcccttccccctttaccttattttttttacatctccctcctctttctctccttcctttctcctcctccatctccccctcctccttatattgcacatgttcttgttccttaataggatgaaaaatgtaaatcatattgataaagcaccaagggaaaaaataaggctctttggtaaaaactttaaagactataaatatcaaagcatagcagaaggaatgatgttggtttaacatttttctgaccaacttttgtgtatgtcattacataactagcaaagcaaaaagatccaaacagtgtaaaatgcacgaacagttgattttttctacaggtcttctcaatttggaaaggatattaagccagggactgacattttcagtcttgcatcgacaccctatgagaacagcaccagcaacatccttcattaataaaaagagaaggatataaaacagagcagaatgaattaaactgtgaaatagatgaatgttgcctttgattgtcctttccattttccttctcagaattcttttttctcagagtatcttttccctgtcttcccactgatgctcagtatctctatatcctagccacataagacttgcttcttgtccttccacactgtgactcatattctctggagctgcctcttttttagtctaactcattctcaactagttgttagggaaaaggacctgataaagtaagaccttcgtgactggcaacagcttaaacttttatcctccaccagtgctttctccaaagatacccacttgcttagggaaatagtgcttttaatcacaatcaatcaaccatcaaccacctagatacctaaaggatatcacaacatatcatgacataatctcatatggaaaatacagtgaaaatcaactttaagagctgtgctgttcaatatagtagccactactcacatgtggcttttcaatttaaaattaaattaatcataattaaataaactaaaaattcagtttcttacttgtactatccaaatttcagatgttgagtagctactgtgttgaccattgtagatacagaaaattttcatcaacatagattgctcttttgggcagtactccagagtgtactttagagtcaatacagtttctttgcaatttcttaccaagacaatgtagctttatgtagactccaaaatgatgattttgtggcacttataggctaatacgtcctaaagtaaaattttaaacacagtgactacagcaatttttttttcttaagccctagttaactggaaaatgacttagaaacatttgagttaatttctatttaactggatattaaactccaggaaaagagcagatttttaactcttttcataccaagaacatctttagttggttgtaatttcaaaatgttcagaatacccacaatccttaaacagcagtgctctagagaatatggggaagacctcagggaccacatcaagaacatctgaaggatgctgttattgagaaactgtcaccacccagcagtcattttcacactcatcattgttaaggaattctacagcagatatgactttgagaattttacagttgcaaggtaagactgcaccatatcagctacttttttttaatgctctactatgcacaattcacccatgaatccagggcttgtacttaacctgctatttctcccaaaggacatcattatagacagaagtgaaaggtagaatcaaacagaaatagagcacaattgggattacttattttttccacttgccccctgtgtaccttttcttttcttctttgtcgatgaattgttttctgggagaactccacaggaataacaattgacataaacctcggaaatgacaggaactattcaaangtttgtttaaattttgcagatttgtwgtcatttaggcttggaatcataagcctcatggacatagaaggtgggacacacatgatgttactgagaaattaagatttaatatacttaaaaatattggggcatntactttagttttaatgacaatcttattgtgtataaaaatcatctgtattttctctaagttcaatgtagacagaataagttaatcaccattgcgtctatatttttaggattttttacacattttaaatacagaccatgtaaaacacaaacatgtaaacacatatttccaaacagataatcacacaaggactctttcattaatatatattgcctcagtctataatattatggtaagattaattcaatataatattcaatatcacaacaaaatcaacagattcctggaggtgcttatgttactattcttttatacagagattgtgaaartaggagaatccttcaaagtttatcatattattgatataaaaagataaaaaactgaaagaattcatgatgtgtggtgctgtgcataggctggtttgcttaactgacagaaatatgcctaggagaagacgttactaccttaggtgaaatgagtgaaatcagatgagtgaaatttttatcactgttctggtttaaccatcattacagtattagggccatttaaatgtwmtatgttcattacttacaagatttttaaaggagtctgtatgtattatatttaattgataagtatattgagtatctctaaaatattttctttttttctgttgtgctaattgatacacaacaaaatgcaagttatgtactctttgacttactatagctaagtatgtatttagatttgtatgtgtagattacactaatgtaccaaagtactataaataatttgtattgatcatcttgctaatttagtttattgttcacattttgccttcttaaaattttttttatatctaaagcttctattctttagattaagtagaaatgcattaaaacargaaatatactagacaaaagggagtctatgagctctctcaatagcattttctattggtaatcataaggaaaaatttcattccatttttatcactcattctgaagattgataatrtagttgcttgagaaacattacttatgctgtgtgcttattatttctgctgctctcaacgtgaagcatagcatgtgtttttgtgaagaatgttggtacttgattataattgtagctgcatctcatttgataggcaatttcactttggagaataggtgtaagatttttagtattttcagtgtaaatcaggtcaatcccatcagagaatatagagtatgtgaatgatgaatagcatttattccatcatgttattaaaatacagaaaactttttccaaccaaaatattgattttgtgcttcagcttgtttaagactgtgtataagttctacatgtcctggtaaggcatggtcacagccttgttcagaatctgaaatatattggatgattaataaatattggtggaacgatacacatctgtatggtatattggagtgttctgtttaggaaaagctgcttccttcatatgggtctatggctttattcatcaggtatagatggtagtgcatttaaatgcaaaaaataacattagcaaggagaccactgaggtggagcctacccgccccccgcccccgatattaaaacatgttataaagctacattaagtaaagtcctgtatggtaggtgtagattttattttcctcattctaccagggatggaataaaggcttcagcagcttaaaccactttcccaatgtgagtagggggccaaaattcatgttcagtttttctgactccagagctccactgaataagagagccctgctattttagatcatatgtctttattttcttctaattttcttaaagataagtatccatatttatttcattagtaaaaacattttcataatttaccttttgagtagcattatgaattaatggctccccagactcaatatgtctaaataatactcaatttatcaggaattaaatagtaggagcccctttaaatggactggactcctttgttcttttgctatcatccctgctaattttaagtgattttggttagtggccaccagatattccagacacattttgattcttcccatcctaagatataaaatcagcaacctttcatggagtacagattccttatagggaatattagtattaaataaaaggctttcagccttttagtattaaagactagaagacttttctgtaatactaatttttttcttatttttaagactttattttagagcagttttagattcacagcaaaattgagagaaacttacagagattcccctcattgtgttctgatcccctgctcctacacatggatggcctccccattatcaatatcccccaaatgttacaattgatgaactaaactgacacgttgttatcacccacaatccctagtttatattagagttcactcttggtgttgtacgttctgtgggcttggaaaaatgtataataaaattcatccaccattagtatcatgtagagtatttttactgctttaaaaatcctctgttctctgcctgttcctccatccctccttgctaactactggcaaccactgacttcttactgtctccatagtttttcccttttcagaatgtcatatactgtagttggaattacataggatgcagcattttcatattggattctttcatgtagtaatatgcatttaagtttcctctatgtctttttgtggtttggtatctcatttctttttagtgctgagtaatattccattgtctggatgtaccacagtttatccatttacctactaaaggacctcttggttgcgtccaagttttggcaattatgaataaagctgctataaacatccatgtgaaggtttttgtgtggacatgtttttgactactttgggcaaataccaagaagtgcaattgctgggttatattgtaaagtatgtttagtttgtttttcaaacaaccccattaaaaagtgggcaaaggacatgaacagacacatttcaaaagaaggcatacatgtagccaacaaacatagttttaaaaaagctcagcatcactgatcttagagaaatgcaaatcaaaaccacaatgagatatctcacaccagtcagaaaggctagtattaaaaagtaaaaaaataacagatgttggcgaggttgtggagcaaagggaacacttatacacagctagtgggagcctaaattagttcaaccattgtggaaagtagtgtgtcaattcctcaatacctaaaaaacagaaattcattttgacccaaaggaatataaattgttctgtcataaagacacatgcacacatatgttcattgcggcactattcacaatagcaaagacatagaatcaaactaaatgcccaccaatgataggctggataaagaaaatctcatacatatatatcatggaatactatgcagccataaaaagagtgagattatgtcctttgcaggaacatggatggagctggaggccattattctaagcaaactggagcagtaacagaaaaccaaatactgcattctctcatttataagtgggagctaaatgatgagaacacataaagggaaacaacaggcactggtgcctaatagagggtggagggtgggaggagggagaggttcaggaaaataatgaatgagtattaggcttaatacctggtgasaaaataatctgtaaaacaaaccctcatgacacaagtttacctatataacaaacctgcacaggtactccgacttaaaaggtttaggaaaattatgtttagtttttaaaatttgaattaaaacaattttaaatattcarttgacaaagaakgtatatattaaaggtayacaatgtgatgatttgatatacatgtgcattgtgtaatgattaccccaatcatattaattaacataccaattaccatctatgttgtacattagatccccagaacttatttatcttataactgaaagtttgcccccactggtcaacatctccccatttcccacaccctctcatctktggcaactgctgcttcactctgtttttatgatttatgtaaaatcaaaacagtttgattttacatataagtggtatcatattgtatttgtctttctgtgtttggcttatttcacttagcaaaatgccctccaggttcatccacaaatggcaagattttcttcatttcttatagctgaatactattctattgtaagtggttgtatatatacatatatatgaccatttctttattcattcattcatctgcagatgcttaggtagttgccatgttttggctattgtgataatgatggaatgaatgtgggagtgcagatgtcttttcaagctacttaattccttcagatataaattcagaagtggaattgctagatcttttggtagttgtatttttaatttttgaggaatctccccactttttttcattatgactgtatcaatttacattcccaccagcagtgtgcaaaagttcccttttctccacatcgtctcaaatattatctcttgtctttttaataatatccatcctaacaggtgtgaggtaatatctcactgtggttttgagttgcatttcccttgatgatcagtgctattgaagatcttttaatgcactattggccttttgtatgttttctttttcagaaatgtatattcagcgcctttacttatttttaattggattattattattatattgttattgagtggtatgacttcctactatattttagatattaactccttattgaatacatggtctacaaatattttctcccattctttctgtgtgttgccttttcatgtttttggttgtttgctttgctttgcagaagattttttgcagaagaagaagatttttataagtagtcccacttaaatctttttgcttttgttgcatgtgcttttggtgtcatctaaaaagacattgttgagaccaatgtcaagaatcttttaccctatgttttcttctaggagttttacagtttcaggcattacagttatgtcttttatccatttcaagttaatttttgtgagtggtgtagataagggtcgaattttattttatttttgtctgtaaatattcagttttcccagcaccatttattgaagagactattctttccccattgtgcttttacagaatattagttgactgtatatgtgtgggtttattcctgggytcttaattctattcaaatggtgtttgtgtatgtttttatgctagtactatactgttttgattgctatagctttgtaatgtactttgaaatcaggaagtgtgatccctccagttttgttcttaagattgctttggctatttgtggtcttttgtggttttatatgaatgttaggattgttttttctatttctttgaagaatactgttagaattttgacatagattgttttgactctatagatcactttgggtaatatagacatttaacagtactaattattttaatccatgaacatcagggtactttttcatttgtttgtgtcttcaatttttttcatcaatgccttgtaatttttaatgtaaccacagatctttcaaatctgtggttaaatttgtttctaagtggtttatatttttgatgctaatatacattgcattgttttctttctttttcagatagtttgttgttagcatacagaaatgcaactgatttttgtactttggttttgtatcctgcaactttattggatttgtttactagttataataggtttttggttgagtctttgggttttctatacataatattatataatctgcaaacagagaaaattttacttctttttttcctgatttgtatgccttttatttcttyttcttgcttaattgctctggctaggacttccaggaatatattaagtggaaatggtgagagtgggacaatatgtttaattttgtaagaaaccgccaaactgtttttcaaagtggctttatcactttgcattcctatcagcagtgaattagagtttttattactccacattcttgccagcatttggtgttgtcagtgtcctggaatttggccattctaatagatgtgtagtggtatctcattactgttttactttgcatctcccttatgacttatgcttattttcatatgcttattttctatctgtatatatgtttaagtgaattatctgttaaggtcattggcctatttttaaaaatgaggctatttatttatagttgagttttaagaatccttcatatgttttggataatatcgtttatcggatatgccttttacaaatattgtctcccagtctgtgtcttgttttttcactctcttgatgtctttattttttaaaagacatatattagccaaacatatttgtaatagtttaaacagtgtaaacctaacataataaaattgaaattcttgcaactgattaatttaaaaataatattatattcattctggtaaacaaagaaagcattttgtctatttgattccaaaataattagttgattaatacttgaatctaaaagagtaataaacrtttggtccataattatcttttttaaaatttaagaatttgaatttttaattactttgtatttttataagtaatatgaaatgaagcctagttattaaaaaattaaaactttactaccccagtttgggttcttgtctcatcctccccccaaaataataattgctatggtattggtatgtttcctttagaccttttcctaggctctcatatacacatatgcactcagagaaaatacaaagtgttgttgtgtgctcgttttaaaaatatatatgatatcattatatatatcatcctgccacttctgttttttattttatcatatattctggcaatttttcaagctattatatatagattcatcccacattgttcactcaaatacatgtagagccatgatctcagtcttctcaaaatgtagcaattatttctgtttctagaggccatagagttttctttcactgtaagtcatattgattaaaataatccttataagttattttctggaagatagcctttaggctacaaccaaaaagaaaaatgatcagcaatgcctacgtaaactacatattctccattaaatgatttaatataagacattccccacatcactatttgaattggttctcatacttccattctgtgggtggtatacatcttttgtattttaaaatattgatatttgcaatttattttaattttaatcattccgtcatagtgtcagattttttaaaactcctatagatgaatgaaatatgtattctcctggtttcacagatcccttccctacctttgatgcagtttttttgtttactcagatgtaaagtacctgtcttctctttgacttgttttcaagtttcagtctttctgcttctagctgtataattataatgctgatgcctgttcaggaagacttgataacataaaatctggataagatcacatccagactgttttttagcagttcatttaaaattttttaaattagtgaataaaaattatgtatatttgtggtgtataacatgatgttttgaaatacatacacattatgcagtggctaaatgaaactaacatatgcactacctcacatacttatttttttgtggtaagaacacttaatatctactctcagcaattttcaagtacacagtacattattattaactatagttaccaagttatgcaatagatttcttgtatttattcctcctgtcaaagtaaaattttgaatcttttgaccagcatctcctgaatcctgtccctgccccctagcccctggtaaccaccactccactctgtgtccgagttagattcttttggattttacatacaagtgagatcatgtggtatttgtatttctgtgcatggcttatttcacataacataatgtcttctaggcttatccatcttgctgcaaatgacagaattttctgtttttttttttgttgttgttgttgtttgtttgtttgtttgacagggtctcgctctgtcacccaggctggagtgtagcagcatgctcacagctcaccacaacctcgacttcttgggctcaagcaattctcccacctcagtctcccgagtagctggaactacaggcatgcgccaccacgcctggctaatttttgtatgttttgtagagatgagattttgccatgttgcccaggctggtcttgaactcctggactcaaaccagccaccagccacccacctcagcctcccaaaatgttgcaattataggcatgactcgttgcaccctgcagattgttttctttttaaaggctgaatagtattccattgcatatatactacattttctttatccatttggccattggtagacatttagggtgattccatatcttggctattatgaataatggtgcagtgaacatgagagtacrtatatctctttgatatactgatttcatttcccttggatatatacacagtagtgggattgctgattatatgatagttctattttcaattttttaaggaacctccagctgtttttcatgatagctgtatcaatttatatttctaccagcagcatacaaggattccccttttctctacatctttgtcatcaagattacctgtagctttcaattccatgttctatggatctaaatccctccctaagaattctgtgaatgactggtttgccaggctcaaatgatcctcctacctcagcctcccaagtagctgggaatacagggatgtgccaccttgcccagctaacttttatattttttgtagaaacgggtttcactatgttgcccaggctgatgttgaactcctgggctcaagcaattggctcatctgtgcctcccaaagtgctgggattacaggcgtgagccactgtgcttagccctactttgcctttaaccattttgattctgcatttaattgtccagacttacgtctggtcaatctgtgcttaactaactactctttttatttatacaacacatccacattgtagttacgtatttttgtgattttcttggttaatagtgttaagttctgagatgtgagccctgtgaggagggcagggatgctcaccattctattaccaattcctagcacagtacctggcacagagtaggctctttaagagactcagaatgtaaggaaggaaaagttgaagagtacttggggtttgtgatgaggagaagatagccttgaaaataaaggggaacactgggcacagtggcttacacctataattccagcactgtgggaggtcaaggcaggtggattgcctgaactcaggagtttgagaccagcctgggcaacatggtgaaaccccatctctacaaaaattacaaaaactagctgggtggggtggcacacacctgtgattccagttactgcggaggctgagttgggaagatcacctgagttggggaggtcaaggctgcagtgagccatcattgcacaactgcactcagcctgggtgacagagtgagacattcctcaaatttttttcaaaaaagaaagaaacaaaggggagataagagagagagaaagaaagagagagagataaagagagagaaagaaaatgatgagagagaaagactatgtcttccttgaagacaaggaggagaagaaatgagtggaaaaacataatgagactcaggtgaatgaagaagtttgccaggtggtctcatctcagtttccccagagtggtagaaagtgtatggatttggtacttacataaaattggatttgaatcctatatcttctcttttaaggggattattagacaacttacttaatcttgctcactctcggttttcacatgtataaattaatgatgataataccccacaaaatggttggtaatggttaaataagataacaaaagcagcattgcatggtagttatagcatggaactggaagtagacagatttggacagactcttccctctgctacttactagctgagtgatcttgggtaagttacttaaagtctttaattttgaaaagaagtggtaggaagaaaaataaggaataaatttattaatcaaataaattataagctctccagagagagataaaaatatagaggatgatatcaatacaaatatatttgtttatagctatgcgccaggattcaaacccaggctatctgcttctaagacctgggttctaaatttctagctatacttactcttttaaacaaaataatataatagaagaatatggagttgggactcttaattatatttaaaaaataatgttctgtcagcaatcaaattattaaggaggtaagtatacattgagtggaaccttaaaaaaggaaaaatattttctatttcaatggagtggcatcctgaaaaaacaatatcctattgattgtctttcatgggattaatgccatgaaacacactgaaatgctgttttaacatagctattgtgcatcggaagaggtaaaaacttatttcagttggtcttaaacaaatccagtgccatttcacaggacatttgatttactttaaaaaattcttgcctttttattgattcagtgacaaggttagtgaaaactttagtaggttggaatagtaggacagttgtttcaggcaaaatcaagagacctgcctataggtgtcagatgtcagaacagacaacggtttgagttcagatgagcttgaagaatcggaagtcttaaaagtcaagcatgtaaaattccaaatgctgagatagtttgaggaatgaacctgtagagcagaagctagagtgaacttaattctacaatataggctatttactaacatgaaatcacagctagaacatggcaaaaaagccagaactgccaaaaatcacggcagttttttcttgcagtacttacagcaaacagatttgaaatgtaatcagttttttcctattgtcacaatgctggagacatattcactgtttctatcacatcttctaattacattagagcaattaaagagcaattctattgcctgcatagtcttttcttaatgatgccacactggaagtacatttccaaaaaggttttaaatggtttaatttttttttttttttttttgtgagacggagtcttgctctgtagtctaggctggagtacactggtgtgatctcggctcactgcaacttctgcctcctgggtcccggttcaagcaattctcctgcctcaatctcccaagtagctgggattacagacacatgccaccatgcctagctaatttttgtatttttagtagagacagtgtttcaccatgttggccaggctggtcttgaactcctaaccttgtgatccgcccacctcaacctcccaaaatgctgggattacaggtgtgagccactgcacctggcctaaatggtttaatttttgttatgaaacattgtagtggaaagtttgtactaaatgagtgggccaaagaaagatgtggtaaaagtggcaaatgaaataaggaggaagacttagatgaatgaagccttaactgatggccagccccattgtagggattatggtttcatcaaaaataatatctactgggtaaagaaaaagaaatgttaaatttgctttttgtaaagttaatttcctttcatgtttttaaaaatttttttgcccatgtaagacagaaaaatggagagactcaatagaggcatagaaaaaaaggaaaaaaaggccggccgtgatggctcacacctgtaatcccagcactttgggaggccgaggcaggcggatcatgtggtcaagagatcgagaccatcctggccaacatggtgaaaccctctctctactaaaaatataaaaattagctggatgtggtgacgtgtacctgtagtcccagctacttgggaggctgaggcaagagagtcgcttgaatttgggggtagaggttgcagtgagccgagatcgcgccactgcactcaagcctggcaacagagtgagactccatctaaaaaacaaaaaaagaaaagaaaaaaagaaaaataggaagaaaacagtcaggaaaggaagaattctcctgcatgcttttaagatatttaaccaattttatatcagatctatattctagtttacattttacattatataaggggccttcaaaaagttcatgaagaatgtgtattataaaaaactatgcatggatttcaacattttttccaccaaaataaactcatactaacttgttgtaacatgtcagaatgggatttattttgaggcactgagaaagataaaacatcagtttgaagaacctctatcagcaatgtgaattctgataaaaatgaagcaagaacaaacatcaaatatgtggtgaagactgggcaaaagaatggtaaaatcattgatgctttataaaaggtttatagggacaatgcctcaaagaaatcagcagtttacaagtgggtaactcattttagtaagggatgagatgatgtcaaagatgaagctcaaggtggcagaacatccacatcaatttgtgggaaaaaaattaatcttgttcatgtcttaattgaaaaggactgacaattaacagcacaaacaatagccaacaccatagacatctcaattgcttcagcttatacagttctgactaaaatattaaagttgagccaactttctacttgatgagtgtcaaaaatgttgctccgggagaagctgcagataagagcagagctttcaatagaaattttttaaacaattgatatcaagatcctgaagcatctctccaaagaaatgtaaaaggagatggaacatggctttaccactacgatccctaaggcacagcacagtcaaagcaatggctaccaagagttggaagtaatcgagtcgaagcaaaattggaccagtcaagagcaaaggtcatggtaatagtgtttgggattctcaagacattttgtctgttaacttgctgggaggccaaagaatgataactacttattataagagtgttttaagaaagttggccaaagcgttagcagaaaaatgcttaggaaagcttcaccagagagtccttctccatcacaataatacttgtgctcattcctcttattaaacaagggcaattttgcaagatttgcataggaaattattaggcttccatgttacagtcccgatttggctccttctgactcctttttgtttcctaatcttaaaaaaattgtaaagggcacctatttttcttcagttaataatgtaaaaaagactgcattgacatagttgaattcccagaaccttcagttctttagaggtagactaaatagctggtatcatcacttgcataaatttcttgaacttgatggagcttacgttgagaaataaagtttacattttttatttttatattttaactccactttttacgtgaactttttggagtaccctcacattttattttttatttatttattttttaattatactttaagttttagggtatatgtgtacaacatgcaggttagttacatatgtatacatgtgccatgttggtgtgctgcacccattaactcgtcatttaacattaggtatatctcctaatgctatccctcccccctcctcccaccccacaacaggccccagtgtgtgatgttccccttcctgtgtccatgtgttctcattgttcaattcccacctatgagtgagagcatgcggtgtttggttttttgtccttgcgatagtttgctgacaatgatggtttccagcttcatccatgtccctacaaaggacatgaactcatcattttttatggctgcatagtattccatggtgtatatgtgccacattttcttaatccagtctacaattgttggacatttgggttggttccacgtctttgctattgtgaatagtgccgcaataaacatacatgtgcatgtgtttttatagcagcatgttttataatcctttgggtatatacccagtaatgggatggctgggtcaaatggtatttgtagttctagatccctgaggaatcaccacactgacttccatgatggttgaactagtttacagttccaccaacagtgtaaaagtgttcctgtttctccatatcctctccagcacctgttgtttcttgaatttttaatgatcgccattctaactggtgtgagatggcatctcattgtggttttgatttgcatttctctgatggccagtgatgatgagcattttttcatgtgtcttttggctgcataaatgtcttcttttgagaagtgtctgttcatatcctttgcccagttgttgatggggttgtttgtttttttcttgtaaatgtgttggagttcattgtagattctggatattagccctttgttacatgagtagattgcaaaaattttctcccattctgtaggttgcctgttcactctgatggtagtttcttttgctgtgcagaagctctttagtttaattagatcccatttgtcaattttgacttttgttgccattgcttttggtgttttagacatgaagtccttgcccatgcctatgtcctgaatggtattgcctaggttttcttctagggtttttatggttttaggtctaacatgtaagtctttaatccttcttgaattaatttttgtataaggtgtaaggaagggatccagtttcagctttctacatatggctagcccgttttcccagcaccatttattaaatagggaatcctttccccattgcttgtttttctcaggtttgtcaaagatcagatggttgtagattggctttatttctgaggcctctgttctgttccattggtctatatctctgttttggtaccagtaccatgctgttttggttactgtagccttgtggtgtagtttaaagtcaggtagcgtgatgcctccagctttattcttttggcttaggattgacttgctgatgtgggctcttttttggttccatatgaactttaaagtagttttttccaattctgtgaagaaagtcattggtagcttgatggggatggcattgaatctataaattaccttgggcagtatggccattttcacgatattgattcttcctacccatgagcatggaaagttcttccatttgtttgtatcctcttttatttcattgagcagtggtttgtagttctccttgaagaggtccttcacatcccttgtaagttggattcctaggtattttattctctttgtagcaattgtgaatgggagttcactcatgactcaggattaagaaactcactcaaaacccctcacattttatagtaagggaacattacacagtgctgtttttttaaaaaaaatgttttaaaactatatctttttctataataattttttcttcctagcttgactctgcagttgtggcttttaaaattgtatcctggctactttcaatccccaaatatttatcagaatgtaatgtaacacaatgataagtataagattttatatataaacacacacacatatacttatttacatacttamacacctctacctatataaaatacatatacatatctataatcttatacataagattatatactaggaagatcttataatatcttcacagtgtgtttgtgtgtagattcacactcagaatttcacactctgaagatcattatgtgattgcatttcatgttaagggttcttcagagagcttttattctacactatctctttcttcaattctcacattatgcctaatcttggaaagacttcctctcttggagtattttaataaaagacccttagagcagcatataccttccatcttttcttaagaggctgtagattatctcgacttctattacctgaagatatgtctaatggaaaccttaaaaataccgtgtcagkttctaatagctggaaatagctggaagttataatagatcaacaggaagaagcagttttgttttaaattaaataattaaaattcagaatttactttgatatgttagtgttaaagttaactaaagtttatgatttaaagtgaggcataatgaaaataatattaaatctggtattgaaagacatggatacttgtctgaacgtcactgtttatttgctctatgaccttgggtaagacagcctttcagcctcactcatcatcagctgaaatgtgtagttattaatactttgctgcctacttcctcatggtgctgtcaggatgagatacatgaaaatattgtataaacagtgcagtctataaaagttactattgtaaataacagttaatatgctccagtcagtgtattaagcatttatatcattcttacaacagttttacaacacacgcaacattaatattctgcttttatagatcaagaggttgaggctcagcaagtgtatgacacctgcatgagggagaaatgtaagatttgaatccaggtctgtctgaggctagaacaaaagctcataattgcatcactttcattatttatcagaataataatcactacatagcattatgtgtgaaccagccgaggcagtaaaacacagttctctttattatcacatctgaattctaaatgcaaaaacaaaataacatttgtttttcrtaaaagtgaaatgccatggagctctaaccatacaaatgtgttcttctcttagaatttaattgtcctgaatccactcacagtaactgaggaggaaatacgaccatcactagagaaacgccttgaagccattatcagtggggctgctctgctggcggattcttcatgtacgagggacttacaccgagagcggattatcgcagaatgcaacgccattcgccaggctcttcaggatctgctttcagagtacatgaacaacgtaggtgactggtttgccttcccatccctagcccctcttcccttgtactttgaatataggctgagatactttccgtatacaaaatagrgtaaattacaaatgagtatgtgattttacataggttgattttctaagtgagttctgcttggttatttacagggaacaacaaccctgggaatttctagggatgagatcagaaccagaagggtatttacaggtgattgttttgtttgtggaagtatctcactattagttgaagaagggaatcaggattggagaaaggaaactagagttgcacatcaatttaagaaatataaagaagataaagagaggggcagattgctcaggatcaagttagtgaataatgaaaggccattagaagttagtatccaataacagtgatattacagggatcatgagctatgtttgaaggygtgtaaagagcccatgcaggttgttatgtttttttgttgttgttgttttatggagatagacagggtcttgatctgttgcccaggctcaagtgcagttgggcaatcacagctaatggcagcctcgaactcctgggctcatatgatccttctacctcagcctcccaagtagcttggactacaggtgtgttaccatgcccagctaatttttgtagtttttgtagagatggggttttgccataatgcccagactggtgtcaaactactgggctcaagtgaccctcccaccttggcctcccaaagtgctgggattacaggcacccacgtagttttggcagctcttaatctttttcaaatgtgacagtgtctagttttttttttttttttttttgaagttttagctatcagaaatattgtaaatgtctaaatttagggcaaaaatatttgtttcaaagtccattttgtttcactgtatttatacatatatatgaaatacatatctcttcatctatggaatgtctgtaactattgttcccctcaaatcttggtaatatttataaagtgaagagaaaaatcttgaatatattttcaattatatattgattatgaagattccttaaataatagagctaaacaaaatgaaagttataatagcaatattttgttcatctgcattattataaatagaagaattcaagattcatgtaggtgtgttttgagaatgattagttacaaagggtatgacttttcaggtatgaatttaagatatttgagattgttcaattatgtgaataattgaaatgcactaaaattatttggtgcattttgaagacccttcaacacatttgatgtatcttcatactcttaatatttgatgactttggttcctgaccagaaatctctcacctgtcgataaatcaaagttgtaaggtagatttctttaataagaaaattttagtattgtcatgtcctagacatgacatgtcctagaatgcctgaagctagaatatccccatttttagcatataatatattcttaaagatttttcaaggtaattcatcagtcataaaaaacttagaagataatattttattgaaatgccttctttcatgatatgcaaactgttacaattattattttcctctttacagataaaatatagtaaagttatatatacatttatttttcctagaaattataaaattgtaagttcaatttatctaaaatagaaagttattttattctttataggtacaaattcagatatatatacatgtgcacacttacccacatacataggtaaggttggccacgtaatttgtggggcctaatacaaaatgaaaatgtgaggcttcttgttcaaaaagcaggagaaaggaactgtagctttcttacacagtctctcgtgacctatgaaaggttatttttgtttgctatttaatgttagatttctagagtatagaggtacttataaagtgactatataaagaggtacttataaagtgactatataaagaggtacttataaagtgactatatgtctcgtgacatataggtcacgagagactatgacctatgaaaggttatttttatttgctatttaatgttagatttctagagtatagaggtacttataaagtgactgcagaccctcacaggcatctgtggccccaccaaatgaccctgacccaccccagggtgtgccaaggcccccacaaggaataaagggtggcagtaatcactgggtgggagaacaggtggctgaggacctatcccaggaagtcactcggaggcaggactgcatatgagccaagacatgtgcttcattgctgcattggactacacagattcacaggtaaaattgttaaaaaattcaagactgtggtagcagagcatgaaaacccaagcctgggacccctgtctaaaattgggatcctatgtgcagtagcaggtccctgaagctgsccctgtgtataataaacacatatcacatcaaaataatggtgattttatggttttcttaaactgagcaaattggactgaactaatgaatattgtaattaagtgtaattaagtagcaggaaccaacctggaaaactgtggagtgtattattgtatctcatccccaggtttactgtcactccaggtttctatcacaaataatgcttctttatagctgttgcatcagttttaatgaaagggaatgcatttttctggaactagctgaactcaaaccttgctcaccgtttgctcaaagacttgggatggctctaatacttaagtcctcatctttctattttaaggaatactgtgtctcctttggtggacccagttgtttttcagatcagtcagtagcttttgtaattgagctgtgctgatggagcaaatgcttgatgataagcatgaaaactgaaagtgattaattcatcaaaacctgtgagtcttttaggtgaaggggacttcagagattggcttaaattttgcaaatctgttgcrtccagccagagcagttccgcaatgagaaatgaatgcagcttatgtttgtctcaggctcagtccacacaaccatatgactcctctgagtctaaataaattcagttccttaaacagatcagcaagtcttgatcattttttaaaatggaatctcaacgttcaataagttcaatgtcttgtcacattaagaagaaattagcaagaaatgagatgagatgggtctataacggacaaaacagacaaccacttaacactattgattatgtatgtttgccctaatatatactgtcctgttaaatttatatgagtggatacatatgtatatatgtttggttagttttctattgctgctgtaacaaattaccacacacttagtgtcttaaaccacacaaatttctgtctttcagctctgtaatcaaaagtctgacctgggcctcactggagtaaaaatcaaattgttggaggaatgcattattttctggagtctctagggaagagtccattatttttgccttttccagtttctagaggtcacyctcattccttggctcatggccctctgcctccatcttctaagccagcaacgtcatgtttctctgaccctgcttccaacctcacatctctttctctgaccacaccttggaaagattctcttctttttaggactcatgtgattagtgggagccacccagattatccaggataatcctcccatctgaaggcccttaaccttaattacatctgcaaaatccctcttgccatgtcaggtaacatattcataggttctgggaatttgaatgtggacatctctgggagactcacaacattatatcaatactagtcttccctagtctctttggtggaatcattatcaatcctttcatttcgaatccattatagacagcatccctcatacactttaagytctgtgcaggcagatcacatgtctgttttgtttagttttatcccaagcctcaggcacaatgcatagaatttagaaaaagctgaattgtatttttggatgaaagagtgaatgaaatgattgcatgttgtatatgccatgtaatggagaaacagcctctctgacattaactgaaatgagtttcaagcatctactacatttatacaatggactgcctgttataaaaggtcttattttgcaaagcattaaatctcttctggaaatcaatgtaaatatccagaaataaattcttttttatcttaatctctgcatttggatccacatccagccctattctagaacaggatttttattcattaaaaatacactccaggaaacatttaggatcagaaaaaatatagcttttgtcttttaaaacttagggatatatatatttctaagatatttctgctgattttgttatatctctatgactggttagacctagttcatcttctctgatgtataacataattaaggaattttttyataaatggggcagagcaacgaggccctgtgaaaaaggaatgatcttcaggaaatcaattatttttacatggtgatctttctgtaattggtgaaaatagaattgtaggtaggcagccatcatgtttgagttctaagataacaccaagcatggatatttttctgggactgggttgaaatcatattgttgtagttgggttggatgtgttagataggtracatataattattagtaaagttaatattcaggtgatacatgactataggggattattagaactgagtgagagataatgctgctagagtaaacaagtcagatctgagctccatgcaggaactaatttgcatttctggacctctcatccacccacttgtttcttctcttggtgttttatgtggaagcacattgttggttctcattacgtatttgctgagtgaataaagaatcaaatggactggctttgttattcagaaacctgttttattgtgtgtcttgagtttaatgcattccatgtcttgggaaattctgaaaattcatataaagcctacacgaaaagagatgttatgggatttttccttttgtatagacctccatctcactcctgaaaatgcattttggaaataattccagccttaattaattaatttatttttatttcctatgatgatatggtaaaacagttgggaggaacaatatgcaatggctttttgaatacaagagacaggttagaattaaaattctaaaaatgtaaaggcagttttcagcctatgtttttccttctttccctccctccctccctcccttcctccctttccctccatcccttccttcttcccttcctccctcccttcctttctttttttttttttttggcatggactgcatatgagaattgtcattatcacctcaagtgtactgtactagatgctttacatttttatattcttaaccgttttcattattatgtagtggtaactgatttttgagtggttgatttggttagagataatgtttttcagtttacagatatctggataacttaaaagaaataaatagtatcctatataggtctgtgcaagagtggatatgccaaaaacagagatatcaaccaaggtcagattgattagagcataaagtcaaagtccaagaagatataaaggaatcatcccaatgaaagaggctggatttagatattgaagctggaatataggagctgatgattcaacaagctgggagttgagagaaataataaatagtggggatctggttaagttggcaaaatgctttttttttctctgatttcttttctgtgcctaaattaaggactaagtattacacaggtatttgcatatgtgaattgttttggaaataactttattgtttcagctattatttttctgagctgctctgggttcctagtcttattcctctactaaatgttccttaattccatagatgactgttaaataatgattccaaatccttcttgacaagttaagtttggtgtcacgtagatctggcatagaatatccactttggggtttaagaggagcttgtgcagtgctcattggggaaaaggaggcatctgggttcctctattgaggaaacagactattctcatatatctcttctttgtgctctaatgtactaatctctcttaataataaaaattaattgtgagaatcctacagaaatgcaagctatgtgattgcggaactagtaagaaaagctgaaataataaaaagtaggcagccatttttatcttttttaataaaagggaaactaatcagatagagccagagcacaggaggagaatgaaataatttttgtaaaataaaagtaactataaagtaatggagaatattccaaagtgtcaaaacttaagtcttgcagagagcaatcaatacagaggtgaaaagcagagagcaatacagaggtgaaagtccctaaaggttacatcctcttggccagagagcttaaagcctgagagccctttgtcatttgccttccagcagaggcagccatgatttctaatacctgtggggcaggtcagtcattcactttgtggattgttccaactgatcctttcccaagaagtgggttcctttactccctagtgtttaggcattcctcatatgttagaagttcctgctatggttttttaacattaaactttactcagagttgtttgttacataaaataaaactaggtcaaatggtagaaatgacaggaatatagtaagaatcaagaatcctggcatgaagtattagttctaacttggacraaatataagggtcctgagcctagtagagttcctaggtgggagctgatggtagaatgaagagtgattgttgtcttagatcatatacactagaacagacttgaaagtaaatttgagtacaaaaaagttttgttgggacagtctttcagaaaataaacatataaggaaacatataaagaaaggcagattggcagagaagccaacttacaatggaaatcttagctgtcctrtggggagtgttggagctgggatggcctttcagaattgtctcatattgaaacgggggaatggacccttagaattcctgcaactgtcaatcattgatggcatatcatcccaggagctctgtaactttggatgaggcaggttcctgcaactgaggactgttcccagtgaggaaaagagatgtgagccatcacagctggtatttccagctgaaaagggaatcccttataaaggaaatctgggtgaagcaccacattattcactacaacagttaatagcaaaaatcaaaaggttgtttttatagcccttgaacaatgaaatattatcctgtgttagcaactatagtcagaatatttggcttcacagagaatttaatttactattggtaatgtttagaaaattattaggagaaacatgtaatttgttatccaaaccgggatacatttttttttttttttcctgagatggggtctggctctgtcacctaggctggagtgcagtaacataatcttggctcgctgcaacctctgcctcctgggttcaagtggttctcctgcctcagcctttcgagcagctgggattacatgtgtacaccaccatagctggctaatttttgtattttttagtagagacagggtttcatcacattggccaagctggtcttgaactcctgacctcagatgatctgcctgcctcggcctcccaaagtgctgggattacaggcgtaagccaccgtgcccggccaaaactgcgttacttctgagagacaaagattcataaaatggtcaacagaccttaattgatctacaaaaggcatctcaagcaaactgagaggtatggccacctagaaactatatgactatatgactatagtgtgtgtgtgtatatatatgtatgtattatacatatgtatatatataataaacacaagaatacatatgatggattttgagagagatttaacacatttttctgacagattttgtatgggctataacagatagctaaactgtaaaatttaaattaaaatgctattggtgttactgcatttctagttacataattcttctataaacactgtgctaagaagtggtggtttcaaagtactaacaactgcagtcttagttgtcaaggagaatcaaacagacaagtacgtgaaatggaacatgataaaaactgtaatactgatgaatgctaagtactataagagcaccaagtagtaagtggttaactcccctggggtggatcaggcttcagaggagagaaagctcttaagctggcttttgaaggagaagtaggtactcattagacagttgagggagttgggaattccagaaaggggtaagagcctgtgcaaaggcacagagcaggaatcacataggttgtttgttgtaggaaatatatgaagttcagtttggaggaaaagtagagggaagaaagaaaggaaggatatgagactaagtactggccattagtttgcaaatgtgtttcttttaaatatttgataaactcccaatatttttttccttctaaaacaagctgaattttaatttttgcctatttttcttcaatgttaatcagttatgagtccctcatatcatcttggctgtcttatattcataaatcaatttccattgaaatatattaatttatctttttattttgtttttatttttattttttggcagggtcttgctctcttacccaggctgctagagggtagtgatgtgatcacagctcactgcagctttgaccttccaggctcaagtcatcctcccactacagcctcctgaatagctgggactacgggtgtgcactaccaggcctggtcaatatattttgtttttctttttttttttttgagacagagtttcactgttgttgcccaggctggagtgcaatggtgtgatctcggctcactgcaacctctgactcccaggttcaagcaattctcctgcctcagcctcctgagtagctgggattacaggcatatgccaccacacccgtctgattttatatttttagtagaaacggggtttctccatgttggtcaggctggtctcgaactcccaacctcaggtgaaccgcctgtctcagcctcccaaagtgctgggattatgggcgtgagccactgcgcctggcctagaartaccaaaatatttactttgaatatgcttatatgtctcacataagatttagcaagaagcaattaaaatgcctgaaaaccatttaatggtacaaaaaccatgaccttttgtggtactatatactggaaaatatgattcagtttattttattagccagcactatcttatggaaatattatgcaaactacaataatatgtgagccaaatagataattttaaattttctagtagctacatacagtaaaaggaacaggtgaaattaattttagttaagtcagtgtatgcaaaatatcatcatttcaatatgcaatcaatataaacatcataatgagatatcttacattctgttttagttataagtccttgaaatttgatgtgtattttacatttatagtgtagctggactaaccatatttcgtgttcaatagcgacatgtggccagtggctgccatggtagacagcatagcactatgcagaattgccttctccatcatagtgtttgtggtttttttaacctttttttagatacaggggtacatgtgaaggtttattacataggtaaacttgtggcatgggagtttgttgtacagattatttaatcacccaagtattaagcctggtacccagtagttatcttttctgctcctctcccttttcccaccctccaccctcaagaagagtccagtgtttactgttttcttctttgtgtttataagttcttgtcatttagctcccacttataagtgagaatatgtggtatttggttttctgtttctgtgttagtatactaaggataatagcctccagctccatccacgttcccacaaaagacacgatctcattattttttatagctgcataatattccatggtgaatatgtgccttgttttcttcatcaaatctgtcattgatggacatttaggttgattccatgtttttgctgtgaatcatgctgcaatgaacattcgtgtacatgtgtctttatgatagaatgatttatattcctttgggtatgtacccagtaatgggattactgggtcgaatggcagttctgcttttagttctttgaggaattaccatactgctttccacaatggctgaattaacttacactcctaccaacagtatataagtgcttccttttctctgcaaccttgccagcatctgttattttttgactttttagtaatagccattttgactggtgtgagatggtatctcactgtggttttgatttgcgtttctctaatgatcagtgttattgagcttttctttatgtgctagttggccacatctatgtcttcttttgaaaagtgtgttcatatcctttacctgctttttaatggggttgtttttcttttgtcaatttgtttaagtctcttatagatgcttataagtttcttatatcagacctttgtcagatgcatagtttgcaaatattttctcccatctgtaggttgtctgtttactgtgttgatagtttcctttgctgtgtggaagctcttaggtttaatcaaattttgcttttgttgtgattgcttttggtgtctttgtcctgacatctttgcccattcctatgtccaggatggtatttcctaggttttcttccagtgtttttatagttttggtttttacatttaagtctttaattcatcttgacttgatttttgtatatggtgtaaggaaggggtccagagtcaatcgtctgtgcatggctggccagttatcccagcatcatttattgaatagggagtcttttcccaattgttattttttgtcagctttgtcaaaagatcagatggtcgcagatgtgtggccttatttctgggcctctcttctgttccactggtctacgtgtctttttttgtaccatgctgttttggtaactgtgttctgtagtatagtttgaagttgggtaacgtgatgcttccagctttgtttttttttgcttaggattgccttggctattcaggctcattttggttccaaatgaattttaaaatcattttctctagttctgtaaagaatgtcattggtagtttgataggatagcaatgaatctgtaaattgctttgggcagtatggccattttaatgatactgattcttcctatctatgagcattggatgtttttccatttgtttgcgtcttcactgatttctttgagcagcattttgtaattcttgttatagagatctttctcctttctggtaagctgtgttcataagcattttagtctttttgtggcaattgtgaatcagattgcctttatgatttttctctcagtttggctgttattggtgtgtaggaatactagtgatttttgtaagtcaattttgtttactaaaattttgttaaagttgtttattagctgaaggagcttttgagctaagactatgggtatggggttttctacatatagaatcatgtcatctgctaacagagatagtttgacttcctctcttcctatttggatgccctttatttctttctcttgcgtgattgctttggcttagacttctaatatgatgttgaatagaagtggcaagagagcattcttatcttgtgccagttttcaagggggaatgcttgcagcttttgccctttcagtataatgttggctgtaggtttgtcatagatggctcttattattttgatgtatgttccttcaatacttagcttattagaagtttttaacatgaacgggtgttgaattttatcaaaagccttttctgtggctattgagataatagtggtttttgtcttttgttctttttatgtgatgagtgatatttattgctttgtgtatgttgaaccaaccttgcattctggggatgaagtctacttgatcatggtggattatctttttgatgtgctgctggattcggtttgccagtattttgttgagggcttttgtcttgatattcatcaaggatatagctctgaagttttctttttttgttgtgtctctgctaggttttggtatccagatgatgctggccttgtagaatgagttggggaaaagttcctcctcctgaattttaaggaatagtctctgtaggaatggtaccagctcttctttgtacatctggtattaatagaatttggctacatcatgatgtttttaatgttggataacctttttttattttgagatggagtctcactctgttgcctaggctgaagtgcagtgacgccatctcggctcactgcaatccctggcccccagttcaagcaattctcctgcctcaacctcctgagtagctgggattgcaggtgtgagccagaatgcccagctaatttttttgtattttttaagtagagatggggtttcaccatgttggccagggtggtctggaactcctgacctcaggtgatttacctgccttggccttccaaactgttgggattataggcgtgagccactatactcggccgataacctctatatttttataactttaaaaatgctactgttggggtaataaaagaaaggagagagaatacttaggtcagggatatctagagctacctcaccatgctgtcattcctagggttatccagtaaaataagcaagtggcattttatacttgtatattggaaaggaatgaaattttctatatgtcatagattgtattctctaatgatagctacaacaatatttcacattttgcaaattctcctctggcatgactttgcttttcctccatcaaaaagatagagtttaatacttttcttcttgaatcttggctggacttaataacttggttgaccaactaaatatggcagaagtaacattctaggacttctgaggctagattataaaaaggcttttagctttcacctgattgttttggagtgctcaactttgagacatttcccctcagaatgcaatttctaggctgtatgaagcccagcctacacagagagataacaattaggtaggcactctggttgatagagctgcattcctagccaaaagcccgcattaactgccagcactgtaaatatggtatcttgtatgtctagcctattcaaaattttatatggttcccactgcagccaaactttgactgcagctgctcagagacctgatgtgtcaaatctcagctgagcccagccaaacctcagaaccataagaaagaataaaaaattgttgcctttttttttttcttttttttgagatggagtctcgttctgtcacccaggctggagtgccatggcacgatcttggctcactgcaacctctgcctcctgggttcaagtgattctccttcctcagcctcctgagtagctgggactacaggcatgtgccaccacacccggctaatttttrtatttttagtagagacagggttttgccatgttggccaggctggtcttgaactcctgacctcaaatgatccacctgcctcggcctcccagagttctgggattacaggcatgagccaccgcgcccggccagaagttgttgctttttaaacattaggttttgcaatggcttcttacacaataatagataatcataatactatacaattttttaggcaaagactttactttgagaagaacataaaggatctgaattaccctaacaacaaatgtagggaatagcctagagggtattctaggatgagttagactgtctccttagccataatggtcaagagttgttagttacagctttattagaaagaatccaaaactgatgttagtaggtagaaagatgtagagaaaattattaatggattctattacaaagaatagatttagttaatccctgcaaatctttcatgttctttaagtctcgggttaaaaattaaaccagtgtatataaattaaacacttataacagagatctgaagtgggtgaaccttatctaattataagggtaaagattctagtgtccagtgtgaaaaaaaaccaagaaagctaggtaagttacactcttgcagaattccattttaatgagtttagttttgtctgagtgcatttatgttataatgatattggtaattgcatttaagaatgactgaaactttttcaggtgacccacaattgatatttctaaaatgtgcgttatgatcacctgccctctttagcagtattaaattagaatcattgaatacctagtgattatataatttatgctgtggaatagtcacaggcaaatgtttatttagcctcttgcagtttctaagtctcccttcctccttggcaattttaagtgcagtactgggggctcaggagaaaaggaatatgcaaagaaaatacaaagttggcaagacggttagtatggcagttggcttacaactgggaagagaaaaataatttttgtttggtgcatagcagagatatgataatcactatttgtgataattatgttgtcttttgtagaaacaagctctttctaatttgacaactcctttagaagtattgactgttcattttatttagtttctgacttttatattaaacctaacacttgtaaaaataaaactgactgaatctacttgataactgcttttaattttagttcagctgtttatgctatatgggaaagcctatccatcttctctcattttcgtcccaggaatacctctcaaagactagaaactaaatttttaaaaaaacttttaattttgaaataattatagattcaaaggaagtagcaaagacagcacagagaggttctttgtaccctttgcccagtttcctatataggttgcatcatgtgtaactatatagcaagatatcaaaacaaggacattgacatattgacataaattatgtatatagttttatcacatatatgggtttgtgtaatcaccaacacaaaaacgatacagaaatattccatcactacaaatatctcccttgtgctaccactttccaatcacacctgcccctccctacccctaccacctgcccctgccccgtgcctaaccctcggcaaatgcaaatctattctccatttctataattttgttattatacagtgttttataaatggaattacacagtgtaggaccttttgagattggctttttaaaaactcagcataatgccttagagatccatccaagttggatatattgatagtttattcttttttattgctaattagtattccatggtaggatataccattgtttatacatttgactatggtaggacattctgttttttccagtttggggctattacaaataatgcttctatgaacaattgggtacagatttttgtgtagtcataaattttaatttctctaagagaaacacccacaagtgtgattgctaggttatggtatgtgatgcatagtttttaggaaactgccaaactattttccagagcaattttacattcccaccagcaatgtatctagttattcaacactctgaccaacatttgatattttcactattttttattttagatgttctaatcagtgtgtagtgatattatgatcttcattctaatagccagtgatgtcaaacatcttttcatgtgtttatttgctgtctgtacatactcttcagtgaaatgactcatcatgttttttgcctattttctaataggattttttgtatagtagtttactgttaattattaagagttgtttatacattctatatatgagaccttttcagatattagttttgtaaatattttcttgcagtttgtagctaatgaagtaagctttatctattttttcttttatgtgtcatgctttttgtgtctaagaatggttcaacgagttctaggtccaaaatttcttttctgctattttcctaaacgttttatattttacatttgattttgtatttatgatccattctgagttaactttttatgaagtgtgagacttttctcaaagttcctactttttgcctattgatatccagttgctctagcactatttgttcctccattggattacttctgcatatttgtgaaaaatcaatttgctgtacttgtgtatggctatttctagtttcatgattctattttattgggctgtttgtttattccttggccaatatcacaaagcattgactactgtagctatataataagtcttgaaatcacttagagttattcctattaatttcctatttcaaagttgtttttagctatcctagctactttgtcattccatgtatattttacaataatttttaatgtctaaaatttttttcttaggttttataagaattataaaaacttgtatatcaatttaggagaattgacatatttactgtgttgtcttccagttcatgaacacaggatgtctctccattcaattagatctttgatttctttcatcagcattttgcagttttcagtatagaagtcgtacacgttttattagacttatacctaattgtttcatttttcaggtattataaatgttattatatttttaattttaattttcacctgttattagtatatacaagtaaaatcgatttttgtatgtttatcttatatcctgcaaccctcctgaaatcacttaktagttcaggaattgttattattgtcgttttggtggattccttgggattttctacatagaaaattatgtcatgtatagatagtaggaatagttttatttcttccttttaaatctgtatgtcttttacttaattttcataccttactgcaccgattagaacttccagaaatatggtgcgtaagtgtggtgagagctgatatccttgctttgttgcctattttagggggaaagccttcagtcttttgccattaaatacaatgttagctttagatctctttttgatagatttttaaaaatcaagatatagaagttcttctctgtttctagattttggagagtttgtgtgataaatgggtgttgaattttgtcagataaatgccttttctgcatcaatttacataatcatatgatttttcttgtttagtttgttaatatggtagattacattgattttcaaatatcaaactagccttgcaaccctggaataaatcttacttggtcatggtatacaattcattttacatatggatgaattctatttgttaatattttattagaaatattttcatctctattaatgaagagtattaatttgcagttttcttataatatctttgtttttggtatcatggtagtaataaaattgattggaaagtactccctctttttttatcttctagaaaggttgggtagaacaggtgttacatatgtttaaatatttggcagtgttctccaagaaaaccatctggggatggagatttcttttccaggagtttttatattatgaattccacttccttaataattatagagctatttaaattatctgttgcatrttgagttagttgtgatagcttttgcttttgaaggaattggtttatttcatctaacttgtcaaacttacatgttaaagttgtttgtataatcccttattgtgctttgatgcctgtaggatatttccttgtttcattcctggtcttaaaaatttgtatcttctcttttatttttgttaatttttctagaattttaacattttatcttgatagtttcaaagagaagcttttttatttcattgaatttctcgattttcattttcaattttatttgtgttctttattattttcttctttctgcttactttgggtgtatttcatgctttctttctagatttttgagatagatgattagattactgatgtgagatattttctgtttctctgcctctttttttaaaaactcaagcccagtgagagctggaatgttttctcttttgcagattttcctgttrtctttcaataatcaattttctattttgatttgattgtgcrcagagaacacactctttgtgactaatttttttttacatatattgaggctattttatggcccaggatatggtctatcttaatatagtttaatgggcacttaaaaataatatgtatttacccttattgtcctttgctgcctgtaggatatttccttgtcccactcgtggtcttgagaatttgttgaaaaatttaaaacaaatttgaaaacttgaaaaacttaaaaataatgttgttaggtaaggtgttctataaaatgttgactagaatctgttggttgatggtattgttgaatttttctatatcctagctgattttctgtctagttgttcttataattgttgagagaaggatgttgaagtctacagctataactgtgaatttgtccactcttccgttcagctttgtcagtttttgcttcatctatatttatagctctgttgttaagtacatgcgcatttaggctagctatgtcttcttgaaggattgactcttaatattatgtaatgtctccctctctcctgagtaattttctgtctttgcagtcttctttactggatattaataaagctactttcttttgattaatgtttgcatggtttatctttttccacccttttacttttaatatacctgtatcatgatgtgtgaagtaagtttcttaaggatagcatgtagttgagttaggtctttaatctgttctgctaacctctgtcttttaattggtgtatttagaccatgtatattaagtaattattgatgtggtaaggattatgtctaatctatctacctatccatctaatttgttttctgtttgttccctctgtttttaatttatttttcatgactttttgtcagttacttgaatacactttagattcttttttgatgtgtctatagtatttttgagtatatatctttatatagctattttagtagtttatcgaggtatggcattatatacacataattatcataatttaataaagttgrcattttaccagtttgaggaaaatgtagaaccctttatgtaattttatctcactcatttattatataaatatattaaatatttgttttatgtatattgagaaacacrtaagactgttttaatttttgcttcaactatcaaacataatttagaaaactgaagaaagaagtgtatttttattcatatttttacttttttgttatttcttctctcttgatcttcagagattactacttttatttattttaatttatttattgtgacaaaagcactcaataagagaactacaatcttaacaaatttttaagtgaacaatatatcaaatgaaaactagaggcacaatgttggacaacatatctctataactaaattgttttgcatatcttaaactttatacctgttgaatggcaactttccatttctccctccccaatcccctagcacccaccattctaccctctgcttctctgtgtttgactatttcatatgcctcatataagtggtatgatgcagtatttgttcttctgtgactagcttatttcacttagcataatgttctcaagaattcattcatgttgtcacagtgcaagatttccttgtttttcaatacagaataatatttcattgtatgtatataccacatattttttatccattcacctggtgatgaacatttaggttgtttaaacatcttggatattgtaaataatgatgccgtgaggccgagcacagtggctcacacctgtaatcccagcactttgagaggctgaggcagggagacctctcgagcccagggtttaagaccatcctggggaacatggcaaaaccccgtttctacaaaaaatataaaaattaactgggtgtggtggcacacccctgtggtcccagctctagggaggctgaggtgggaggattgtttgagcccaagtggtcgaggctgcagtgagccatgattacatcactgcactccagcccgggggacagagcaagaccctgtctcaaaaaaaaaaaaaaaaaaaaagatgtgatgaatatgagagtgcakatatctcttccagctactttttattttcttcatgtataaacccaaatgcgggattgctggatcatatagtatttttatttttaatttttttgaggaaatgccatgctgytttccatagctgtgacatcattttacatttatatcaatagtgtacaagcattccttttccttcacatcctcctcaatatttgtgatctttttttgtttattgataatagctttcctaacagatgtaaggtaatatctcctggttttgatttcattttcctgatgactagtgatgttgcacattttttcatatactctgagtatctgtattttttctcttgagaaatgtctattygggtcctttgccattttttttattgggttatttgttttcttgctattgagctgcttgaattactgatctgttttagatattaactccttatcagatagatgtatgatttgcaaatgtttccttccattctataggttgtgtcttctctctcaattgttgcctttgatgtgtagaaaatttttagattaatataatccttcttttctatttttgcttttgttgctcatgcttttggagtcatacccaagaaattattgccaatccaatgtcatgaagtttttcccctatttttttctaagaattttacagtttcaggtcttatgtttaagtctttaatccattttcagatgatttttgtatatgttgtaaggtaaaggtccaaattaattcttttgtatatggatattcagttttcccagcatcatttgttgaaggaactaccttttccccattctgtattcttgacacccttgttgaagattagttgactttacacatgtagatttttaaaacatttttaatttcatttttaattgataaataacatgtggattcatttctgggctctctattctgttccattggtctgtatgtctgtctttatgttagtaccatactgtcttaattagtgtagctttgtaatcttttttgaaatccagaagtatgattcctttgtagcaggacgagccgcagacaaaacctctcagacactgagttatagaaggaagggctttattcagctgggagcatcggcaagctactgccttaaaatccgagctccccgagtgagcaattcctgtcccttttaagggctcacaactctaaggatttcacatgaaagggttgtgattgatttgagcaagcaaggggtacacgacaggggctgcatgcgctggcggtcagagagaaacagaacagggcagggagtttcacagtgttsttctatacaatgtctggaatctgtgaataacatcgatttttaagttatgagttgatttttaactactgggtttaggccaggcaggcccaggcctggtttcaggcstggctctgggctgcctgtctttggttttacttccttgttgttttttttaaaaacaggtactgagtataaaacaatataaaacaatatgagagggtctctctcttccctcctttcccccctttgaggctctcacttttttattagtaggagttctcacttttatttttgttactttttttttttgtaatagattgatagtgatttatatagtacacttgtgctgaagcattttggtgaactaagatagcgatgaagctttttatcatttgaagaagtacaggtagcaagcaaggaagcagtaagtaggttcttattactatcataacttttattataagagttttaagttctcctagtgctgggaactgatttttaaacatggcttcagggtccaattcgtgctacacttatgcgggcacatgtgtcagttttgtcatatttttaactatgtctttaactacttgcctttgattatctatgtgtagacagtaattagtaaggttaaatttcttatagacctctctttcagctgctagcaagtagtcgagagcccatctattttgatagatagcatttcttatctgagttttttgccaggccagaatagtcaaagcttgaccggttttattagtgatgatttctaaaacagcttgcaaccgtatgattcagttgagcatgtaaatgggggtccagtattcccatgagccatcttgtgtctaagtgccaggcctatagtattatataattttttttttggaggtcatttatcatctttccaattacctatggctatgcttcatttttcgcgggaagcatagacagggaagccaggagtttgcctgtttttatgggcagtaggaagaaagatggtttaatagtgccagtaacacaactacctgtccactggtcaggcagcttagtgtaggctctatgtctacatattcagtataacccggtgggggcagtccagtcccggtggaattctgggtgggccgagacagtctgcaaccttggaaatttactgaaaggatctctttctatgtaatttgaactccaccatataactgctttttttgtggtactgttatacagtttttgccccagacaactaagtcctcctacagaatgagtgaattctttcctttttctagctatgcaatattgttcaataattgagacttttagaacctagagatgatcagggtgatttttttgggctgggaattcatcaggaactggctctgtaggcactaattcttgggcttcttatggccattgatctcttattacagtttctccacaaacataacatgaagtgacatttagagactgggctacatgcgcggctaattgcaaaaacaaattcctggtttttcctagagtctctggtactggcacatttagttcatcatagaaagtctgaaatactggttccggagagagtttacaaacctcctcttttactaagatatttactgtaggacctagtcttttcctattgatgcccagagatatgtgttctccttttttctaccttgggtttaagggatttgtaattattaatttcaaggggttgtagcttccactcatacaggaggggctgccttctccctttyggaactaaacaggacctttttcaccttttttaaagtagtctagatgacacaagaccagtaattacacatgtttgcacatgagcttaattcatggcagatatacttatttgtatgttgattttgtactctgcaactttactgatacgttttgttggttctaacattggtgtatttgtgtgtgtgtgtgtttgcatgtgtgtagtctttataatttccttcatgtaagattatgtcatcttcagagacaatttaacttcttccttttaaatttggatgctatgtatttctttttcttgcctaattgctctaactaggacttatagtactatgttttacagaagtcaaaaactgtactaagagagaaaggaggacattatatagtgataaaagggttgattcattaggaagatacagcaactataaatatatgtacccaacatcagagcacctaagtatgtaaagcaaatattaacagaactgaaggaaaagctagatagcaatataatataacagtaggatattttactatcctactttcagtatgagtagaacatacagacaaaatatcaataaggaagcagcagacttgagcaatactttagacttaatgcaactaaaaaaacatggacagaacattccatcaaaaacaacagaatatacattcttctcaaatgcacacagaatattatccaggatagactacatgttaggttacaaaacaagtatcaacaaatttacggagattgaaatcttaccaagtattttttttttctgaccacagttgaatgaaactaaatattaaatattagtagcagaagaaaaactggaaaattcacaagtatgttgaaattaaacaatatactcttgcataaacarcaagttaaagaataaatctaaagcaattgaaaatattttgagactaatgaaattgaaaacaaagcacaccaagctcatggaatgcagcaaaaccagtactaagagggaagtttccatgactgttgacattcaaaaagaagaaakattttaagtaaataatctaactttgcatctcaaataagtagaaaaagaagaacaaattaagcccaaagttagtagaaggaaagaaatggtaaagattagagcaaaaataaatacaagagaacatagaaaaataatagaaaaaaatcattgaaactaagagatggtttttttgaaaagatacaaaattggcaagccactagcaaaagtaagagaaaaaaagactcaaataaaattataaatgacagagtagacatgacagctgatacaacagaaatagaaaggatcttaaaagactactgtgaacaattctacactaacaaattggataacccagaagaaatggctgaatgtctagaaacatacaacttagccaagaatgaatcatgaacaaataaaaaatctgatcattatatgtaactagtatagagattgaatcagtaatcaaaaacttcccaacaaagaaaagcccaagatcagatagcttctctggtgaattctactagatacttaaagaagaattaataccaatccttctcaagctcttctaaaaattgaagagaagggaacacttctgaacgcagtaacaaatgacctagggatgacaaactttggaaggcagctatgctaaccattataacaccaatgcaggatgccaaacttagtaagttttactttatgctagaaaaacttagaaaaaaagtactgataaagaagatggaagccaatcatggataaaacaattataacacaatctgtattttcatctgtaaaatgaataaacaacatatcccaatctacataataggattatttggtaactaaaagaagaatgaatgtaaaacacacacacacacatatattaatacaaacacatatacatagtatatacatgtatattttaaataatacattaatgacacattatatctcggtaattattaatgataacttaacatttctttggcctgtactagataatttacttattgtcatgtaatcattacaacaattctctaagtagctagttaaaatgctaactttaaaggtaaaagaattaacaaccactttgtagttgaattaatgatggcaccaaggcagcctgactctagagcttctgctctttacctctcttccttagtatccagttaattcattcatttgataaatatttattgagcttctgttatgcacctggcattgtaaaagtgctgaggatatattaatgaactaaagagacatgcttcttgttcttgggaagccaacagcctactggtaacatagacataaacagtagtcctctaaattaatacgtaattacgaatggagtagaaatgaaagaaatatacagggtgctaaaaaaragaaacaatttgaatttaaagggaaagaggtgatgtagaaaacctctctatgttagaggccaaaaggataaggtagatgttatccaggagaagtaggaggtgaagatgaaaaaacacaytcctaaaaagataacagtttaygcagacatcctcctggggaaaakagctcagtgcccgtgaattctggaaagaactgagtggcttcagttcagagattgagggggcatatagtgttagatgagactgggaggcaggtaggcaaggtaggggtcatgctgggccatacagctcatatgaacattttgggacattaaactgagtgcagtcgctataggattggaggggtgaagaatgaaagggggacctctgcaaaagccgtgtagcgggtttgtataatgaaaaagtaggattaatgacttctatggttgtccatttgagctaaaaaattcatgcgttttattctaatcttcaagcatccaagggtttttccttttttcacagtatattgatttaatctttgtagtgctagtaattcaaaggcaaagctcttattggatttgtaattcaatgagaaatacagccctcacataggtgtctgacttaatgactcctgctgaagttgaattgtgagatgttatccatctcctcyctgaaatatgaattctagtttagcagaattcgttgtccttagggagttggtaatatcacctttggtatgacttaaaaaaaagcccattaacgatatattttaagatgaaaagtaatagaatgmaggttattcatatatttattttcagcttgacagttgaaattacatgctaacattttactcttatcgtaaaagttataaaacattcctaaattaacttataatatgtataggcttgtttaaagtttaaataaaatattgaaatgtatttatattttaaaatacttatacattggatatagtttgtaaaacaaagttttttttaattgagaattctgtttaattttggctgctgtttaacaaataattatattttataagaaattacctttctcccttaaaggtggttgacaaaataaaatggttggcaaatataatctactttttgttccttgaatacttttacattgcattttccttcttatctctgataagaaactctaaaatcaataatttttaaatagtgtacctatgaaaaaaaggaacattttgaaagggagaaaatattccatactttatgttataaaatacaaagcaacttcattttgagtaacagcttaattagttcaataaagaatattgtgttttgctagcaaattaacgtaaaacatactttactccaccacctcttgaagccaggagtaaaataaaatatagaaatctactctaaattcacactaataattctggtgttttgaatttgacaaagtggaggttagaaagatcgctgctgtcggagaactctgaatttaaattctaactctgataccttctctatgccctggggcaaatttcacaacctttctgaaattccagtttcttatctgaaaaaaggaataatataattacctggtcagattgttttgatgatgacatgagataaagtatataaaattgtgattttcaatcctggctgcacattattatcacatgagaggcttaaaaatttctcaagtgaaggcccccacctttgaccaattaaatctgaatctctggaggatacactcatgaatcaaaatgttttgtaaaaagattcctggctaggcgtggtggctcacgcctgtaatcccagcactttgggaggtcaaggtgggtggatcacctgagatctggagttcgagaccaacctggccaatatggtgaaaccccgtctctactaaaaatgcaaaaattagctgggtgtggtggtgggcacctgtaatcccagctactcgggaggctgaggcaggagaatcgcttgaatctgggaggcagaggttgcagtgagctgatatcacaccactatactccatcctgggcaacagggaaagaccctgtctcagaaaaaaaaaaaagattgctgggcgattttagtatgtagtgtgaattgaaaactggtaatataaaagcatcagcacagtgcctcgcctatggtaggcatgtaataaacgttagtttcattctctttctcatataagttagttgtcttcaatttataaaaaacttagattccttctggaaagacagctataagctatataaaggtttactgaaagataggaaaaagtataatcattctctttggcaaagtataacaagtagaagctattttgtgggtaattataaatagtccctttctttatagttagatgttgaaatttaatttagcttatcctatatcaacagagatttaattaaaaatgtgtaattataatactgggaggcattgatgaatatggccatttattattcatttgaaaatgcttaagttttatgataagctttagaattctttgtcatttcataagtcaycatctttatatgcatttcatctaattgcattatgaaataaatccacatttatagattactaattatgacactaaacgtaatgtatgcttttcccaatttattgatttctatcartggtgttatctttctcccagwgtaacgggcacataatttttaggtcaactttgattcatcttctcttatttcttaaatacaaaaaagtacctaatttggcagtttcttcttattctgtatgtagttcaatatttttcaaacttgatgatatgaagacctgatctttcagtgagtgactgggagccattagacaagagaggtagatgatgaggctgaagggaagtctccaagttcactccctgcctccacttcaaacagcaactctactctcttagtcatatgttagagtttggtgtacaatttcacttttcaaaaggttcctctgctaaaaagaaagtttgacaaacactgatttagattataaactcttacaatatggagctaaattaaagaccacatcaaggaaaacaacaattgtcaactagtggcttcagactttcttttggggagggcagaatrgggggaaactggagaagaaaggaacaacagaaaggggatgacacagcatgttatcccctaggggaatggctggagtggcctataagaacaagagtttttaatggataatcttaagtttgcattctatcatgtatatttccttcctcaaaacttcgaacaccaagttttattttgtgtgagtcatggaaaagagctgacttgtacatatggatgctgctctgcrgaatgctgtgatactccgtaaactgaactgctttgatagaagctgcagcttagctccctgagcatgtaagcctatggtgatttacagaaaccttggggagcacatcaggctttatataagccatagaaagggaatttgaaggacttattttccagggtgaaaagggatacacaatattactgattattctgaggtcatatgagggagatgaagcttgttttgttcctgattatctgacttgatgtcttgtatttttgtttataaacctaattaaagtgattgggcacttttccacttttccatatgatacttggtgtcatgttattgttaactcgttgtcttgctttttgaaataataaaggaataaaatacattaccttatttttttttattcactgtaagtttgcacagtgctggaaaatttgatggcatacttctcgtggttctacatacagatgaaaattaaacaaaaaggcatattgacatttaaggattctctttaatgttctgtattcctaattgaattattttgagggagatagccaaaggaaggcctttcttctcaccttataagaaaaacaagcactattggaaacatggtcttgaaaaaaaatttttaaagtaatttttagttttaggaggaaatgaagaaaaagtatctgtgtgaagacagccttgggaattagccatctgtgcatcatgggaaaaaattccattatctactgaagaagagttttttgaagatgtgtgtagagctggaactcagggtggggacatacctcttactatccatttatgaacttaaaagaaaggatagccgtgtagattgagaatgaagtcttccaagtaaatcttttaaaaaattcttcccctcataccaaatctcaaaataaggctgataaatctgttaaacatgatgtgttgttggcctccttacatctccccatgatgagtgcatacagataatggaatctgtccatgtcttattaccctatttatcactgactttgggctagtaaactctcacaagttttgtattatacagcatcattgaaaagagaatgttcttacagctgttgaagacttctaatgatctcaactctgatattgttgtgattctttttgactatattttctggtttagaaccttaaatttgaaatggcattataattggattaattctccgttggagaatctgcaagaatgttactaacatgatctttgtggaatgaagggcatttacattaaagtggagatgaatattttgttcctcaaacaaataaactacttggtatttaagcaaatggccaaaataaagtcatattctgattaaaattagtgtttctgtacatgctgattcattcatatttatttwtttcctacatacagcatatgtcttaagtatattcaaggtaattcatttcagacaaattaaaagtagatattgaagtaccttatatgtgakgtttgcaaatcaaaattccatggaatttccaaatacacatttaagcattaataagtttagcttattaaagagagattgcttgatattccaagtttaataattaaaaataatttttatccttagattaagtaacattaaacactggagataaattattcatatgcataattgaccttaagtaaatcgatcttttataacctttctatactcagtggttttggtaagctcttttagataatttgatttagggaagtgattttcaataaatgtgcattgaaatcttctgatttgtaaaatttctgaatagtgtgaattatttattaaaattctaaataagaatgcctcattatttgttgttttataattctcaaactygaaaaacattatcaaaatgccagggtatgctgattgatagtgtrttacactcaaattggactaagagagtttgatcggcgcaggagctgcattctttgaatattgactatggaccaggcactgagctatgcattttatatacttttatttatttggtgttctcagagaacttctagactctagcatttactctgtgatgttggacaagctacttaccatgttcacatgcaaatcaggaaatcaactcttagtttagaagtttcatattaccacctttcttttgactttctttttgttttttgagacggagtctatctctgttgcccaggctggagtgcagtggcgcaatctcggctcactgcaagctccgcctcccgggttcacgccattttcctgcctcagcctcccgagaagctgggactacaggcgccygtcaccacgctgggctaattttttgtatttttagtagagacggggtttcaccgtgttagccaggatggtctcaatctcctgacctcatgatctgcccgcctcggcctcccaaagtgctgggattacagccgtgagccactgcacccggcctcttttgactttctgctcaaactgtccccttacttatagttgaagaagacaagaattgcattttccaagccatgattgtycctagtacctagtagtagtagtagatgagtgatgttcacaagctatattaatgtgtaaaataagtaagcatcatgactgcctgagagtaaactgggaatattggataaattttatgttgggcgtttactttgaaaaatatattttatgtcaggcccctgcttttcttgcctttcacattacctgagtgttgttaacaatggtcacagtggagggctgaattwggatgttgaatttagccataagacaatttatactttgaagattagatttaagctttatttttcattatttaatatgctgaagataagagsagccaaaatgggaaatatgagaaatttagcttaaatgtataaactctcacaaacccagttcttacagctatgatagaagtcctattgtggatttactgcatttcttggcagtaatgcttactgcaagctttattacaaattacctataaattgctatgtgttttcactttcatctttatgtagatttcaccttgggtcacatttgctcccacatgtaagaagagggtagtgcactggatgaggaaattttgatgtgatatgtttgtcagtaaatgcatcttatctgaatattttcatttctctatgcttattgggtattaaagatatttttctgaagaaggaattacagtaaggacaagcctgcattttcaggcaagctaggatttaaattgggagaatcaaagtcattccatcctaaccccatgatctggtaaagagaaactcatacttccatctgttctaatttatgtgaggtacctagatgatcatattacttccctctacgagacactggtgacagagagtcagccttttccttctgcactggcttgggcacacatggagaagtatattagttcattcaagaggacctcaaggaggttgctggctattcaggaaatatatttccttttcctaaggctggatttggttttaggaggatggctgtatgcaatgagaatggcagtttatttgttctgggaacaatgtatttttgggtttttgtgtgtatgtatgtcctaaatccaatttttccccagtgggatcttctttatttttctagttcatatatagcttttataagcaagtgataattaatggaacagacattttagttgttgttgaatcctttccakttctcttcccatcataagggccagcttcagatgctgttaggtcctaataacttcctggtgataaccatgtggcccacccatcccattaatttctgcttttattctgaagttattgaagaaacaagagtaattcttgtatatatttttgatgcttacctaataagatactaggctttgaagaaatgcaaataatgtctaaatgttcaatctatacagcttcaatattagcaaactgctatgaaagtaatgtttacacatttttttcacatttttgtaattttgagttcaatgttgamccaaaatttcctgggactagaaaaaaaagagcctgattatgagaaaagaagagcaaaacaacagaagacaaatacaattgtagtgtaaaatgtactattttgatttgaaagtttacacgtgtactgaagaccaggaaacaatctgaatattgcaatacaaaaatatcttgcttttctcatttatctcagtttattcttaaaggtgttcatcaattactgttagatctagcaggctatttgaagagctattagtgtattttgaccctggaagaaaagaatacattttgtgctttagtgaaatatttattttatgtggttgataaayacttatagaatatttactcagtaccagttactgttttagaaactttatacatcatttaattctcataaccattctgtgagataggtgttattattatcccaggcttttagatkagaaaatgggcacagaggttaaataacttgtaaaagttcaccaagttgtctggtccagaacttaaaacttcaggctattttgcctctcagtgctgcattcattctaatctacttaagttgtattcatttaaaagactacaaattgcaatttgaacagggtcaatttatgattttttaaacttagcaaggagaaagatttaaatgtagaaagaggtggatgtayagtcatgtgttgcttaacagtggggatgttttgagaaaagtgtcctttggcaattttgtcattgtgtgaacattatagaggggacttacacaaacctgcatggtatagcctactactgcacacctaggctatatggtacagcctattgggcctaggctataaatctgtacagcatgttactgtactagatactgtaggcaatggtaacataatgttaactgtttatatgtctagatataggcccagtaaaaatgttattataatctatggaaccagagttgtatatgtggtccattgttgactaaaacactgttatgccatgcatgactgtatataaattatagtacatgatgtttccagaaatttctggatgttttttctttaatattttgggaaatgacctagattgcctaagctgacccagattgcctaagagatgcctatgcaagcatctctcttaaatcccaccaatcctgtacttacctttatacagaatgaacgttatttgcccataattgagagtcccaaatgattactaactggctytcttttttgaacaatttcatttattctctgagatgggtttatgtgagtgctataatatgtgtggctataatatgcatgaacagtgttgtgtatatatttttgtaaaaatgttcgtctagattcctgaagcaaggagaatatgagtatgctcatatttgaatctctttgctactctcctagaggcagaggtatatagatagacacttaaaatattctcagttagtttggaaaattagcacttagacaatttctatgtatctataggttatcaaactatggatatgttcttaaaaatgttgcaattcacagagagctaggcacttaatgcagagaagaataatgaaaggtttgcttttcctaagtcttgttcttcacttaatgcttttgagccaagtcatttcaacattattttaatgcaaatttcaagaaagtatctgatgagtgtgtgtgtgtggaggggtgctggggtagaggtgttggttggaaggtgcagtacatggatccatagaagatgattcagtacaatacccagtaattcacacttggaacacctgacaacaattgaaatatattaggccaaggaagaaattttttctcctagcaaaccttctctgaagtggcatttttcctaaccttcaaggtagaataaatcctcaatatggtaataaccaagaactgcaaataaatattagagatatttgctgactaaacatctagctttttgcacatgtggtaactttgttcctattattattagcttaggataatagtgaaaaatatttcaaatatatatttataatagataccgtatgaaaaaataatatcaggccgggcgcagtggctcatgcctgtaatcccagcactttgggaggccaaggcaggtggatcacgaggtcaggagttctagaacagcctggccaatatggtgaaaccccgtctctactaaaaatacaaaaattagccaggcatggtggtgtgcacgtgtagtcccagttactcaggaggctgaggcagaagagtcacttgaacccaggaggcgaaggttgcagtgagtcgagattgcgccactgcacttcagcctgggtgacaaactgagactccatcaaaaaaaaaaaaaactaaaaaaatttaaaaaataataatgtcagcttagttcctttattaccaaggtttccacacctactaccccatcaaacaactcttttgggttaactgattcaggaatagggaaaaagtctgccagtgccatttttctgacagcatgtactcatttcatgtttctgtgttacgctttggcaattatcagaatattttaacctttattagtattatatatgttaaggtgttctgtgaccagtgatctctgatgttattattgtaattattttggsgcaccatggaacatgcccatgggggacagtaaacttaattgataaatgttgtgtgtgttctgactgctccagagaacagccattcctccagctttctccttctccttgggcctscttattccctgtgaaacaacaatattgaaattaggccaagtaataaccctacagtgccctctaagtrttcaatgaaaggaagagccgcacgtctctttaaatcaaaagctagaaatgcttaagcttagttaggaaggcatgttgaaagcttacgcaggccaaaaactaggcctcttataccaaaaagctagctaatttgtgaatgcaaaggaaaagttcttgaaagaaattaaaagtgctattccagtgaacatgcaaatgattaaaaaacaaaacagctttattgctgatgtaaggttttagtggtctggatagaagatcaaaccagccacaaagcctaatccagagaaagaacctaaccctcttcaattttgtgaagactgagagagataaggaagctgcccaagaaaagtctgaagccagcagtgtttgtttcatgtaaggaaataagtcagctctataacataaaagtgtagggtaaaccagcaagtactgatgtaaaagctgtagtaagttatttagaagatgtagataagatcattgatgaaggtggctacactaaactacagattttcaatgtagataaaacagtcttctgttggaagaagatgtcatctaggactttcataactagagaggagaagtcaatgcctatcaaagctccaaaggacaggctaactcttttgttagatgctaatgtagctggtgactttaacttgaaaccaatgctcattaactcttctgaaaattctggggcccttgaattatgctaaacccacactgtcctctataaatgaaacaacaaagcctagatggcagcrtgtctgtttactgcatgttgtactaaatattttaaacccarcgttgaaacctgctcagaacaaaagattcctttcaaaatattgctcattgacaatgcacctggtcacccaagagctctgatggagatgcacaaagaaataaatggagttttcatgctttctaacacaacatccattctatagcccatgggtcaaggaataattccaagtttcaagtcttattttttaagaaatacattttgtaaggcgatactcgctgtagatggtgattcctctgatagatctgggcaaagtaaattgaaaatcttttggaaataattcaccatttttgatgccactaagaacatttgtgattcatggaaggaggtcaaaatatcaacattatcaggagtttggaagaagttgattccaaccctcatgagttactttgagggtttcaagacttcagtggaggaagataccacaaattaaagcaggggaggaatagcaagataactgagttagaaatggagcctgaagatgggaccaaattgctgcattttcatgacgtagttatcgtggattagaagtggcttctatggatgagaaagtggtttcttgagatgaactctattcccagtgaagatgctgtgaacatggttaaatgacaacaaaggatttagaatattccataaacttagttgaaaaaacagtggcagggtttgagaggattgactacaattttgaaagaagtgctactgtgagtgaaacactgtcaaacagcctcacatactacagataattttttttttttttttttttttaagacagagccttgctcagtcacccaggctggagtgtagtgagtggcgtgatttcggctcactacaacctccaccttctgggttcaaacaattcttctgtcccagcctctcgagtagctgggattacagtcgcccgccaccacgcttggcttagatggtgttttgccatgttggcaaggctggttttgaactcctgacctcaggtgatccacctgccttggcctttgactcaaagtgctgggattacaggcatgagccaccgcgcctggcccagataaatcttttgtgaaagraagagtcaatcgatgcagcaaactccattgttgtttcattttcaaaaattgccacagccacccctaaccttcagcaaccaccatcctggtcagtcagcaaccattaacatcaaggcaagaaccgccaccatcaaaaagatttcaactcactaaaggctcagatgatttttagcattttgtagagagagatacatatacatttgagacagagtcttgctctgtctccaggctggagtgcagtggcacgatctcagcttactacaacctctgcctcccgggttcaagcgattcccctgcctcagcctcccaagtaactgggattacaggcacatgccaccacgcctggctaattttttgtatcttactagaggcggggtttcaccgtgttggccaagatggtcttgatctcctgaccttgtgatccactcgcctcggcctcccaaagtgctgggattacaggtgtgagccactgcgcccagcctttagcaatatttttaaaataaggtatgtacattttttttagcataatgctccgcacacttaataggctacagtaatatagagtgaatgtaatttttacatgcactgggaaaccaaaaaaatccatgtgacttgctttattgtgatatttgctttattgtgatggtctgatacgaaacctgcagtatctctgaggaatgcctgtattttttaacccagcaggttcactcattgtaataggaaaaaacaaaagttgatatatacacacatgtatttttcatgtgagtatgtactaatacacattaaaaaaaatttttttttggaaggaaacccagggagacagaactgtggaggagaagagaatataccttttactaaccttgactatgttctactttctaaaaaagtcaataagcagttatctgagaaagggattatggatatagtttttgttctccaataatatctcttttttttcctctcacctgcccccgactacgtcctaatatatgttattttttcttggtatagaaaacactttttttcattttcataaagaaaattttgttgaagaagattaatcttccatttccagaaaatgagtttgtttttataaatcaagcatatggaaaaattgcatcaagctattgctgtaggtaatgcactgaattaccagcctcttatcattttggtatattttataccagaaaattcacaactatgcagctgtttattaaactgtaaattggcttggggcctaggttttatgtgcctctaaaatctataaataagaaaaaaaaacaccctggatatattttagaatatataaaatgctttccagttaatttggtgttttatataaattttatctatatttatagtcgtgaccttatatatcccataaaaacagggaagaaaatcaagactaaggcagctgcatttatatttttggtgaatgttccatagaaagaaaatagctgcttttgccctgagtcttagacgccaagttgatatcagtaatttagggccattatcaaacaaaaatggccctcactatggctastctgttgaacccagcatgtcttctcagttctacattttcagaggctgaactctattccaagggggtaattttgacttggtcattgtcacataatgygggtattaccgtacatgaccacacttcccrgggataatggcacagctgggctgccaattgggcttaggagaatgacgtcgggtttattttgctcccagcaatcctaggaggacaaaacttgctttggttggaaagatagaatagtaatagatattttgttgttatatagcacttgcttgtaaaaaaaaaaatcttagagtgcctttgcaagcattaattggcattcctcttaggttgataagtgttgttacatggtgtacatttaaagatttttttatggtaatatatagagctggataattagactatggttaaatgacagagctaactacaaaaacaagtagtttagattcctttttctggctctgatcaccaaatattatctttgagacggcaagggagcatgcctctacattgaggtgatgtcctattttaagctccttcaaagcagaaactgtttttcttaatttcttagctcttgattctcttctcaagcatgggatcattttaatagcatttctatgtacattcctcattctctttatgtctttcttggcatatgatcaacacctcacccattaaataggcctaaagatgcaatgtaatgtagcaatgctgtcttgtaagaaagcactgttcatgcaggctactgtggtggccgtttgaaggccctctctcaccaggaaaaggaataacaaaagaactggtatttcccccttcacgtggcacataaaaccaaataggacttgacctgtccttagaatattagtatttatagtaccaaaaaggactttgttttaccattttcactaatatcacagtctttgttattgggccatattgaagtttaaaaataaacgtgtttgcttttcatacattttagctgtcttttaaattatacttgtttttcttccaacttatagggcatctctctttgtacatgtaattagtagatctgggttcagaagtctttttatttttaaaaaaattattttaaatttcagtcatgtatatatatctgggatgtatgcaaataatttataaaccagttatatgtaattattaatataaatcgaatgcttcttctgtgttagagctggactattaatgcagcccattttgctattctaatacaaaataatcataaatagtggcaatttgtttaaactctcagatggatttaaatctttaaatatgttattaaccataacactcaaaaagagaattttataaaattgacctacaaataaaaccatcttataaagaagtgatgacttaccaattttaagatattttctttttatggctatttcaatagcaatttgaatgaataaatgtagatatgtgttgtctgtatatattaggctagaaataagggatgttttcaaaggtaagaaataaaacatcccatcaatcctactgcatttctttagtaagagattttcctaatatattttcacttggagacttctaaaaaattgcttgaagaattaaagcactctatagacagatcaaagttgcaagtgtctaatgtaggcttagaaattccataatgttcattaggaaacattaatacttctcagagatttccctttgagttaatggaagctttctattgggacaaaagtttaagcattacatttttttctgaacttttaaattctgtaccataatgatacgctgttttataaacacactgattataaaattatttatagccttatttcaatattcactaaactatggatttatatttggcttttaaatctattacattttttaggttgggcgcagtggctcacacctgtaattccagcactttgggaggctgaggcgggcaaatcacctgaggccaggagttcgagaccagccaggttaacagggtgaaaccctgtctctactaaaaatacaaaaattagctgggtgtggtggtggtcacctgtaatcccagctactcaggagsctgaggcaggagaattgcttgaatccgggaaggggagaggttgcagtaactccatcttaaaactccatcttaaaaaataaaaataggccgggtatggtggctcgtgcctgtgrtcccagcactttgggaggctgaggcgagcggatcatgaggtcaggaaagcgagaccatcctggctaacacagtgaaaccctgtctgtactacaaatacaaaaaaaaaaaaaaaaaaaattagccgggcgtggtggcatgtgcctgtagtcctagctattcgggaggctgaagcaggagaagcacttgaacctgggaggcggaggttgcagtgagctgagatcacaccactgcactccagtctgggcgacagagcgagactccatcacaataaataaataaaatcaattaaatgttttaatctgaatttgaaatattgtgaaaaagtataatgtcaaatttaaaaatcacatatgtatcttttattttcacactgtagcttttttattgtacctgaaaatctttaagagtatgattttattttgtatttatattaaacagatttacatctgctaaatatataagagctttctaagatccgtgctcatttctgttttccaagaaaaataattttaaagtgccctgtccactgtccctacccctatagatggatgacttaggaaatttaatttctgtaaaatctctaggatatcccwcagaggaaaatgcatggatgctggtggacactaagatatacatacaaaacaatamcaataaggcmactattttttttcaaaaaacccagaaagttgggttgggtgctcatttatgggcaaatcatctgagaagctggcagctgccatttgaaccctctggttgaaaggaataatttttagaagaggagtgctgtacgacaagacaatgtctactttaaatagctttattttaatgagcaygtatgtgagttgtgtcagggacagtgctgggcactkattagccattgtttcagaagagagaaaataaacaaatgctaaaactgattaagaaatatttgatagagcagtatagataagttagatgctcaggcagcagtttcaattctgtttcagaggacagggatctacttatttagtttgctacagattatgatctactgaacagtatgatttataaatgagaaatgttatttttgttaaatcctgggaaagtttatttctgatatccacttatgttgttctttgatgactacctgaaggggtccactgctggcttctttgtttatgggacatgtgtactgtgtttcctaattctgaatcttcattaattcaagacttctcatggattttaacagttttacttccattccagatttcacacacacacactcacacccatacatatataaatctaatgtttcttcttggaggtgcatctgaaagggaaaaaataaacaatcatgaattttgaagtctcttcctgttataatatacaatatttattttgtaagcaaatgtccatgcctggaggatggcatatcccaagaaaggacacaattttgtgcataagcttgaaccttaggaccttgtattctgggattatattttattatatatttaaataaatatataaaataaattacatactaaattctattatctacaatctagtgatgcatgtcatgataactcatacaagccctcctttttaatagacatataatcactacattggcagggctagggtggaagatggaataatactgtttaaactctttttttaaaaggatttaattaaacatatttattcctctgcaggtggctttaccaagcctacacaatttcaggaccgctgttagttcatgctattcagtggctatgacaaaggaacattatgtggagagaaaagatgtatgtgtgtcttcaaaattggttgtgagaatgagacaattttgaggtggctagggtcaaatgggttttgtgctatgatttgttacaaaactaaaactttttctgacttgcatatataggagcagaatttctcaaccttatcttgtgcctctgatatgaaattgagtaactataggaaaacactttgttagatgacaaatcatgcttccaagtgtaaaggttaatagttaagattactaaaattaacaaaattaaaacatgataggctcaatctatttgcggaactgtgtaagagcaatccaagatgtttgatattttttttaatacagaaaatgcaacaaaatcattttcttatgacaaaaacaatatataaacaatatataaacttttattacaatagctaacatacttttccatctatctgtagacttgtggtaaccctcagagcgatcatctctgccaaatgccattcatgcaacacttactgttactgctgtaggcctgttgacctgggcatctgtctttctgaatgtttcgggtctgtcctcctgcctctcctcatccaacccttgatcttcagccacagctacccagaggagcaagtacgaaatggtgggaagactgtttctactctgatgttggagtttaggttggagtcacttcttgcctggtcctttttatatgccccctactctctcaactaaaaatgaactaatactcatcatcttctcttctttcttctctgaatgagagatgttgtccctgtaattttggtatttacatccaaatacttaaggcaatttggcttttactcttccttccccctgctaggatgatttctttctatattctcaccctggcaagatttcttgtgctgggttcatagattcaagtttcttttttgaggaagttcagtatagttggaggaagcttatgttaccttcaaattgaaagacttttctagagtatttttccttgattttgtttaatgtaggaatactagttgaaaatatggccagaagctggtgggagatagaaaatgcaaacttctctctctgtgtctctctctctctccttctctctttctctttttctagtgttcttgtaattagaatattgcaatcattcttttattttctcttgtgtgcactatcgtttacctgcttctcctttggaaatttactttctaaggagaaattaactttctaaaaattctaattacatagaaatttaattaaaaatatagtgtaactattgtttatttcctgaaagcggaataaataaaggtagcagcaacactctctgctttttaggatttatagctttggaagcacacacataaatctttataccatatgagagaatataattatataatagtggtataaggaaaatagaaattaccctaaaaatagaaaatataagggataatggaatatgtaatgactggtaaaaaaaccaaccaaacaaaaaaacccagatgaacagataaccaaacaaaaaataccctctcaaatcagaacagcagtgttgtttagcakaaaagttaaaagcttcaaaggaatatgattgaaggctaaataaaaaataaaggaaaagttaaaatgaccttgttctccaaatcttgtttatgaatactagaatattctataaccattatgtgaactttaaaagaggcattcatgattcaagaagaaagataaactgctttgcttcttaagtggttcttgaaacttgttatgcaaatacatagtaaagtagaaacatataattgggtcaaaagaaatttgaatgagttaatttttttattatttataaggaaaactgagatatttgtgagattgagactagtgtgagatttaaatcaatgcttttggtgttggtatgtggagggcatatatgatcatcttacccttccaaaacatgtacatccattggtttttttgtttttgtttttttgacacatgatctcactctgtcatccaggctggagtgcagtggtgcaatcatagttcactgcaaccttgaattcctgggctcaagtaatcctcctgcctcagcctcctgagtagctgggactacaggcatgtaccaccrtacccctttaattattttattttattttaattttttagtagagatgaggtctcactgttttgcccaggctggccttgaaacaatcctttcaaccttggtctcccaaagtactgggattgcaggcatgagccattgtgacttacctgtatgtccattgttgttactgcatatatctggtcaggtctgttgtgacacaaaagatttactctcattgtgaagcggggattatgctcagctgaaagactatatttttgttatgtcagagatacaaggaaacacatgaarttagtaccaccattcttttattccctgccatctgtgtcaacctaacaaaatacaagctccaggagtcacccatattcatkaatgaacttatcattatactatttcattctctgtatctctagatatttcctccctttgtttttcatctcccaacccttcccataattctccagaaccatatcaacttgaaaacaaaccagaacaccttaaggaacattacccctctatcttttttctattaattaaaagatagctctatcctgccaccatatggaatggtgtctgcctatgttcccaccttctaggaatcatgggtctcagcggtggtagtgggcaatcactcaccttgccttttacttctgtgtctacagagtgactcctctctgtcatataaaaatccctccttctttggaactcataacttctggatatcccatatcctgaactaaccactcctcagcagttattagaggttagaagactgtaggatgatgactcagccttagtttaaagttgcttttaatttgtcctatcactaaactagcaaacaaagagtgcaagctaggatccaagctagataaaactgaatggatgcagatatctaggatacaagcttaataaaactgaatggatgcagatttccagtctccttgctctcttgatgggtgctcaaagttcagggtcaatgtaacaagcaggaattgaggaatccaccagctccagtttcccagaacttggcttttaatgagagggtttgtgagagtggccccataaaatctctagcatccatcgtattattttatkaggaaattcattcatgatatgctgcagtaatatacattcctttttttgtgttcttcacccatcatggtgccaacctgtagcagagctcatcatgggatactccatttatcagtctcgttatcacttctctacatttttcaatgattatggaattaactaatagattgttccattcaagtttagctgtcaggtgaatgacttctgtgtctacctgaatcaccccatccaccatctagtctcagaattctttaatttacttacttcaagtaatctttgctccatttttccctgacaaccttctcacattgagcagttggtgtgttattctagaaagagtatatgctttggaattacacaggctagagtttatatcccagttcggctactgactaactgtgtaacattgggcaaatcatgtaacttgactcatacttagtcttttcatctataaaaataatgaatcaagctgagtgtagtggctcacacctgtaatctcagcaactcagaaggttgaggcaagagtatcacttgagtccagtagtttgagaccggtctgggcaatatagcaagaccttgtctctctaaataaagaaaatcattatcaaatgagatggcatatgtaaaatgccaagcacaatgcctacagatgctcaaaaatgcaagtttcagctctccttcatatggttacatgttaggtcttttccatgtattagaattttcagtctctgaaatcttaaactccaagacgtaccttcttattctttgagttgatctgctgcatttactcttcaaattaattagagttttaatctcctgattctttcatttttttcccttaagcctgttaatcccttcttctaactacattttttctctatgtggcataattctcagcaatggatgctccctaggcatgcagctccctccattcctttgctcctttgtatttcttcaccacgactttgtaaagcttcagctttaaatcagtccaaccatttaccttctgtgtttctctactattgttgctatatatatatctaccattgtgtgtgtgtgtgtgtgtgtgtgtatatatatatatatatgtatgtatgtatgtatgtatcyaccattgtgtgtgtgtgtgtgtataaatatatatatatatatatcaggcaatatgctctagctaaggctatagaacactatgcatttaggtatcaagcatatatatatcctttccttgctttttaattttttctcttttattgacatacaatgttttacctatttacggagtacatatgagtttttgctacattcataaaatgtgtcatgatcaagttagggtatttgaggtctccatcacctgagtgtttatcatttttatgtgttggtatcatttcaagtcctctcttctagttactttaaaatatacataatattgttgttaagtatagtcactgtagtctgctatcaaatattagaacatattttttctatctaactgtatgtgtgtgcccacaaccaacctctcttcataccccctcacccccactcacccgtcccagtctctggtatctatggtccttttttctatgtccctgagatcaagttttttagctctcacatatgagtgggaacgtgtggcatttgtctttctgtgcctggcttatttcacttaacataatgacctcaagttccatacatgttactgtgaatgacatgattttcttttatggctgaataatattccatygtgtatatatacgacattttttttatccattcgtctgttgatggacacttaggttggttccttgcctaatatattttatgtgtccttgataaccttcttttccatttctctcaaaccttcactaaccacctcaattcgtaacccatatccctctcatttactttgagttgataatcttgactaaaatattactagaaaggatcgtcaattcttgtacatctcctcgatttcttgtacatctacatatactttttaatccatgattaactttctctttcatctccctggaaacacgatctcttaatttacaccaggttttatagttgtccagcaaagaccactttccattttctttcttgatacctaagtgcatataacctaccgactcttagatttctacttaatctcatagatgcctccatatgcctaaaattcagcagttgatctccattttgtcgcatcaatcctaaccttattctcatattatcatctcacttaatgctttgcaatgtatttagcacccaagctagaaacataagagtcatattagatttctgtcttttcttcaaatgctgtatcctattggcctatcagacctattgtcttaattttgctctatccttgtctgtctattcacactgatgctatcttagatcacattttcatcacatcttatgcagaatactgcaaataccatcctattttctacctctagtctcagtttcttccaatcattggccttcacagtttccattctttctgtaatggaaatatgagtatgatactccttacttaaaatgctttctgaattcccattctaagttaaactctttctcatagtattaggcccactgtgatctaggcttccttctcttcagctgcattttctttcacttattctcatttaacctgggtcccagccacacataatttcagtgagtttaatgctgttgcatgtctacaagccacatgtttttttcctctgctcaggactttctggggttatttttaaataatttttgagcacctcttatatgcccagctctgtgataaatcctcttctaggtgctgataacacacaaaaaatgacaaagattgatctctgacactgggaggcatggagacacatactgaagaatgagtaattttatatagcatcactgcagtgggaaccaagcctcctttgttcaccaatggtctaccaacacccggcataatgactgccacatagtacctgataaaagcataatgtgttttaataataataataacacaatagctattacttatatagttgtttatttgtgccagatattgtttaaatggtttcacatatattaccttgcttgataaccaaaacaatcctatggagtatatgctattattgtctccattttacaagtgaaatagaggcatatagaggataagctgcttgaataaattgtatcatataaacacatcctcagaatacaatggaaacaccaaagaaaggtacctracccaaccctcttggctcagaaaaggcttcctagagcattctaggcaaaggaaagagcataacgaggagacatgggagagcatagtgtattctgagttctgagttggtaagcgtaaagtaggaagggaagaagagtgaaaaataatgcccagaggtattgcaagtataagcaggataaggtaaaaaatggagccaagtttctttaattttttgaatcaattactctagactctgcatgccctatatttatctttgtgccatccttgattcatttcctcaccttcttgaatgacttaccttcttgatgcctgtccaaaatgccagaagttaatgcaattcaagcagaggaagaaagggtatccaatgtctgtattactgtcagtgcttccatttgtatgtagtgctgtgttggatatcgtctaccaggtcctcatcttctgctgtgggacaggttccaggccaggacccattgatgctccaagctcagatcacaggattataaaccattctagttcccatttccatgctcaacataactatgctaaaatgtattaatttagaaaggcttccaacataagctacacaatgtattgaaaagatctcttcaacaaatcgttaggcccttgtattgagtatatttcttcagatttacactcttatctgtcacaggtccatttcagaaggtttatctaattttaaattttgggaattatgatctggagtcttagtaatttctcagagtgacttctaatgtgagtctatccaatatctccccattgaccagctttgcctaaatggtgttagggtcagcaaccttttgagatagcaaaagttatgggttactctttcctcacctccctcatagagggtggcttctccctgcctgccctataagtggatctagatcacaaagagcctcatcatacaaaccaaggagactggatttcatctagttgatgggaaagagacactgagggcttaaggcaccgtgatgttctggtcaggttttagaaagatggcactcttagtagtggaaggaggttcatagaggagcaacactgaggcaggaaccctcctgaggtttctttaaaggagggtttctttaaaggaatggtgatgggtgcttgaacaagcatgatgttggaaggggggtagatttcaaagacagtgtccttcatgtgcttttaatttctgttctttgcaagacattctctttttcattttatatatcagaaaatatctaagtatgcttctatatggatcctagataactctcttctagtcaagatttatttttcagaataagtgagaaataccaggcaagaatcattctttacagatggttccttaactgtcacaatcatggtggccacatatttcagtagcacagtgattgactacagattgtgatcagtggatgtttgctaaatgtttgaatggagtgaggtctcaaccaaggttttctacttcttaaaatactgaaagacttcacttagcactttcgtttctattgtgttttcatacagggcataaggaagtaaagaaacgtaaatggtgaaatttactatctagtaaataacaagtgctcgtttgattgtaaaatcctagtattcaacatttttctcatctctataatagtaatgattcatgtgtcattattgtatgcatttcaaagcttcttatgtagacgtggggaaatcctatttgactctgcatctgagttttaattgcacattatacttgatttaattcataactgtttgtggttaataagctatagtgtcagaattgttgttaacttaaaagcaagtggctagagaaaattaacagctaaattataaagtcatttcaggatttgagatacttttaaacttagaggaataagtaaatttagcaagcaaagtggtaacatttgaaatgaaatggttaatgttccaaggcaattgggatgacaaacacatcttgttagtttcttatttaatgaacatggttccactgaaaaaatctgaaaattttttattatgaaatactgtcacaggcatagtacagaggcaagtgctatgtagagattaatacaaaatgtcacagtcccttccctcacaggggtggcagtccgaagaagatagagtgctttttatcaaagggtttcaaatgagtgagcagtctaattttcacagttcttttttcctcccttatatttgcagtcttttataattcatgtggtcagaagaatttttaaattaatgtacatttttaatttacactttttcatgattagcctagtttcaacttgtattaattttctatgtttagaaggaaaaggaaaaaaatcttactagatgtagttattccaccattaaatgaggaattgtatttttttcttttactttttaaaaagtcttaaatacttgaggcattaagatttttgtttccctcaaataggtatttataaaaaatattttatgctcaggacacctatttattttcatgtggacaccttctggggcaagcattacttggagaattattgatttctacctcacttaatgcccaaacctttgccaaagtaatactgaggaagaaattggaaaaattaaacttgattgttttaaaatcttgtcaaaggggtaaagctgttaaaggaacaaaaggaaaatatttctacccaagtagctctgtatagtgcagcctgcaaagtgcttgtgatcgagaatattgcaggtgggctactagttttgttaacctggggaagaatatttcatggttattctttaaaaaaaaaaggatcagattattttggaattattgtttcccagttgagagatgtagaaattaaataaattacttttaaaagtagaaatagaattgggctttctatgaaggactgattttagaaaaaccatacatccttttggaataatcttttttagataagattaacatttaaaattataaactgagtctgctttactcagtctataactttaaatgttaatcttatctaaaatgtcttcacagaaacacccagaataatatttgactgagtatctgggcaccctatggccagtcaagttgacacataaaattaaccatcacaaggttaaatgtgaattttataaaacttgaacattaattagatataggagatgatgaagaggaggagtcaagaatgactccagagttttgaccttgagctattggttagtgtcatttgctaagttgaggacatgtgaggaaaaacatgggtagtaaagatgtggggtaattaatgtgaacgattaaacccaagctctttttgatacacatgcatgtacatgtgcacgcacatgcacacacacacacagacacacacacagaattataaagtctctgatcacaatctcaagttctttcctaccaagtttgaataataactctaagtcagagtgtagaagaaatgtttattacttgttacagatataatgtaaaaaatgagtgagggtgagattaggtcctaaggagagactgaaaaggagcttgactgtacctggtacagatgtacctagacaggaatctcggtacttcccacacaatgttatttttgttatattctcaatgttatgactcagatgttggggagtgatatgaagtctgattgttttgctggcattgcagaagatcaaaccacatctctgattatagggtcatcttttcctggaaagaatggatattccactctcaatcatcttaatgcgaggtcagtgctagagaaggaaagaagacttgggacatgtagcttaaatcctggaatgatgatgttcattttatgtaagtgaaggtgattagtagggcttgagaatggtctttctcctatgaagcacaaactttggaactccttttattatttatgtactgaattattattgttttcattagctttaaaaatgaagtgtataataagtcaataattctccagactatgtcagtatctctccacttataaaaaattagggaaagagtaaccaaatagaactagataggatagaatctacagtggggttgtatcataaatgtttatttacatgggttaaaatctaaatacaaatgtacaaaatacatcaaaataaagcgggaaaataattatttcttcatgaggaaataaagaaatacatagaaatgagtgtttagtgtttactcacttgagttgtcaggcagaaaatatatgctgtagctgtattaaaaggtttgatggaattcagtgaagaattctgttagagagggttctgctccctaacagaagaaaaaaacaaaaacaaaatctgaaaactcccaaacagtgcatagtttggttcctcatttacttggttgtcattatgtggcttcccagaacacctgtctagttaaaccatccagcaaggctcagagtgtctcattgttacattaggttacatttggtacaacggttacatttttggacaaagatgaattcaccccaatgtatatggatctttttaggaggtttctcaaccaccacctatctctyaaccacactttgaaagtagagtttagtcagcatatatttgccttgtggctgagatatattgaagaaagtgctggcatgaagattttctttgagatggaatctgagtaacaattataattttgtattctttttctttttcttgagacagagtcttgctctgtcgctctgttgcccaggctggagtgcaatggcacaatcttggctcgctgcaagccaagtgcaatggcacaatcttggctcygcctcccgggatcaagcgattctcccgcctcagtctcccgagtagctgggattacaggcacgcgccgccacgcccagctgacttttgtatttttagtagagacagggtttcaccatgttggccaggctggtcttgaactccttacctcatgatccacccaccttggcctcccaaagtgctgggattacaggcgtgagccaccacgcctggcctaattttgtattcttataaataattttatctgtcttgtttgtctatcattctgaagctatgtcagagattccttactattttaagctgtcctgaaacctctcatgaaagatacataataaaattagtatttcttctcttttccacaatgtcttttatgctgaaagacacttttgtttttctttgctgtgaaaggcatttcatgatatgattgatccacaggaaaacattgcactgtattcagaggttagattccagaattaacagaacgtgaaaaaccaagcataaagtactcttaaaaagggcatattggggatcaatatactatgtctcagtaagttcaatagccagttttttctagttgagcatcagaaatacttgactttttttcaagggttgtgatatatgacaagacatacctttaaatatcataatcaccctcaacagggctacttgtgcttatgagggcatggtggattaacacttcccatttcacactctgtccaggccatacaaattggcagaccaatctttggcattattgctttcttctcaacttacataattgaagttgtgtaagttatatgcgtttacggtacaaccccactgtagattctattctcttcagttctatttggttaatctttccctaattttttataagtggagatactgacatagtctggagaaaagttttatagtcaagcaataaatgtttaatattcatagatgtaagtttgaggaatggtataaatttattctaggatacacttttaggctttaggggcactaaaatatttggaaagaacatcaattgctaatgattcatttttttataaaatgaattttttaaaaaatgagatttgggggaataacgtattttcccgggcgcattcttactacattataataagtatattttagacaaatgacagtcacactcaggtcactgaaatcagtattttaattttattcatcatcactgggaaaatgccaagttcctgagctttgctaatgtcataggactttcaactgtggttgttttggtttccttacatattctatagtgactattgaaaaaacgtattaaatatttacaacataaaattagtaatatttatttctattctagtttgtgaaacaaacaggtaaaagcaagaatcaatattttcttctgtagctcataacttaacttgattccttcgaggcactgcagttccagcagagctctggtcattgattacagactcacctggcttaacttgaaaaatgatttttcccaagcctcctgtctgagaggcctaattcagtccttgyagatataaaattattactgcccctttagccatgaatgccaacattattggtgataatctttggttagtatgttagtatatgtcagaataacaatactgtgaaaacatgttggcaaattagttcatgtcactttgtgacattatgtgaagaaaaaaacattttgcatttaatgtttcatgattaatttaagtaagttttgaataggctataaatgaattatcttgatttaggaatgacgaatttattatagcttaatatacctgtaaaaatatgtaataaattctgttattttggcagcctttactgtaaaatttcgaacactaaatggattatttctctgtagactgcagatcttccttttgacatagctagtcaattcaccgtgaatcagttctggtaataggttatgcacccatgacaagtgactagaaattggttattctccatgtgacaaatgtaatctagaaattgattttttgtaatatttttccatatagatttgtttatgattgggagtaaagagtgtttacatagaaccttccacagtcatttatagaccacacacacacacacacacacacacacacacacacacacacaccgctaacacacccctacacgcaggaggagagagagaactagaggaagcgagaagactggctcccattaatcataattaagtataagtaacagctatgagcttgagtagcatttcatatttttaaaatttgaaacattatgtcaattttggaattgagaggtctgaacattttatagtatcatttcttatttttggagcaatgattttctattttcagcatgcatcagaatcccctttatgtagaaacacagatttctgggccccacccttagagttcctgggctggggcctcagaatttggatttctaactaattttcaggtgaggctagtctgaagtttacactttatgtccacacgtgtgtgtatgtgtatatgtgtaattgacagaagatttgatgctagattctagtttttctctccttgtcctcagggctgtgtttagtacccttaagatagcatatttgtagtattggaaacagtataacctacttggttgaaatactggagtagaaagaagaaagcattctaatgcattacattatctgattaattcaagattacaaggaccaaaatttttgatttctttctttgacattgaagatctttttgatgtatgtgtgatgcttttctttctcagtaagtacaccattctatgaaaatttactttatcttttataattgaacattttgcaatgctccaaggttgttacttcaaggtggaattttattgtgtacaattttaggtttagtagtgtagatgggttaaagaaaatgtgttcagatatctggcagcattttgttgtggctgttaatgatttaaagtaaaaagttttttgttataagacaaaataaaattaaataatggtgttaataaactagagctgttattgtaattgtattatgctgcagtggtgaattgactctgctatttttgtrgctatgcacatagaatagatactatttagttggcatgaattaactggccgttcattggaataatttttttccaggactagcatacatcaagcagatactcaataaatatttgttaaacaaattaaatgcagagacctggtctctagggctgtagcttatcagttttattcaggaatgctgggtaaggagagaaagctttttgcctacttaaaatttcagcctctatacttggttcatcagaatgcatggtgctcattcactgatttacaggagtgtttcttcattacatatgggctgcacatactctgatcctctaacagctgagcctttccaaattgtatttaatagtatggatttggggttgaaattagactagaatacactaatacctacctgctgatactgctgcagccctatttttttcctttcctttagagtaacaacaaacaacaatcaatttgtcttggtagaagtgcttatttttattaatgtggctttttaaaaaagagctgtacaattctgacacattaggtaggaatattgatggtaagatatcctgtatatggcctcatcagaccgatgctcctgtaactcacattgccttttcttattattgaaaaatctttccctttcaggcaagggagtattaaaatcctaagtaggaagggatctgttctgccctctattttggctcacaaagacatcccttaatgctttttaaatctggaaacaaataatctagagagtcaaaataagtaataatgctcctttgttttgatatgcagcatttgttactgtattagttatgaacaagatagattcatccacaccacagaccaaattgtatgttttaaaaaagaaaatagactttgcaaatggacacatcttcccccgccccatgcagataataatccattttataaattaatggctaatgagatttttgttcttttgactgtattcagcgtgcatttggtgtactttaggttactattactaacatcatttcttctaggtctttcataatttatttttacttttattctattgaagactttgttatgttattgtaaatcttttttyggacaaagggtaaagacaaagttagaaaataaaataattaaaaagacctttttttaaaaaaatgaataatgtacattttcttaaaatgtactattcataacaagtggcttactgcatttaggttttcatatgtagagtctgcttgcttatcctttcccttaggaaagacgctatctatagcccttacctggtctcttaattgacagtctagaactcatcctcatcccaactgaatctcccttcttcacgtccttgactggcattctaggaaattgccaacaagttggccaaatctggccctcagcctttttttttttttttttttttttttttgctcagaataatgttggctaagagcgtgctacacaattaaattagtttctaacatttgaaaattagagatttcacataaaaaattcagattttttacctctctagaaaacctggaagatatggacctatatccctgtttggcaacagttctctggagatcagtggtagttgtcccttttagatgggacaagggcttacctcagtttacactgctctctattgttttgcagacattgaggctgctggtcaattgacattagcacttgcctgtttattttttcatgcccagtacttgcttgaccctctgaacacttgaggttgtgaatgattttttggaacttacgtgtactgtggccagcactgcggggcactgaaagttatcctatactactcaatagtgtgttccaaacatgatactttcaactaaagtagtttatcttgcagccattatcttagaggaatgaatctaacggctaggagtttcagattacatggtctatggaggaggtatatagaggctaaccatctctttggatgccattgtctcacccatgcactgggtaatctgccattaccatttacagtttgactcccttgattctctatcaaattggttttgttcatgatttattctggtgtctatcagtgagtacatgtccaaagcttctgtcatttccataaacttcttacaaagctgataactacaacaatgcttacactgagacactgttaacaagaatagccaaaatttcatccatcgattggtcaaaaataatctgcaatacggaagatggtttttatgtagctttatgacagaattgaccagttgggagagttcagataaactattattagtttaaaaatttagaacagagtaagatttaaggtgttattcaagggaatgcttttataaaggttttggaatcttgctcagtgaatatcattggtgtggtaaaattgaaagagatacaatgacaatagagacttagaagaaattatttctgaaatatttaaaatcccagttcctatttgaaacctgggaagggataactaccagcaatgggcatgctttatttatacgttaatggtacaatattgcaactcaccttcaccaacatcagttctttctccacgtagtagaataacaaccaaaattcagtctctgtgtttaggaaagacttacgcattacaaaacaggataacttttctttgtacggtaagggaatcttatcagtctgtatgttcctataatattcatcaagaaaatgggcaataaacaagatatatacagtaggtgagatgtttttgttggcttttctcttttgtaactctccttgtcatgcaggagggtgccctgaaatattgagtcttttattttctggaaagtgctcaattttcttgactactccatttggggatcagaaatttcttttcatttcagagggttttcaaatgccacataacttcttgtgaaatgcaaagtattttaagattttgaagccatggtatagaagagcattaatggtcattcaggatacttcttctcccttcaacttgctatttgaccttgaagagtctatgtgtatgataaaatcaatatatatatcttgcttcaccaaaggaagcttatacagtctaatgccatgtagtttggataagatggttgctttccctcgtagtataaagtgataatttttgatcaaactaacaagtcattcacttgattcagggtagaaatataatacacaatggattatgcaagtagaaaaagtcatttcataataattgcctgacatttaaaaactggaattcagtaaaagctgattaaatttatttaattattatgtcattgtggatttgcagatctgacttctctttgtaattcagcacaaaattstgcatccctcttgtgtgctatttcatagtttaaggtctgattcagatttgttggttttaccatgacaaatctctttatctagagctaagatatggaaatgttctcatttttagaaacactatttggttattttagaattatctgatttgcagtggtggattctgcctgcctttttgtctgcctaggaaacctaaggcaggaaatacttgcagtatttcataatcaaggaacactctgaaaatgtcctttaaaaataaatacgatgtgtcacataccttagagaatgagtttactcccccagagatggaattaaatttgctgatgtttaaaaataccagcatgattgatagactctttgcatttgaccacctgttaatgaattctcattcactacttgttttcccttactaaaattatatttaaatcacactgcacaaaaacccatagatactaaaagatttagaaagaaaaattaacagaattgtcacacctctgataagtgaattgttctccaagttgtaattttatattttaaatagataattccagaccctctggtaaatctcattagtaagtatgtttgaggttctaacagaggttcattgtttacttaattgctgaaaatttgcttttcgctgcaagtctttggctttaattaatgagtttttgtgtgtatgttttttttatctccggtagtagtatgtccagtgatgtagagaagatgtatagctcaaacaatggttaacgtctgagtttccttttaacactgagattctgaaagtctgtgaattcttatgtgatcatggtatattactctagatgtttacatctgaaatttgcaggtggacataaatagagaatagagatgctttaccaaatcttccaaaaaaagaaaaagaaaaattctcactctcagtacttcacacatatcttcattctgtcagtggatttgctggttggttattttgtagagctaatatgaacacacattgatgttttcattagtatttggctttactccagttatattggcctactttcttagtcccaaacagtccagaaattgtatttttctctaaaatttggggaagtatctaagttatatttcatatgagaaaatttacctcagggttcataatattttctctggtacaaaagataaatggcagcggaaaatgatgctttggttaaaaatgttattatatatttctacataaacagttctgattcttattaattttcatatatttcaaattatgatataattgatgacatttatgtgtagtttatatggactaggattgagaaatgcttagttcatgagaggggagacatggctttctaagtttttagggcaggctccaaatatttttattaatatcatttttattctattactactgtgctttagataaaataggcactcagaaaatattttggaatgaatgaattataactgaaatgatgctacatttaagttttctttctatgcacaataattaactttgggataaggggaggatataatagagttcatgctattattgaatagtgttatgccatctttcttgtgaaaagggatgacttttaatttttccaaagctttgagatcttcaacataaaagttaatatcaatgaaatcctttagaacagagcaaagcagaagtgagaagggcatgtccttgtaagttttattcctgcctgagaggcatctgggaatgccagtgaatggatatcggagaggaatggatgataatggaaaactacttagaaaatcaccagctaagacaccagataatcctagcatgtggtttgggaaaccacactcttttccaacagtgccattcagtagagcaagtctctggtgtgtagaaattttcagcaataattattgatttagataattcttttgcattattctttattccaacctttattgattatgcttttttcctaaagtgctgtttactggacagatgtcttagatgcgcccactgttgtctgaaaggcaataactatttcagttagctattagcatgctaagaaaacttgggtaattccacccacttcacattaatttgctcttgttgattatttgctgtaatgtgttaaataatkgctcttgaatcggtcatgaaaagcagtcatttacccgtttgattgctataaatatctatgaagtcatccaaatgtgcttccatattattcagaactcttctaagtcattaataaatatactgaacacctgtgctagcactgatccctgaggcacctcattattaacctaattgcacagcttcatgatatttcatttaaccttgattttactatcaaacttttttcaaaccaagacatttcaaattaataataaaactttaccttgtatcttgtgatcaccatggctttataattgaatttgcacatttaaaaaattctgaatgaaatacttgaatgttcattttttaaaaaaatttcaaacaatatttatacacttgtctcccaggtattttctgaaattcgacttgtttacagtcttcttttcattgtttttcttcatcagctatttttaatatgttagggtaaagaaacaataattccatagtcacagtattgtggttttggatacaattctttttgtgagtcccaactcctcaatgctattttattgctagctggtacctccatcaaactggagcaggaaagggaaaggagatggaatgttggctgacattcctattcatcagcgaagctatcgcaagtgaagaatgaggtttgaaccttctggtttaaatcatacttatggagtatagttgtttttttttttaaatattggagccagaagggactctgaagatcacatggttaaatttcccttatttttcagataaagaagcagaatcccaaagaagtgagctgacattgctgaaggtcaaactgatcagacccagggctgtttttctctgttgttcaattcatggcagcctggcttaggttttcatcatctttgtttcttactaccagtaattaaaattttctgtcttatttattctgatgattttgagatgaatcacatttaagcctcttttacaccatcagctatatctaatttattttttaaatctctaatagtgtcttgaagatagtaagttctcaataaatattattgaatgcatgaataaatctagaagcacactgtttagtagactcaacaatatatatgcatatacatgtgtgtttatacacatataaagtaaagctatagaatttttaatttttattttacttatctcatagatctacttaaatcacataaacaaaatcataaagcatattttatatattatatatatatatatatatwttttcaaaactgacttccagatggttaggtgctacgatccttagatttatttcaactggctgttctaaataaactgagttgttctgtgatgttgactgtagcctttatataaactttatctaatatcacttgctctcagactctcaaattcaaccaaactccctcayagatatctgagctattttggagaggcaaaattctacatatgagaagggcccttctacaaaaactaagggcagagaagccaagattcttattgaagttggttcccaggctccctacctcccaagggaggcattactagagaagcttctatatttacctattttatatatctatcgtactttatttttgataataacatttgaaaatcattgaaatgctattcattgcttttggaaggtcaccactcaaatcaaatggtcaacattctatcatctgartaagtcactccttagaagaattttaaatgcctttgaggtgcattatgtatttcaggttcatgattcatctgctttggggaaaagtattatttcctggcacgtgttcaaatgctgtaatttaagacatttatagtaaattattataccactgcygcaaatgcaattgatatgaccccaggagttatgcctggggaatagttgactcatctagttggatctggctgattgttctttagcaagctagagaaaaagaaaaaaacaaagaaagaaaaaataactctttaaatttttttgtcaaatacctatgaagcataggaatactgagcataaatgtaacttaaagaaataatataaatgagcaagcagagaggatcaaattgctaaacttctttagaggtgtctatttaaatatttggcctaggaagtgtcagatgaaatgtcattacaaaacaactaaagatcagctctgacctaaaagagagcccctttctgcttgtaggatctgaagacccaacttttgccctctctccccaccctcttaaccatttcctatcacaaatttctttaaaagttttggtgtaaatctgtttatttatttttatttttatttttaatttcattgtattggtttgtaacatccattcctctagtagatgaagaacaaaagataaatcctgtggctaattttgtgggcttcagaattactcaagtctgaaattcctttgatacttgtatcatgtagcacccatgttcatcaattttattttattttattttatttttttattattattatactttaagttttagggtacatgtgcacactgtgcaggttagttacatatgtatacatgtgccatgctggtgtgctgcacccattaactcatcatttagcattaggtatatctcctaatggtatccctcgcccctcccccaaccccacaacagtccccaaatctgttattgaaaaacataatatctacagcatgcttccagaatctgtctatctcatttttatttccctcatgttctttttcatgatcacctgggtgattatagtcgtcttgtttgcactgttgttagattaattgcttccatgaggcttttgcatgaggcatagacagtgttgacataatcttgaagttagtcaaatattagcccagagatggaatctgtggtgtgtagggaccaaagtggctccaagagatatgatctgagcttgtgaaagaactgtggaagttctgagctgacacaaatggcatacgacaagacatgctatataggattcttagatacataatcccatttctggggtatccaaatttaaattttcccacactcttcctggggtcttcttgatcagggttgacccaaagctgcattaaactccacatgattcatgcttcagacccaagccaagatctgagatttttttaaaaaaagaggtaattgaattatacccttcagggctgattcttagcagaggaaaatcacagaaggttgtatcctctccaggacaccttccccacatgctacacacacacacacacacacacacacacacacctttaagaaccatcactatggtgatttattaatagtgtgttatatctttaagtacttaggattagaaaagaaattaagaactactggattaaaatttcttatttaattttaggtgtgtgctggtagttatgtaggtacagttacatccatatttatagtataacaaaagttgatggcagcaggaaaaacaataaaaaaaatctacagagactccagaataaatacattttgtgtggactagctttaatattaataattcaattaaattagatttttactcatgtttttatattgcttagatttgtaaattaatttcactctgttaaggagacatctctgtttttacatttccattttactctttgaacagaattgaaatataatccagaaccttgtctaagaatatttttaaaatgtaaatgtagaggccttatattccaaaattttaacttattaaatataccaattatagatatataattagtacattggtacaaattcagtctttaattttcaaagaaagttggtgatataggaattatataataattgggaacagaatttaatattttgatatacattaattttttttcttttcttgcatctaatatctgttttgaatttttttttttgagttctccccctgtcacccagactgaagtgyggtggtgtgatcatagctcactgaagcctcaaactcctgggctccagtgatcctctcaccccagcctcctgagtagctgggactacaggtgtgcaccaccatgcccagctaattttttaaaaaactttttgtagaaatggggatctcactatgttgctcaggctggaaaaattctttttaagtattttctaaatgtaagctaaaagtctataggttgtcattaaatgatttgtaccttgttttattaacaaagttagccaaattccaccttgtagataataagccatgataattatatccaaacatttattcttccaccttctctgatagcctaaatctctttttctgagctgcctgtctgcccctccaatcccagcctagtaagctattatcataccactgtactgcagcctgggtggcagaataaggccctgtctcttaaaaacaaaaattgttgagaaattcatttctaacgcttgctgactcttttgaaaataaaccttgttggactctaaccgatcacctgagaatatgtttctgttagtggagaaagtcttgaaatgttatctcctattttgcttagtgatctttatgtctgaacaacagcatatgagaagagtggcgtgctgtgtgagtgtgtatctgtgggtttttccacacatcttatatgtaaattgcaaataaaggaactaaaattttaaaagatgagtcagggatgagataatggtacgtgggcatgatgttaggaagaaaaaaattagcatcctaaagttaagataatgccaccatttcagtaaaaataaaaaaaattcttttaaagaatagtatctctggtttatttcctcatttctaccttttacttctctctaaataatttcagagaacatattacaaaagacatatgatataggattaacaaaacaggattagaaaaagtatataaaaagtatttacaaaggagaaagctgggacactccatgggagtcttaacatggtcaccatgatagcgaatgtaacccagttctgggtttctgagcaaaggtatagagaagacaggttgtgttacaggcctctagtactcactggggatgaagcataaccatttcccaagggaatcttttttccagacctagctctgaagtacattactcacatgtttttttttaaaaaatgatattccataatgtgatggatgtatttctcaaaaagagttttgattaaatrtagaagaaaatccctgaaggctttttcctatataaacctgcagtgcagattgagggcagagtccagtgcatatacagagtgttatgcagcaaaacatacaaattgttgaatgtaaccctgcaaaattaattacagtgttrgaactggaacattcaagggaaatgttcctctctgctctgaaatttagaaaaaaaaaaaagaatgaaaaacgaatgaagtcttcttgccttgactcttaagaccaagaatttttttctctgaaatacaaatcagcttmcattatcttactttatcyattctgcttacctttatctcagaaggaaaacaaggtaaacttgactaaataagtgctgacaagatccactttatagtgattacataaatgtattctgcagctacttaaaattcatatttcagactctagttacatacacttaagatatggataaattccaccaggcaaaaagacagaaaattggaaggaaaaaaaagacaagggaaccaagtcagtaaaaacattttaattacaccccaagccaaaggaacattaaaattaagggaaagcctggaaaagaagaaattttaatggaagcatatgattttagatcagctataaaataagacagttataacatatccataatatattgaaaagggtggaacatgaaggtgtattatcataatgaccagttataaataaatcagttgttcattatttccattgagagaacaaactgacgacaacatctattcaacgtgtgaatgattcatttaatagcttttcatgcctcatttctgacacttttttttgggaggctaaaaattactgaagtgattgaaatacactgtgctagagtgacttgtacataatttgttactaattggtacttttatttctaaatgatgatttttttcaccccataatgaaatagcttaaatgctagttcttcaggatttgctatgatgagaagcttacttttggaatttcctcatcagtaacaggtaaattagatggatactttgcatgtattaaattatagtggtatcctggggagactggcgtgttatctgttgataccatgactctggagagaaatgggaatatcctgtagtggatttctttttatcttgccatttattataataatattatattaagtatatggaatacacttcaatagataactttctaacacatattggtttgacaaaaataatcttgatatattttaatttttttagcaattgtccttaacaagcttttggacctttcatagaataccacacataaacagtcatgtaaaaccaagaccttcattattcaagggatttgtgaaagtcctaaattgagccacgggcaaagagctgtttttatgaaaaatgccaaaggattttttaaagaggagattcggccttatgtgaattttcttaacctctagtatattcaatctattgataaaaagaaagrcttactttggaacctaggtttggttgtcaggtctggcactgagtgaaatataatcttatttatgttatttggtgagctattagcactctataatgttgtataattggacatttcatttttcaagataaattaatgtaagcttttcctcttccagtcttgtcactcacattgtgttggcacatatgtgtatgtcatatgctatataaaactcaaactgagaaggaaatactgaagaagacataaacgtgaagaggagaggaagagtaaaataagcagagtaatatattattctccctgtggttgatttaggaccctgcaactctaactgttcttcgcttactccctcaccaagttcacctgtgatctgtcctaatggaatggagaaatttaagatgtatttattccactaattcaaaggaacgaaaacttatttaggttaagtcttacctccttagaaccatctcattataagtgtaagaccctaatttaatttttaatctatttcttctcttttccttattttctttttttaaaaattataacagatattttcaaggcaggattttgagtaattaatttatagcaaatgtaatatacactgggcagttcaacaaaagtaataaaatatggcctgtcttcttgtcatcattagcctaaaatgtttaattatgcagatgttttaattaaaaaattgtcacaggttcttgcaaagtaggtggggtacaaacctgcaaaggaaagatagagatcatctaaggcttgtatttcagctattgttataccttatgaacctggaattttcaatcagcagatggagatttaatagtatttcttaaagcctttctggaaactgtccaattgtccaattacttgccatcatcattccatcctgctccccttctagtccactcaggagtgtaaatgtcagtatttcatgctaatcttaacaatcccagagccccatgaaataaaaagcatattgatttttttttgtaagccaagtggagtttcccagactagattttgagcctcttaattggaatacagaacaattgtgaaacttaaaaaagctaaaggttgttataatttaatttatagtcactaacaaattatagactctacacatataaaaataaattcaaaacattcacattaagggtgttttaggtatttaatagaagtagttattgtctaatgagttcagttttacaggctcatttactaccacatagcatgtgccaccctgtagaaaactatctagagtgaaaatttatanttttgagaaataattatttgaatacagtatacattttatatattgggaattctcatggctgcctttgccatactgcacactcttcataattctcaagagtattttagaatattaggcacaattccctcagcattcattaaaatagcattattcatgataactttcttcgagttaatacggayatgttctgaaattctaaaattaaaatatattcattttctttttcttttctttttgagatkgagtctctctctgttgcccaggctggagtgcagtggcgcgatctcggctcactgcaagctccgcctcccagattcaccccattctcctgtctcagcctcccgagtagctgggactagaggcgcaggccactgcgcccagccaatttttgtatttttagtagaggcggggtttcaccatgttggccaggatggtctagatctcttgatctcgtgatccacacacctcggcctcccaaagtgctgggattacaggcgtgagctaccacgcctggccttcattttcttaagtaggaaaatcagaaaactatgccttgaactggttgctgaattcactaatactactttggttcatcttaatgcaaagtgcattcttgaaaatttaaattaaaaagtgccataagcacaaaataaacattggaatcttttgagagtaatggtattctcataaagagaagtgtttgctaaggaaagaaatacttatttaaagaagcaaaaagtcagtggtaccaagcaacttccaaaacaactgtgcttattggtatatcaggcaaattcaccaccttagtaattttttccctactttttaaatgaaatgttttatagtaatagaacaaaagacaaaagactctacatataacctaattctcattcattttcatatcagtcttatgccataacctgtaggtgatgaaaatttaaattgcacagcccaatataccctttctacatgttgtcacatattcctgaagttagaaattgtattataggctttttaacccacataggtagcattttaatggacatttttaaaaacaaaacaaaacagaaaacttctgacagtacattgaatttattaattactttaagtttattcaataaaattgcatattttttatttatcatggaatagctaaattaaatccttttcatttgaggattaatttgaaaagattgtgggaaggggtaattttttcaaaattttatttgacatatatactagaaaaaactgagtagctatatggggaaaatactagactcagaaactattagagtcccagttttccagatgataatatccacagacatctaaagacttctaaattttagttaggatctggatgtggagcctgtagacagacctgagttttataaatggcaaacctaaagtttctcaagtagcatttactctgtgaggtcttttctgattttcagcaaacccaatcatttcacagcatcatgtacagacttcatttttagaaatatcacattgagtcacaattatttattcactataagcatttgatcactgtgtctcacatcatagtcactggaataccataataaaaatgaataaatgcttattttattgatttgaattaaaaatatcaaaatatcattatatagtataaaatatatagaagacacattgaacaaatacccgtgaatgaaaatttgtacctaccaaataaacacagaggtaactgtaacttaattgtccagaatttgatgaagagaatatttctcaacttaaaaaaattcaaaaaaactaaagtagcttcttatgtatcatgtttcagattagaaatatatatatttgactgtactttttaaatgacaactttactgacaattatttatacttttaaggcagaaataattctgcatattctttaatgtcagtgcattcataaattaaaaatatttcactctagtgaaaaataattataagtaaatgtacattctagtactggtctgtttgctattgttgcaggacttttccttatttcagctaaagataggcctcttgtcccatggccaggaatattcaggttcacagacaatttgaatggtgagtaagacagggttttattgggtgaaaaggaagaaaagggggaaacagggactctccgcaaggccagagtccctgctagagcacttcctgcttggccgcttgaatcccaagttccacacaggaagaggaggggccaggctcttccttgctgcaaatggactggaacctctgtgtgactgcacccgagtgcacsttcccagtgtgcagacctgtttggagttttgccagggaccccctcacacctggctgtctcactatcacctaaatgattttgatcatggtctttaataatattctactgtagtttgtttgtttgtaaaatgtagcaatcaaaaatgatttttatttttactctttgaaataaaaattctggttaatattcaccaatactaacataaagactaaaaaggttgaaaagaaaaagtcaatcaatctaaaggccgtgttttcatttgtgccaaacagtattttgttggaggatgttacaattattagcttctaaaaagttgtttgatttaattcacataattrtttgaaattaatgccattgcctggatcagtcttcaaaatgttgtatgaacattttattgaaactgacataacattttaaacaaaggattaatattcttttcccccacctcaaagaagataaaatagaaatgtaaagagaattagagttcagaaaaatgtgggaaatatgtaggcttgcctagaaaggccaagagatttaatttggctctgagcttttaggcaatcaggacaaaaattgagcctggtctttctcttccagagaagcatgaatttaacaaatcctattggaataatagatgttagtaaataaaaatataatattctcccttcactgccctctcatctttgtcttgcccatctgaattcactgctagtttgaagttctatgtcatttatcacttttgccttgagatattcccaacaaacttattaactttgattttatcttctcctaactgctgtttatgattgcaggtattaaacttagttcttgaattttatttctgttgaatatggatgtcttttctctttgctaagactgtaagtcccttgggcacagggactatgtcatatactcatgtatctctaaaattttcttaccttccaagaggcatatattaggtatgtaataaacacattaattatattgaaaaaatgtcttcagtgatagccttaaataggtagaattttgaacttagcattggggtctatacagtggaccttaaatgagcagttagaggggtcagtttttcaatatatcagtcaactggatttgaatccttgctgcacaatttaatagctatatgttatataattgctttgtgcatccgtttcttatctttctaagggaaaaacaatagtatctacttcataggattattattaattctgtttgccatattaatgttgactgaatgaacacccgtaaaatgcttagaaaagtaaacattcagtaagtgttagttgttattttgtcttaaagtgtttggcattaagccattctttctgaaactaaatagacattctttttggtaattacagaacacaatcagttgtctgaaatctgtcctcagaaagcgaaagtatatgacaacaaaaccatgttttcattacagacaatagtatttatattctcagtggcagaaaagcatgcagttatctgaaaactatatcagattattaagttaaaaagaagtggccccaaactacatttcagttttatattacataaaatgtttatctgttagaaggctcttcttccagtacccctgtggtagtaccaatgtgtcatgtcaagttcacacattttatcccataactggatccaaaggcaagggaaaagccgctaagggctacaaccccagttgtgtaattcttccacaaaatgatgaagtgtaacaaggattcattattaaatagctgcgtgtcaaagccaatggtggctcaagaaactcaggtttgaagtttgttaaagaggaaactggcagggagttttgaaggatgtccaatacactgaacttaagtttccatcacatccaaaggcgraaaaatgttgacatcacaaggatctcagtcttttctccagataatatgcaagttcagagatgttcagtgtctttccctagacctctctggtgtaagtgtagtcagactagagctggtatgggctctcaggcttttgcctcaaggcaataattttcttaatttataagtgaatataaaataagacctctagagaggactttaaaaatcatatttccagctccccattgtggtggccattccactctgataattgccttatggtagaacagaaaaacagcggtgaccaatctttcaccacattttcatcagactgtttagggcattatatttatggatctgtaattgaaagcaaatatatcattgatgtaaaacagcaagaacagatggagtatatttaaaattacaattcatttctcaacatcaggttttgacaaggtgtatgtgaattaatgtaattactcatatggttgaagcagcaattcaagagtttatagttttggactatttcaaatttgaccttggaaagaacatgtagcatttagtttaaatctttttctctgtctattcagtttctctctagagaaataatagaaatagttcttggactaatttttattcttaatagtctctcttttggtrgaattaattctatctatctatctatctatctatctatctatctatctatcatttaatatgtattgccatcacaaataccacatttctcttatattccaaatatccacattagcctttatgatgacacttgatggcataaatgttattgtaaattttaataatgggtcttagtttttaaaattactggcagattatttaataataaatcacatgcccttcacttaccttggtatgtgtaatttttgtcttctttgttgttttttaccacatcttcaacccagataccaggagcatctttgtkgtccacaatcagaattattctagatatttcagataacatttctgtatggtggtaatggtgccacaatgagaagacacaatgatattagatccagtgtgctagaatttctttctttgctggatttattgttttaaatttatagcctagtttttatcacagttatagacgtgatcatttttagtaggaggcatgacttacagagtgctttactggctcttgaatgctgtgtgtattatagaagtatgtttttcatggatgctatatgttcagatcctgtgatggagtaaaatgctaatgtaattaaaccaatgggattacttgcacttgtggagttcagggagagatagaagagataactcaatggtttaataaaaagctcctgagacactaatggagtcgagagtctacttaagaatcatttgtgaatagctgagactgaggaagatgtttttcaagatgtgagtttaaaaataagtttcaaaaaataattttatttgtccatctccacgaagtaatgaaacaaggaaatgatatttattttatatttaaactacatattacattctgagtaggacaagtagagtctgccttattataaaggttatctttcagcctcttttgatgtagtatgcttccagatcccatatcatctgtgtaagttataatactcctataaggaatattgccatttaaaatcactcacaggaaatattctgtagctcaagccatgtcattgctacagtttgcgactgtagattattggtgtttttctccaccttgtcatttgtacttggtgactttattgaccattcatccatatagtttttggtaaaattggcaacctgacctctttttttcagccagttgaaggttatattattgatatttctttatcaattttggctgtaattttggctgtaattttggctgtaaatttataaaagggctaagatgattggaaataaaaatatgacatcaatattcaagggtatttatgttttgaaggatttttctttcaaatgtctactctttttagggaaccatgtataaaacttcaagaaaatattgttgttgttgttgttttttccattaggcctctggtttaggatattgaaggaagtctctacacagtgtaagataatttttctatttggaaataggcaaattctttttctgctgtgttcagaataagaatttattctgaatacagaataaataattctgtataaattattcagaataatatatataagcctcattatgttgattataatctcttctcacttttgaaaatgtgctatgatgggggtaggagcacatccttagagcctaacaaatctagatttgaatcttcaaccccactgtgtgagccttggcaaattatttaattactatgagccttattttcctttctttaaaatagtggttatacttctttcctaaaatgatttaaaaatgagaggagggcatagtgcctgctacatcataatttacttcctgcctttctccccacttccagcttttcagttgttatattcatgggtgcaactaacaagtaactaacccagaagccttaagacttttcagatatgcctctcgaaagagttaatggggaataaaatctataaacaacagtctgtcaggaagcaacctgagcattttatatatagttgtcttttggtatgctttcctcagtcaagaaaaatgttcagtcaggcttagaaaactagattcacattgatatgggaaagcacaagaattcacaattttactttagaatagaaagcaattgaatgatttaggaaaaataaattcatttgagcactatttttcaaaacttagcatgcattagtatcacctcagtcatgtcttaatgcatattttgggatccatcccagtggttctgattcagtaaatctagtattgacacaagggatttggagtcaacttgacctcttaatagtaacttcaaggatattataggtggcaaaagtttaaacaaataaaattatttgtcaaatttatccatccatgttgtcttactactattttccacattaatccagataaagtcagtaagtggaaatgactgaaactgctcaactgaccaactcaaaacctggagtcagaccgtcatttcctatagactgaggaaaagactgtcttgcagaacctttaaaccatgtagtacaagtgtgctgtgttataataacacaagatatatggaaatcaatttaaaaaagataaattagcaggtaatattttagattaaaaagcaatttcaaggttcctttatcacaaggtctcttgatacatttgaaatattatttgatttacacaaaataaattttcactcaccttttcaggaagacaaatatcatataacacaaaatttataaatgagagctaggaggaagaaacttagtagcctaagtcctagatggttgaggcactctgctgctgtaagatcactgtccttcatagaataaaaaagtcaatggtggactttttaaaatgtgaaatttaccctaaataaattaaatataagttgcctcctatctcacaataaaactataatgcaagtcatgagagaccttcaaaaaagactcatcaccactttgatggtgtgtgtgtgtgtttgcttggttttaaatttttaaacatttctttcccattaatgttgatgataaaatgaagcccaattgttgattgtccaggtaccctacctttggggtaaatcagaattttgaaagcattgctcctgggtcctttgtacttggcgcctccctatttagagacagttggggaaaattgggaaggtcatgggaggagttggaagctctttcttattgcaagaccaattcatctgcaccttgagactttttgatgaattaggagattgttatattacccagcattataaactgttaagagctgtgccaatataagatgttattatatctattctggaaaattttcaccttttctcctgaggccaaatacctgccagtcccataacttctttcgcatgctctgacatacccagaacatctgcatttcttttatacagtttaataacaacaattcacatcaggtattggttttcatgaattcaatttcttattttgagtgtttagtttgagagatgatatctgtcttctagtcaggaacaatcaaaaacaaatatatttttactctcatatacaatagttttattttagaaaatttttttttcaaaaagattttactatttctaagcagtcaatggagtcagagagatctgagttcaaaataggattatgtgattagtcttgagtgttaaatttgggaatgttttctttccttgtaaaaatgtaatttgtattaatctgtatagttttgtggttttccaaaacattcaggagggactagaaatagagacttgacaaaaatgagttgatcagtaaaatatattatttgcaagttagcrtatgttttaggttctatacatcaatttggataaattatattttatttttcttataaggaaaatggagaaaattgttctctattattacaagtaaaaaaaatttcatggtttaagaagaaatcttgccaaaagaaaaaaagaaaaagaattttatgtaagtcttcccaattagctccgaattgaacatgtgttcagttgacaaagtgttgaacatgtgttcaaccctgtactatggatctcttttataattatgcagtctcaatttagaaggtctttggttttttccttggggtttctttccttgtgcttccttgattttatgtctgtacctcggggcctacatgcatccacatcttgggagcatctgttctgcacattcacaaacgaacttgtatgttaagaaatatgtgacttgttaaactttttgaacagagttttaatgtgagagcccagagtagaacacagaaataattcagttagctaatattttacagatggagaattgaattaaaatagggattactaaacaacatgtcaaatatatatagatatatattctttcattctatccattatctctggaagttctcttgctctgatcagagaaagaaatcttttagtacagtggaaagactaacagcctgtaaattttgagaataattcaactgcaccaattattggccctgtgttttggggtaagagctcaatttctytgagattaatgtgtcttcatagggttgttatgaagacaaaatgagataatttatgtaaaatgtggtttgtgaacttcaaaacactgcataactttatggtttgctgcagctgctggctgttattgtaaccatgctgggtgaaactttccatttttcagctccaaacataagtaaacatttcagttgtttaaatcggtgaggaatagacaggaagggagacataggaatgggggttagaaggaggaaatgggagattatcaaatgctggaaaagataggttagaaatgcaagttttagacaaaaactgaaataaattggaaatatgtgataaagattccagacacagtctttcagattgtcaccaccctcacccttaacctggacatggcaaaataaaaattaagcaaaaataataataatcatcatccagcattttttttcttgctaaagacccttttggttgaatttaaagatgagaagtctcaaaattcctggcgtatttggtgtagcttagggccttggttgcacagagctgtggttccaaggtgattgcttctatttatagtcgttcactttagatgaatttaaaatatttaagaaagaaagtggtttccttcaggaaatcaagggcatacacttgtaagactccttggaaccttaacatttctaaaaatcattatcaatttgaatgtgtctagaaataggtttattagtagataaacctatttattaacaaatatgttaatttgtgcttgtttacacaaattaattcttctttttctatctttgcaaggataacttctaatgagaaaacttgcaaatgacattttggtttacataataaataaaattttgcatttgattttagactcacgaatcatagctttataaccctttataaatttgctaacgacgtaaagccaaatttcaatgtagagaattaagaataagaataatacattgcaaggaaattagaaaatggaaaacataaagattaaaattaratttaaaatgacaaaaatttttgaagagcaaataatttatgcaaaatatgttacaaaatctgggatgctaaatagttgacacaagtactgtgtttgacatttagtttcatttgaattagtaatagaatttgcttcttccaacatttacatcttttttctttctgactttatatattttcaacaaaaatttgctccacagtttttaagttcattcttcttgaatccgcttttacatttgctgtgacaaacctgcataaaactagattttatagatataacttctttggaagagataaaaatttaaaagtttgacattgttttcagttattcttttcttcattgttttgattggcccctgttagattgatgtattgtcaatctacttttgatggcatgaatataaaatgacaacataaaaagcacttctagtgcaacagtaattgaaacttgcagttttccattaaaaaaaaacacaagaatgcatgattactattgataaagtaacaatattttcaaacaataacctatgtcaagcaaacagcacaaacaagttgattatttcagcttctaaagactcaggttttcttaatttgatttgaatgaactttataatacaattgtataatcaatatatgatctgggctggtgtcaaattactctgagttatttctttgataatttggaggtgaatcccattatggatagcaatataaacaatttagaacatattaaggatgtttaccgtctacttgagtgataaagttctccaccatggctcatatctatattgaatgagctgtacatgtttaaaattcttcctcaggagagaaatgatgtagtgcacaacgcaaaacaaattcatatgtttcctttgaaatgtttccaaaataccggtctcacagttctaaataaaaagttgtcttaagaaccaggcacattttgcactgactgatggttacttttaggtaaaccgctatgggttaattaggataaaaattgctactgtacaattattatgcactatactcccaccttggcctgaaaataatgagatgtaacaaaagtttttatttgtcactggcagctgcaccttttaactgtatcacaaagtctgttgctgtggttacagcctttgtttccagtgatgttttgtccatgctttcccccaacccttaacaatggttactcaaaagaatgaaataatgagtcattcattcggaaatatgttaaaatatccctctttatcattacatttcactgcttagaaactaggctgtaattcaaggcaacagttaagtctgagaactgttaaaaaaatctttgatttttttttcatttttaagaaaaacctgcctatgtaattgaagaacctcttacaagtctgaacaattaaatcctttttggttaatgtattatttctggaacaagtagataaaattctacgcagtaagcataataaaaatcgtgcatgtttcgcacagcacagaattttagagtcaaggtttctgggcacaaaagcagtaacaaaacagtccttacaaaactgagtaactctgaataacacaagaaataatttttgttaatttaaaattttagaaactgaaatgtgtaaagtttttaaagtaaaatgtaattaaattatggtactgtacataccagttgtttctacaattgaaactttacaatatgaaaaatacattagctttgtacagtttttacaggtaggtaggatgagttttgaaaaaaaaagattcttttatttttcagggtcatactctgtttaagtcaaaaaatactgcacaacttagctaattacaaagtgtagacttaaaacaattcatgtcttctttatttcatgaatcaatcttggattttttgtttatttgaacaggggattttgtgttttgttttgtttttagagtccacaatgaacacatcttcctcattttgtccttgaggttacaaagtttggtagcaacccctggctaccaatgatctcagttaagctagctgctgtttatggtcactgattcggccagctgttgtgattgtgctcaggtccagctcagtctctaggtgtgtttccatcgtatcttcctgtgcattcgtttcaaaggacttatgggagagaagttcatgatgcaccccacagtaacttattgtgggctggtcgtatgccagaaaggttgacacattcattgataaaggtatctggggaaaaatgacatgagaaaagtcagttataaaaatatggacaactttaggggaaagatttagagactgaagtgctgacctgactaacctccatggttatatctgtggccctgtggcccaggtgtccctatattatcccgctaatgccccctattccyatatggtgagatcagtgcaacagttttaaatcctgggatgaaactgcttaattctttactagaagattyggataagtagtagcctacatggttctgaaaatgataaaagatttattggaacagtcagaaaattgctttcgctaactgggaaaataattgtgtttttagaactgataaacactattattattattattagtgttaattatcctattatttggttaggatacaatagaacaagagtgattctcaaactttagcattcacaaaaatcaccacccacttctttaastagtcaaccccctgccacccaagtttttcatccagtaggtctggtataggtcctggaatccacatgtcttacaagttcctatatgatgctggactattaatccacacaccacacttcgataaccattgcagaagagaattatctagacaagccattctggctattcttacccatgacttcttaatatttattttatcatraagattccttaaaatattaatgtctgtagtttggtccatatatctaaaatttagatgagcatagagcattcccaggaaaaatctatggttcctatgaaagtccaaaaagcatcaaaggatgatgctagtttgaaggaaccagtagtatacatgaggaagggactcccttgccaactaaagaaagcaagttctaaaggtgagggaaaaagcaagcatgaccatggtgagaagggaaacacagttacagacaaaggggagcctgaaatataatcagatatcaaagtctagagatatttcccatttcgttttcaataagataaaaacttgtcctaaaaagtaggcagatttcaggaaccttcagtcctgatcttggtttaatatcctaattactaattcatgctgttgaattctctggaggataaaagcttctgccattcttgtttggtgaacagatagaatgtatatttgtttgagcacatcagactaaattcctttctgatcttagctgagattagagtccaaagctaagaaaaatagaaggcctaggtattatttttttattaactgcatctttacattctttccccttctctccatgcattagaaccgtctttgccacttctgtttccatccctacagttctacttacatgtatttctacttcagtgaaaattcctggagcaaatattaccttttatctctttaataaaagtaatcaaaaaaataaaaaataaaactaatcacttcttttaagattatttgcttataatatgaatatttcggcatataaaatatatatagcttagttcttagagaaatgtaatccagcttattaaatgaaaattccagagtaactcttcctatttatgtggatttttaagatttaaaacatgaagttatctgatgcgtgaatgaaagatatcacatactttaaaaaatggtcaaggcgactgaaagatcgtaaagaaaatgcttaagaataaaataggatacttccatttaaaataaataagaatcttgttgtcacagatgaaatagcccagataactaaaatacatttttatgtaaaagtaaatgtgcagcatgaatagatttgagttatagaagagaacaaaaatagaactgttactgggtacaygagttttacattatcctctgggaaatcagtgctctgtaatgtgttatgggtcatatatctgtaggattttatatacttgtccttattcgtcatggaaacttatgcctcatatatgcagaatcatttctggcttacttagaattaactctactgtgaataatttgtaatttctatggtgatgatttatgaaaaataataaaccatgatacatttattctgtgtgtgtgtgtgcacacacaatttcctgcttgatttaatgtatcaaggctactgactggtatgcagagtgcaagtcctaatttgaaccattatcaattaaatagttagctctgatgatctgttttaaaaatcccacatattattttctttagtgagtttcttactgttggatatgtcttattttgaaatactttatgccatgattatactgtttaaatataaatccacattttttcacattttattatttctgaaattaggatggaacttataagcaacgtgaatgtttaacatatatcatttccatgtaattgagagtgcattttaaagttgattctatcttattaacaataaaataacatagtaagatgtatcagtaagtagaatgtaacagctagccatatctgaatacagcatcacagtagatttttcccaggttgacctaaatgattttgaaaatttaagagagttagcattggatatatacccatgtgtatatataggggtacacacatacagatacatatataatatataaacatatatgtatatacacatatatgtataaacttaaagccaattacttatagtttcaaaatcatttaaatcaggtatggaaaatgcaaattttggtgatacatcagttttggaccacttttacatactcatgacatctatataagattcatgtaaatatagtatacatacctatggatatatacatgatatggtatatgtatgcacatgtgtgtacatttactcataaatttttcaaattgtgttcaggtaagtctttgttgaattatgaatattttgcactgacaattttattggaatgtcaagtaagataattttttaatatataaaatatttggttaaatttaagtcatttcttcctcaatttttaatttataagtattgtatacagatgtagtacaaggtatgtttattcttttgtggctaatcagatggataaaaattattgaaactgtgtgatatatgaggcaccatgcttgacaatatgaagaacctaaatatcagtggaaggaccaagtgatttaggtatagaatatggccagtaattttctttttaattatacactgttcccccaattactataaataataatttactagatgtttacattaaatacaattgctatcatgtattttaaaatatgtagaatgaaaataaattttacttcaatttaaaagacctagttcactgtttaatgagatgacattaaaaggctatgctatctggaaatacttatttcgttagaatatccatgtaggatatccatttaggaacccaatgattcytaaatgtaataaaaataaaaatagtctctattatctaaatttgtaagggagggatatttttgcttctaattatttataatgagaaaattattctttgtcagagcaagtcttcctcatgaaaaatattacatatattgtttgtaatatcttttcttctctatatcaacatcatatgttgattactttctcagcttagggtattagatttttacataagttaattcgagtaggaagtcagatgctgagtgtgcaacacattttctgctcaagtagcagtgcactacctgctgcctgacatcacggtattgccttaagaggtattctttggttcttccatgaagagattatccgtccctttcaaattatagtcagttgtttgagaatatggcaaatgacaatttgtgttagtgccataatttgaaaaaggagtgtgactaggatgaaacctatttatgtttcaaataaactaaatctaaaatgataagaaattaaaatctgcatatggtatttttcacaccagggtaaatacctgatgcagaggtttgggcaacgactgtgaattcagcaatcttttgttgggggggagtttcagttttgttgggagggtatgtccttgcaccaaaaaatgactggtcgctgggtagtaatggagaggctaccagctggcattaaaaaaacaaatctgtttgactcaaccttgtagatcccttcctgtcaccaactcacaataaattccattctcttcacataaccatcaagtgactttgggtccttttattcttttctttttttcacagtaacctctctctatttctccatttttacctaatttttattaacatggtctctcctgagattagggtgttcaacagtacagtcccaatttatgcttatcgtcccattttgacaataaatgacttagtcaacctacctgaacgttacccaaatacattatttcataaaataaacagttaccctaagtgtctgaactagctagttggaataggctcagggaagggcaataggaaatttaaatctaataaggcatttgcttctccagatcttttgttggaaggctctaatttaaagtgtccatagaatcttcttgtcatatctttctgagaattaagtttctctccatgaatttaccctgctaaactcctgtttatcattacttctggtttcttttaatcctctaaatcaccgttttccaagaaaggtaattcttcttaaggctatgaattgtggagattcaggggtataaaaacttactctctagaaagcattatcatgtatactcttagctaagaaaatcgttatatgctattgtaataatgagtagtagtagctgacccattatttaggaaattcccttaggaataatttcgattctgctacactagtagtgtcttgacatcaatgatatttgccctagcagtaattttccagtgatgtgccaagtctcatatcastgtctcgtatcaacatcaatgctatgtacctttcacataaaaagtacaaagttrgatggttaaaaataactaattactaatggtctttttcccattcatatgtaatatttgagtttgtgattataaaggataagaatagttttttaaagtttctaagttgtgattaagtaaaaataataatttttaccacatattaactatataagtaatatctaggtatatttgtacaaatatctttgtatatatatgaacattcatatgaatttctcataatttggttaaggtcactcaagaatctcttctgttggatagaaaaggttatttttaaagtacaaaatactctgaagaacagaaaatgacagtcttcttttgtgaaggaataacaaaaaggccatgttttccttctctagaattctctctctagtttgcttggtaagtgttatgtctgaatagagattttagtatgtataaatatctctactcattgagagaattctcatgctctcctcatatatcacaggggaaatcttcccatttttgtaaggctgaatgttatctagtaagttttctaactctctaggttgttgaaaagatgatagtttagggtttttgtaaatatcatttttgatcatctgcatacagtgaaagaaacagacttcttaatgaagaaattcagttttttagatgtagtcctttgtcactatcgaaatgtttttctgcattttatcttgaaattcagaggcgtattttcttacttttatttttcatctactaaacttaaggggttttcagttgagtttatttctacctactaacatataaaataagaaataggcatttcagtcttcttctagttaatgatatttctctaatttgtctttaaatttgtttcaaactgagctcattatctctgaatacaaactggttcctcttccttggtccctattttgttctagggaatacttattagattaagtcagcttaatctacttgttgcccatctactttgactccctgtctcttgttccaaatgtcccatgatttgccagttactttcttgacatcaatgacaggcacacacatctctcatctctgttaccactatctcggctcaaagtatcattacctttttcaccttagtgactatgactggtctccctaatctgtagaattgccaataaaactgggcatttataaatttatcctggaggaaattagctatatttttaatttaaatgtaagcaatatgtagaaaatagtaaatactttcttcttttgttttcctttttttggggggtggtcatgtctgaagcattattctttgtctttggaaagaagtgggatttaaagtatactttattctgggaaattggcatccttaaatatattatttacatatattccttaaatatatacrtgtatatatttatgcatgtatgtttgtgtatgtatcacactgtctttaarttctcaatttacttaaagaaatgttttaatttctaaaaaatacacttgatgatgactttattctttttcattttgatgcctctactatctgtttcatttatataagctgattttcataactagctttgggttttgctaaggtatgcgcaatttgatgtgtgtttggagattggctagcaacatttattttgtcctatgaagcttgacctttatatacaggctggtagttttacttagagtcaaaatagaaagctgtccctttggtattatttgagtaatattaagaaactcttgattgaaaatacctttctaccggcttgactcccagcttgaaaattttgtcactaatcactattttggtttctaagtgttaaggcagttgataaaatataagtgctatatgagataaatagtgtaagcaattatcacactgcagcttgggtccctggcaaagtgtcagggacggcctagatgttaccgcaggttctaccttagtttctttaggatttctgcagctgttactctgcctagccacctgaagaagctgtgggcatttgttgcgtctgtcagttgatgcgtggcctggacacgtctctaatattctcttcattattttcattcattaagcatttactatgtagcacaggtactataccacatgctggacagaggttgcctattttaagccttctaagactaacagttgagaaaaggaagacttagatagtttaaataatttgtataaaatcactcgtctagtgagttgcctaagtggttgcctgccttcttaaccactacattttgttgcttatctatcactctatctaattcttactggccttagaacctagagaggtgaacacaatataggcatctgattctctgtaacactaattctcaacatttagctcttatttccattagtgtgaacattaagatttcctatgtttatactgtagttttatgatgcttctttgcacattgggtcttcaggaaagaaacgtagtttatgatggatttaagatgtgggtaagatagtgacagctcaaaatcagagttctctgcttcttactacacacatattgaccaatacaaggcatagaaagaagagtccaatctcgaaaacactcaagatggggacaggaaccttaagtatactcctggatacatatatgtgtaaaaatgttcaggaagacctttggggtttttaaagttagatccctgtgttgacttagaaattggcagatattttccagttaaaatatgttagcttttctttttaacaaaatgtgcaaaaagaaacttgaattaatctgtagtttgattattttgtttcatatgagactatacttgtcttgaattttttctttatgtaaaacatagctaggcaggtgctgcagaagtacaggactgggaaatggagaacaaacatgatgaagacacaatttctgctctctggcaaaattataggcttgtgaaagggatggacaaatggtgcaagatagtaaaggaaggcaatggatggggggcctaggagacaaatacagtatatgtgtttctgtcacacacacacacacacacacacacacacacacacacatatgtatatacacatatgtatactctgattggctgattcgactaactatatcattcatcctttatgtgtgccaaatgaggtagccatcttttttctttgaaaataatgttgtttttgagatttattggcaagagtccatattgctgagaagtgattcaatatttactttatagactcccccacagagataatatactttactttgaaactgatttatttgttcgaagagcaatctatctcctagaactctttagtattccaatggttaattggtgtgagtacaacaggctgttggatcattaattttaattatcttgattctactagtaaattattttttaagaaagcactttcaagaagcacataattaagagcctgaatttatgttgtctatctttaaatttaaacacctaacatttgaaaataacctttataattcttaaatgtaatccaggccctggtacttaatttttatattttcttaagagctaaattgccaactaaagtaacagttactattctgaggtcacaagtacagtcctccctcagtatccatgggggattggctctaggactcccgatagcaaaacctatggggggtcccttaggtttatgtaagtcccttatataaaatggtgtgtagtacttacatttaatccacacacatcctcccatatatttaaaatcacctgtagattactcataatacctaatacaatgtatattctatctaagtagtcattatactgtattgttctattcgtattaattttaattgtattgttattttttattgtttgtttttctcttgtatattttcaatttgcagttagttgagtttatggatgtagaacctatggatatggagggctgacagtataggataataaggcaggaactcaatataaatttgcagattttcaagtgtctgtaacgagaataatgagagacaaaatattttttgcaggaacataataataattcttttagtggtatttgtgcaaaaacttcattatagtgaaatcctgcaaagttaaaatataaagtgaaaaaaacttaagagttctatttgaaaggtcacagttctccttgcatcaaaatgcatttagagtaaggaaaaaacattctgaattttggtagctttatgggtgtcttgcaaatttgtctttcagtaatgcccctagtccatctaagtaacagggagagtcttatgtaatgcaggcaccktttatctttgcaataaaaaatcttaactatttaaatgatgtggccacttttgaatatattttgtgttttatgaagcattttgtttcagttttgcaagaaaaaataaatatggattggctatatgcattgtttttataaattcacatgctaatgtctacaaaaccaaagagaaatattcattcgttaatttattcactcattccttcagtgaaggtttgctgaatgccttctctgggccatatgccaagttcttgtcctgaagggttctggatggaacataagccattccaatacatgcctagcaagcagaagacagaggattccatgtaggaaaagcatttcttatctccccatttggcatctctcaatttttcactcattcwctcactcacttactctctcactcttgttcttgctttctttctctttaaattatcatggtatttccacatgatattattatatgtctgtttttagattatgtctttatttgcacagatcttttatctcatattagaccataacctttttgagcacaagaatctatgactaatcatatttctccatgccttatattgtctcacatgattccttatacttattaagcactatatgtgtatttattgaatgaatgaatacttgaatgaatgaaagaaaagagtaagggttagttaatatagtctgagaagaaatcacaaacctccatcccccggtgactgggctttataggaactatatgactgagataatctattaaaatcgaattatgtaaggatccaggccattatgacattagcttagaggtagagggctaaaatgagtgagcagaaatccacactaatgatgaggcacatggcactgcattatgatgtttgagatccactttattttttatttgattttaactatttaaaaatcctttattatttttatttaaaactttattttattttaaacttattttaatatatttatattagagaaggtatgaattgtgtatctaaatgtataaaactttttaaaagaatattaaaaataagataatcatcccttaatttggtgattttccccctataaattgcaaaatgttatgtgtacactttatcatctaataacttccacaatatctgtgtttttcaaactctttagtgcttcctagaagcactgctcatgatctccaggagtttgatgcagctgccaaattagcttttccactaatggactctkccctggacccttctgtgttaacctctgttttatttttgtagtgccaatgaaaagtgatgtttctctttaactgaggcaaagcaaaatgccccaaagtgtgttcatttacatgtaaatctttctgcacagcccagtgcctgctaaattggtactattgccaggtaaagtgatgagacctaaattgaaactatggctcaaaagcctctctaatcttggtgctgtgtttccaaatccgtttcttcatactgtggtgcaatgaggtgcagttgctaatcagtatgaaaacatctcattcttcttttcctttttttaatccccttggaaattgtagtcacaacagtccactggagggtcttataataacactacatcagttaatgtttttggtctaggtttatataagtatggcagaatgaaaattacattatattaaaaattataaagcaaacaaacataacagatactagtgtttggaattgttatagaagcaactggtggaaagaactctccatatctatgactgatagggtattttggtctcacagagaggctctatatatgatttccctgaacattggcatttatgtttgtgtgtgtgtctcatgacttctaatagcccacttgctttccaactggcattttcttccttactatattgatgtagtcttcacattctttataaaacagactacgtttttgacatgcctsatctaaaaatagtttgtcctgctttggcaggacttggatattgcagaggagcatttcaggatttgctgaacccaagcagctgacatccaaacaggctttcaaatgatatgattacttactgataagcattgaatttctcttcaacttcattactaaattaattgagactttggttgagattatctcccaactaaatgaagtgatattctgtcccaactaaatgaagtgatattctgtatgcatctgccaggttgcataaaaatcttgcacctgttttagttcaagtaacrttttttaaagaaaatccttcagatgagtttcattttatagggatgaggtmttgctatgaatttcttcaaaatttatatttatatccacataagtatgaaaaaaaatatactgtttcttccaccccttcatccatttatctatccatctatccactcattcatctgtccatatcatatccatccatcattattgaatatcctagagatcttgggtgaatgaaaccaattccctgattttacaagcaagccattttaaacaccatgttcctagggtggaattatgtgtaggatatgatgagagtggagggmaagatcttctgctgttgctatgaggctttatatagataacgtcatgtttaagctggccaggttggtcttatttatatattgctgttatttcattgatattaacataatctatctctctagattgtaaattcaatagagaataaagacttctcagggtttgtgcaggcttgcgtattagtaaaagtttgaaaattcttgagagtggaaagattggcagggaactgaatagattataaccaagtctatgtatttacatttgtaatgaaaatatcataataagggatgagctaatatgtaaaggtaaactaactcattatttcaaatttttatatgacacaaacataaactttaaaagtaagtctgacaatacagctcttatgcaataaaatacttcttgttgatattttaataaagatcaacttctaaattttatgagcacacatagattatatgagggtgactaacgttgactgattggaggtaatattggagggtgatgtggtgaatagctcttctcagtgtcttacctatgttttttacttttagtccctctcattttttttttcacagttgcatctagcatttacaaattagggttcattttttcttactttatttcataggatgtagtatttcttttgtttcttataaataataaacaagaagactagtcatatttttgattactattatgtgatcagccacatatatatgtagacaattttctttcaactatggctttgatcaaaacaagttaaaaaataaactacataaaaaatgtgaggtgttattcttgatagtgtatcttgtctcattaacaatgtaattatttgcttttcactcacagttcaaagtagatattgaatgcaattaaaaattaaaaataattcagaccatatttggacagcaaatttgaagctcaaggttaagatcttcagtatcattaggataccctacttagagaatatgttttaactcctttgacatgtcttgatatttataacatacaaggcacaaatataacataatatgaaggagtttcatgtaattattttaaactggttttcttattattagatcctatcatttatactgctaatctataacctgaatgatataaaatcagcaatgaaggaaaggatgaaccttaatttataaacgtagtctaggcagattttttatgcgatacagccttctctatgaaaaagcttaatcttatgcttttatgagtaatagcaataatttattatttctcattctatttactctgttatttaagtgtccattataaaagttatcaaagtatctgttacccaagtagtaagattggaaaggcaggactgatcatgaatcttgtaaaaatatatggttaaggaaatctaatgtaggatcaggaaattttctaatctaaagggtgaaaatgattttttctcatggctgagggtgttctgctgtgaatgaaatttagagtagaattataaacaatatttaaattaatatatattttaatatttggttctccacttcagatttagctttaaaatgtattcatgatgttgtgatagtcaattagataatataaaaatttttaacttggtcatggttagtgactgttgcccaacaggagcatctttggtattttcttcctattatttttccttctctgtaagtatttgtggaattctcactccaggtgtagatttttgccaaccatttgaggataactcaaggaacaatacatatgaggatagattgcttaaatctctgagcttctattattattctgaatatatgaataccaagttaaaagtgataagtgaatttgagattagttataaatataggtgttttaatatatcatattttgtgcttgtttakaaggaaacactggagctcctgatcctaccttctccctgaaaagtgttgcaaagcaacgaacctcttccttgaactggcattgaccttggaaaccattatatttctagctgaattgactgtgtccctctcccttcctaatagagaactgattagatttttcttatctttatttttattcttttcatgtgcttttaaattttgctttgattacttacattttaataaaatatgtgtagcttttgcaagtaaatcagactcttaaaaagtatgtaatgggaaccatcccaatgtctatggggagaackaatgtattttgaatgccttggctgtttattttagtgatttcttaattatttattaagggacatgaaactgagacatatatgtattattgatagggtagagggaaagccacatggttgcttaatacatgcacaagttcttattgtgaaactgctatcactgtctagtatctgaataattcttagcttcttctcaaggaaaattaaaatgtacaaattctaaaaaataaaaacaattcacatataactcaaatgtagttaaaattagcacattgttgaaatgtgttgaggtagacaacgaaacataacacagtgggatcaggttattctgctttagtgggggtggccaggaagataggactatactttttttttttgcactgagacaaatttcctagatggtagccccaagaaagaacattgaataactgattggaactgtttcctaatcattatattgattgcttggtcttcatagtgtattaaatgaaaaggcagctatttggcttatatttgtgttatggtgctaagcctgcactttagacactttctttttacttgaggacattagcaatgtggtttcgaataaaggaagtttttttttttctcaaattaggtagacctatggatatttaaagggattcaaagtttaaaaggctgagtaatgaaggtctttataccaggatgcttactggtcccctgatcacacttgcctctcctgacccttaggtgaacacctgcttttttgtgagaacacacaggtggcttctggtagaactcatgactatagcagaaatgcctgtctggttcagcaatccagttaatgcctcatgagcacttaatttcattgatgtagttaatataggaggtgggtggcttctagtcaacaaaatctggttagttgcttgactcataatattgtggtccatcccccagactacccagtttagaacatgcctccaatcagtttcatgactgatatctaatccttaggatgtcttttaacactcatattcagaaatcctcttctctatgctgatgtagaagtactttattttatctttagaaaaaaggatgtatctttaggagaaagggcccttcttggaaataacatattcctatctaattcctgcacggtttccttttttctcctgcgggccagctgakttattcaaagaccttagtgctttcctaggaggcttgtgaagtaattgagaatttggtaggaaagaaagtgattctcaacttcttactatagtaaatgcatttctagagattatggccttaagtatagccctttgcaaaatctgcttgggggtttagggttttaaacttatgccaggagtgatattgattaggcattttctgccttgcctattagctcttccttctgctcagtgctagcgaaatcgcaatttgtgccatgaaaatcaccaaggcaataaatctagcacttatgacttcaatgcattattgagaagaaagcacagatggactacaagggagcaagcagcggttaaaaccaactaatatatttgataattaataaatgtaacaggggaaatgaacagcaaatgaaggagtagcagatccaatttttaattaaaatgtaatataaaaattctctgttttttaattttaaaaaatcctctctatagcattgaaagaaaattggttcttgagaatgctgactgcaatctgcaatcaactttgggtccagcttaaacttctaacaaaggtagcctaggtactcctattttgtgaacattaagtttcaggaactgtgttatgtgctggtaattcaaagataaaacatgaatactgttttcaaggagctctaagtctttaatagggatccatgcatataaacataactagtgagtaaactagtgaataaacagggctatatactggctccagaggagggcatgatcacctctgctgggctaggatcaggaaagacctcagaggggagactcttgagctgagtcttgaaggaagacaaggaactcattcagagaaaagtaggaagactgttctaggcagaagtgcagaggcatgagacagcatagctggtccaggagactagaactactcaaaatggcaggagcaaagaatgtatatggagcaacagtgacaggtatacatatgagaatacaggcatagcaaaatggtaggcgagagatgatgagagcctgaagtcagatactatcaatagggttggaaacaatgggtcaatttatatcatttattagattggtgaccttgggcaagttaattaacctctctgagccacaatattggcactgttaaatggatataataatctgcatcttacagttttgttgttagtgctagagaaaatatatttgtgtttcctgaaatagtaagttctcaataagtgaaagagatgattgtattactactgattgattgaaaaactcctcatgtcctttctttttctacatatttcactgcttgtcactctcatatcactgttcagtatatacctgaaatgagcttagagaattaagcattttaaatgccctgccaacagtcatttctccaataattattactgtttccacattaatctgtatttgagatgcaatcaaattgatgtgctcaaaaatgtataagctctgtctgtcagaactgaaggagagagaaacatttagacattattaaaattgttggcttattactggaaagcatcatagtttaagtgccaaatatccaactagggtaaatataagggactgaggattctaatataggatgctgatttattgtttagctttaggtaagttacttcacctcttctttgtttttttttttgttgtttttttgttttttttcagacagagtctcgctctctcgcccaggctggagtgcagtggccagatctgggctcactgcaagctccgcctcccgggttcacgccattctcctgcctcagcctcccgagtagctgggaccacaggcgcccgccaccacgccgggctaattttttgtatttttagtagagatggggtttcactgtgttagccaggatggtctcgatctcctgacctcgtgatccgcccgcctcagcctcccaaagtgctgggattacaggcgtgagccaccatgcccggccgttacttcaccttttctatgcacatctataagatgatgaagatgatgcctattgaataaatccaataagcaagcttaagcataggaatgataaataataaaayataaatttcctctctgaggagaaaaaaaaatctcatgtcagtagatgtattgcgatgctgggacctaacattctaagtgggaattatatgcagaattcagttttttcattaacatcagtttatttaaatgtgttcctgacttccctaattgtgtcccatacttcggtagttttgtcttacattgtaaacagcagattctctgtgaaaggtagaaattaacctgctgatacttctctttccacccccataagatactgtaaaataaatggaaaaataccatttcaaaacccaatccagcagaaaatggctctagcctgcaaaacaatccagtagctcacgtaaaaggaataattttctttcttgagaagagggaattttttaacgaaatrcaagcacttggggctgtcaccccttctggttcttcttgccatgccctccctgcctctttggatcccagcaagaggcaggttaaattctgcatgctgtaggaagactttggagaaaacaaaacaaaaccaaaaccttgtacaaccaccctcctctaactacagcaattttttattttactyctctcttgacacttcttacatgctgctgtgtgttagtgactatctttgtgtgtgtgtgtgtgtgtgtgtgtgtgtgtgtgtgtgtgtgtgtgtgtgttttgtttttttgagatggagtctcgctgtgccacccaggctggagttcagtggtgcaatctcagctcactgcaacatccgcctcccgggttcaagagattctcctgcctcagcctcctgagcagctgggattacaggtgcccgccaccacgcctggctagtttttgtatttttagtagagatggggtttcactatattggccaggctggtcttgaactcctgaccttgtgatctgcccaccttggcctcccaacatgctgggattacaggcatgagccaccgcgctgggctgtgactatcttattgttatgttttatcttcctaattataacacagatgcttaattgtaatactttgccttttctattgtttcctctgatcctcgggagatatttgcgaatttattggctttattggggttttctaaacttagaaataaatgttttatgtagattgctcatctgttagatattatatctaggaactgccctatcgctgtgttccttctgcaactgtggcagagaactggcagcaagccaagccatggcttacatggccatgatgtctgtatttatgatagtttcttaaattcctaggactcttccccttgttctataacacagagtttcttgtgcacagcgtgtgctcataagttaaccttgcatacatccccacacaaaaaatacagccagcagaacatcagagaaaccaaaaggggaatgcaaatcttgtctctgaaacttataaatatggattattcctggtcctcccagatattatgaattattggtggcttgaaattcatagtgtacattctagttgaagtggattaagagtgtcttagaaattgtatccaaacttcagaaaactcttaatgggagccaaattatgccagtgttctaagtcacataatcaaatgaagtggtctactgcattgcattggcatattctgtctctctctgcttttgcattgtcaaaattacaagtgtcctgctaaccttgctctgaagtttgagaattgtgatgttaagaagacatcagagggccgggtgcggtggctcacatctgtaatctcagcacgttggggggccgaggtgggcagatcacaaggtcaggagattgagaccatcctggctaacatggtgaaaccccatgtctactaaaaatacaaagaattagccaggtgtggtggtgggtgcctgtaatcccagctacttgggaggctgaggcaggagaattgcttgaacccagggggcggaggttgcagtgagccgagattgcaccactgcactccagcctgggcgacagagcgagactccttctcaaataataataataaaaaaaaaggtatcagaaaaaaatttataaatcataataattgccttgactttgttttcctaaataatttaaggggagtaacattttgttggtccctctctcaaatatttttctttctgatcattttctttctcatttccttacagaacaaatattcacacacataaactttagagcaattgtgctttagggcttttgacactgtaccttggccagttagtaggcactatagtggtacagtcttggaagtacacattaagtctttccagaacttgaattgggggaagatcactcttcatgcccatttgaggatgtttactgagatcaagcaaagaacctaaaagtggtgttcttttatttggagactttcagaatacctttgttagaggttattactcctgagagagagctgttaagctgactgaagtttgggtaactgggattgacttggtccaagtatgaccctggtctgtggtctagttaggatgtatcctactagctcagaattatccaaagtaacagatagttacacataaaattgaactttctaagctgttggtgagatttgtgttgtaaatcacttatattctctctctgtccccttcccttcctcctctgttaatctagaaatctagataaaaagatttctatcttttctttattaattttgtctcttattagtaattttctctctttattaattcattcatttaataaatgatcattgagtatgtataatatgccacctactgtcttaggtgctagtgagatgagcgaataaatagaaatagatattatcataaggggatacacattaaacaatagttatacaaatataagattacaaattttgatgttggttacagaggaaaaatacagggaaccagtctttcagggagttgcatcatagaagattttcctaagaaagtttcacaagagttgagatgaatgaatcaagtagaaagtgggaggaagcatgcttcaagccaaggtaacattgtgcaaaggatgagaggcaggcaggggacagagggtccagaatggttggactggagactacagggatatggcaggatgggggagtggggcaaagggactgggtcaggtgggactcaaaaagccatcagggccactagttccttgtggaccattttataaatttttagggattttgaaggatttagactttatcataaagccagtggaagccaatgaaggatttaagcacgagagtgataagaactggtttgcattgacaaaagttcattctggagaggagggacaacaaaggtccagagcgaacatgtgcaaagctgttcaaaggctactggaagatccatgagagaagcaagatggcagtgtggatgcagggagtggccacagagatggaggaaatttagcaggtttcaggagtgattgaggtagagggtcaggatttgctgaagggattaggaggtctcagaggaatgtttagatttctggatgcacaaatatcttcatgttgggggcgttgcctgaaacaagagacaatgcaagttgctttggcggtgagtgtggtgttagacgtgataaagacgaggagattttgacatagtccaatggagatgtcatggaggtactttgttcaattctagagctcaagagagaggtttgggccagaggaattagtatgaaaaacagaggatatgtcaattgattttatttcagtagagcatttttctaaaggtaagttgaacattgcttttgaaagtttctcttagtttatgttgtagtatttttattttccccgttacctaaatgtacaaattcagtcccctgtaccatgtttggttacctggaatttcattctatccaatattattttcatgccttatttatctttggtttgaatgtaatatgacagtgaaacctgttatttgtattcaatttttaaagaaacgcttttagattttaaaagtcaggcttctctatgtkctcaaatgaatctgacttactttataagaagaagggcttggcattctgatggagtcctggaaatagrttcttggagacacagctatgtattggtcttcctacatttgtctctgtgattgtggattatgatgcaggtggactttgctcctttcccctgtgctatgcagcaaagtgaccttgaacaagctgccagccctactggatcatgattactcatattttgaggagaggactgaagtaacatgatctctgaagttcattttagccttaagatccagtgaaaagttagcattaatcctaggaaaatagttagagataaggatggtggagtgcagttattttaagtgctggaaaaattgtagctctctggaggaattgaatcttctgaaattattcactttgtaatacaggggagcttaaaaggtccaccctcccatctttctacatatacttaaaggcagttaaattgctgctaaaaatgtgaaatggaggtgtgaacatttctagaggcaattaagtagttctgcmttttactggtaaattctatcattcttaaaaaaagagagaggtttatataaaaatggagaaaaaggaaattgcatgtgcagatgtaaaataccatctgtgcttctggattctttccatgctccacaccttcgttgaaagaaattgttgattgaaagctcagattttgctggctagttataaaagcttcctgtgttgcttatcatgcattttaaaaatagatggctttgaatgtgtgagttaatttttagcctcatttgccaaggcctcctaactccagaagyatgcttttagtgaacccacagttcagttcatattcaatgcaattaatagtagtgggcacttacgaggtgccaaacttcagaatgtcatagcttccttttcctcctagtggtaggttgggcccatctgatttcctagactggagcactttgtctatatcttactttgagaaaatgttaaacattggcagaactgcaagtatgtagtctcgtgacgttggagaatcttaagtatttccaacttcacctttcttatctcttttccatcttaatagtggcaggtgtcctacttgtgcccagacccaagtcaactctgctctcatttacctcttacaatgaatttaagtaaaactggcatctctctcagggtaactcttttcctaatggtggaatgaaatacttgttcttgttaatacagttttaaatgtaaccattgctttacctacttatggataaagtaggctttgatttttttttaatttaagatttctgaccattatatttttctttaaaattgttcagttaagagcattttaaatagtagtgtgtgagtgtgtgtgtgtgtgtgtgcagaaatccttagaagcaacacaaaacaaccaaatttgtatccctcttctctgagccttagtaactacaaatgtatctgaattgttcaggtaccaaacagctctaggaaacaaacttactrttaraagctgaagatagctttctcaagtgccaaatgcatctttaagtaccaaaagagagagaatcaattacacagatattgcttaatatgcaaaagggaggtagagagctacccattttcagcatgatgtctgtgtgttaaatatagaccattttaataggtagcttgattctcaaatgtgtgcttttcatacataaatgaattataattcataatatacatacatacataaataaattatgttatgttcataatattaagaatgtattttgtggttttatatacatgtctttagctggcataagacagaatctacacagatttctctttgaataatagaaatgtctattcttagaaggacattttctctagataaatttgtatgaaaagagttaaagtgggttgggcgcggtggctcacgcctgtaatcccagcactttgggarcccgaggtgggtggattacaaggtcaggagatcgagaccatcctggctaacatggtgaaaccccatctctactaaaaatacagaaaattagccgggcgtggtggtgggcgcctgtagtcccagctactcgggaggctgaggcaggagaatggcgtgaacccgggaggyggagcttgcagtgagccgagatcgtgccactgcacttcagcctgggcgacagagcgagactccgtctcaaaaaaaaaaaaaaaaaaaaaaagagttaaagtggcagctgggcacggtggctcatgcctgtaatctcagcactttggggggccaaggcgggcagatcatgaggtcgagagatcaagaccatcctggccaaatggtgaaaccccgtttctattaaaagtacaaaaattagctggtcatggtggcacgtgcctatagtcccagctacttgggaggckgaggaaggaggatctcttcaactcgggaggaggttgtaatgagccaagatggcgccactgcactccagcctggagacagagccagactctgtctcaaaaaaaaaaaaaaaaaaaaaagagttaaaatggctacttggcattattttgataattcagtagatctgagtgtagctgtgcgaaataaatatctgtatccaaacctagaaactctgctattagttacattttgttattggtcaaaagttacttaacattttccaagttaactcatcagtaaaatgtgattgaattgtgagaatgaattcaggtaattgtgaaacaaagacttagaaaggatcaaaatgttcttttcattatgcttagcatttttcatgagaattttggaagctttcatttcatttttttgatctctattttgtttatctgtctttgattttttttgatcttttgttcatgtgcttttaaaaacacctcactagataacttcttttgtatctctattattttttgtgtgtgattctctcrtttttttcctctttattttgtatctctgtttttttaatatgactctctcattttttctctttattgggcttaatcatagcatctaggatttttgttgatacttgtttaagagggatgttgacaaacgagagtttttactgaagatgatgatcaggatggcaaaggatttaaacataaaatagaagtttagaatttggtgatatttagactgaaggaaaaacatatttaagggagataatcttaaatagatgaaaaaaagcaatatggttgaaggtaaaatactgttccaggtttcaaaatttagccaattaatggaaaatatgggagagtcaattttgtgtcartagagttttaaaaactaatcagagctattaaaatgtaatagctttgattttcaagtaggtcataggaccagtttttctgtacaaaccaaataaattagatatagttcctagagctgtggaagcaacaaggactaaaagaactaaaatttcagaagggaaaattattccaaggcatgcatgtatttatttccctgagggcatttgcttattctgagtgtggtctgaggactggactgggcctaggcggaaggtgtctttggggagtaagaaaagttagcaaaacttttagtgatactgcaaggctgggacaaactggagacttgagggatctaaaacacacatctttctccaagggatgtttgctgtgttttgaggctgcataggaagccaaaggctaggctaaaagcttctaaaaggcagagcttccaaaaggcagtagaattttagtaggaaataaacaaacaaaaggacttggcagcctggagacaccaaactcaaacataccattgaactctttttgaagatatttaccaaattttgtagctgttagggccctaagataaagaaatgagctgaaaacttctgaaagagaactttttcagggcccagaagataaagatataccaggctttcaatcaaaatccaggragtgtcatggcttacaagtatagataaacaaggggaagactacattccactaaaactgcaatctagccccaacccagctgagtccttggttggcttgagacgtccagcctctgtctcttctgcttaatatcgaaagtgagaaacctgctctggtggaagatatcgtttggaattctgtagttcttctttaactaatttctatcatacaataaaagagtacgtagacatacaaataggtgaaactacatgacaaataatcaaaagaaaaagtatacatttgaagcagatacatagatgatccagatattacaggtaactggcaaggacttaaaaggtggactaaaaaaagtgaaggaaaagaaaattcgatwrgagaagtgggacacatagaaaataatcaaacaggttgggcatggtggcttatgcctataatcccagcactttgggaggctaaggtggaaggatcacttgaggccagcagttcgagaccagcctgaccaacatagcaaaaagccatctctactaaaaatacaaaaaattagctgggcttggtggtgcatgtctgtaatcccagctactcaagaggctgaagcatgagaatcamgtgaacctgggaggcagagattgcagtgcgctgagatcgtgcacagcactccaacctgagcaacagaatgagactgtgtctcaaaaaaataattaataaaaataataatcaaacacatattcttgaactgaaacaaaacaaagtcctacctctatctgaaattaagagtttgctagggacatatgataaattgggcacagtataatacaagtttagtgaactgaaaaaatactcaaagcatagaaagaaaaagggaaaaattagatattgtgtaaatggtatttgtgttatgctaatttttttaaacataagtraaaatgaagtcccaaaggagaggagagaatacacggggagatgcattttttgaggagttaaggccaagaattttctaaaattttggaaagaccgccacacacaagttcaagaagtttagcaaaattgaagcaggataaatacaataaaaacattcatagggacatttcagtaaaactgctgaaaaccagataacaagatcttaaatgaagtcaaagaaacaaacaaaaaaaaaactttaaagagctctaagtacaagattgagaattgacttaacaaaagaagtgagaagataaatgaaatgtagtgttgagagaagataactgcaaacctacaattctgtaactaatacaaatatatctattgaaaatatcgaaacaaagacattttctgaccaaaaaaaaaaaaaaacccaaaatacaaaaacaaaacaaaaacagagaattaatcagtatgaggcctgcactaaaaggaataccaaagggaattgttgtaagtagaagaatgaccctaaatagaaccttggaaatatctgagtgattgaagaatgctggagagtgtaaatgcattttatacaaatgaatgtgaactatattgaacaataagagtgatgctttgtgaaatttaaaatacatacagaataatatgtgacatcaataccattgcaaaagtaagaagtgataaatgaagtttaaaacttctaggtttagcaattctgggaagatactaaaagtaataattatatagaaccaactcaagaatgcatgttgcaattcctcaggtaaacactaaaagaacagtaaaagaaagtgtagttagcatgttactacaaataaataaatggatgtttgattaatgcagagaaaagttatgagaaaaaaagaatatagtaaacagggcaactaggtaggaaatagaggaaaacatagcagaaaaatctttgtaaccctggagtaggcaaggatttcttttttttcttttctttcttttttttttgagatggggtcttgctctgttgccaggctggagtgcagtggcgtgacctcagctccctgcaacctccgcctcccgggttcaagygattcccctgcctcagcctcccaagcagctgggaagacaggcacacgccaccatrcccagctaattttctgtattttactagagatggggtttcaccatgttggccaagatggtctcgatctccggaccttgttatctgcctgccctggcctcccaaagtgctgagattacaggcacgagacactgctccccgccacaaggatttcttaatcgggacacaaacataaaaaatatatatatagagagagattggtttatattaaaactaagaacttttgttcatcaaaacataccattaagagaatgaaaagacagtcacagagtgggagaagatattcttaatacacacatctgacaaatgactcattcagattacataagaactcctgcaaataaaaaagataaagacaaaagacaatccaataaaaaagtgagtaaaagtcttgaacagacacttcacataagaggatatccaaattgcaatatatatatgtgtgaaaaagaacttaacttcaacaatcattatactaatgcaaattaagtcaaaatgtgataatactacacactgacgagaatgactaaaatgaaaaaggcagaaaatatgtgttggtcaacgatgtagagcaatggaagttctcatggtctgctagtgggtgtataaatggaaacatctttggaaaaattttgagggcatctacaatgcatatcccatgacccagtaattctacttctagatatacatgcaggagaaatatgtacacatgttaaccaaaagatgtacaaaagtgttcaaacagccctttttgtaatagtgccaaaacagaaatgctcatcaatgggtccttaggtaaaaagaaatttgaatattcatacagtagaagtatacagttgtgagagtgaatgaatatcagccatgtataacaatgagtaaatcttataaacataatgttgagtgagacacaacattcagacacaacagagtatatactgagtgattctacttatagacatttcaaaaacagacagaactaatctatgtatttaggtcaggatagtgtttactctgggcagggactgggtggggtggggtggggtggggtggggcgggctgctgtacmccttgtaatatctgtttcttagtttagatattgcttacatagatgtattcagtttatgaatattcaccatcatgatatgtatacatataatatatataaaatcttatacttcaaaaacaagttaattacaatgagcgttttttgagttaataagcttcctattcttggaaatattcaaataaagaagttggatgattacatgtaagggagactttggaaggcatttctgcattggggtaaaagaaatgcactagatgattatccaaactctttttaattctgagattctctaatttttttaaaaaagggtatactttgatcattcatctgcatatttttcttttttctttactaatcaagtttgagactrtagcctactttcactgttgccagtttacctcccatttcctcttaaactcatgccacttcttttgtcttcttctttttctttttctgtttctttcatatatatttttacatatatatwtttttttcctgtcttgctctgttgcccagagtggagttcagtggtgatctgagctgcaacctgtacctcccaagttcaagtgattctcctgcctcagcctcctgagtagctgggattacaggtacctgccaccaggcccagctaatttctgtatttttagtagagacagggtttcaccatgttggccaggctggtcttgaactcctgacctcaggtgatcttcctgcctcagcctcccaaagtgctgggattacaggcgtaagccacaatgcctggtccaaactcataccacttcttaatcactgaccactctaggaacaaatctgatggattattttagtctttttctaacatatttgggtcatttgctgttgataactcattttattaaaactctctcccctcagcttttctgatgtcactctcattttcttcttgtctttttttctctgataattactaaaatataagaactgtccaaagttctgttcttgacctgcttctcacactataaaattctttgtgtgattttaaccactttaagacctcactcactattcacctgttgttaagtttcaaatctgtgtctctaaactcagaactctccagggttctagtcttacgtattcaactacttaacagacagatccatcgaatgtcccccaacgtaacacatgcaagactgaattcctacctttcccccaaaccttatcatcttttattattccctttacctgaaaatagtgtcaccatctatatgtgttttatgcagccttggagctattttggactctccaatccctccctttcctctttccacatccagtcacttcccaggtccaatccaccttcttttctaatattatatatccttccccccttctcttctattttccactgactcagcttagtttagctctcattatttctctaaatagtttccaaaaagatttgtcttctaatttgatactcagctgatacattctgcacaatgaacccrgcatttatttctcttactaggatgttctttaattcttcacttggtgattgattacctactaatttgacacttggtttaaatgtgggtttccctgtgaagccaggacaaacctttacccaacctgccagattgaattgacacctccttcctttgtgttgccaatggaccctgtacatactttcagccaagcgtttgtcatatttcattgcatttattcatgagactgagagtatgtcttatttatcctgttgtatccagcacatagtgtgcccagattgaatgaataaaataatgaatgaatgactgcataaatgaatgaataggataattgagcttagtctgaatctatgttttccagtttcttattttgaatcacctaagagcttgttaataatactgactcttagctgttacctaggatgtactctaaggaaaaagctaggagattctttttattagataagcttggggaacatgagtctaaattattatcttaatttatttacttatctttcaaatagtcagcatttttatgcacatatttctgatctgaaacctgccaaactttgtggactaatcactggtcctgaaatgaattgtggaaatgttattatagggacaaagtaattatctttgcagcattagataagggaaaaagtgaatacgagcaaatcatttttggtgggggagggttagtaactttttgcttagtrtatggtttattgctcaataaatattaaacatgcagtattaaattaaagtggttactgaattattccatttgtcataaaatgattctaatacraacagacaaatatataaatatacacacatacttaaaaattgtttcacttctgtggtatatttctccatatagtttgctaagatttattatatgacatgcttatgtcatatgtggtttttattcacatttatgaatacataatgactttctgggaaaaatatatccagatcacacaaatatactcaaagcattttcattcagaagtggttgccacttttaaatctgagattctctgaattgacacataattgcctataaaaacataaatttcactctgttaaattaagagacaggattcactttaaagagggtttgttattcagccaaataaatattgctcatgtccaaacttccatattaatttaccattacccttcattttaaaattaaattaaaggcagatttttaatataacatcactatttacatttccttctgctagatggtaagctagaagagatgtgtctaagtactaaatataatatcgaatattttagttcataaacaaaactttccaaaatgaagaatataaagagtagaaggcagaaaggaagagggataatatttgtttaacaattattcaagatgagaaagtcacattaggatttttttattatttagtgatgtggggtttcagtgtagctgcagaggttgtcagtctagacttgatattttggcttctgtaatggttggtgtgtatgtaccttttttttttttttttgtcaagaactgcatgactaactgtatcttaaaaagcaagggacttggccaggtgcggtggttcacacctacaattctagcactttgggaggccaaggcaggcggatcacgaggtcaagagatcgagatcatcctggccaacatggtgcaaccctgtctctactaaaattacaaaaattagcttgatgtggtggcgcacacctgtagtcccagttacttgggaggctgaggcaggagaatctcttgaacccgggaggcggaggttgcagtgagctgagatggtgccactgcactctagcctgggcgatggagcaagactgtctcaaaaaaaaaaaaaaaaaaaagccagtgacttcagtgggcacagcagtgtgctatagggaaacgagcactggtgatggtattgagaaagttagatctcatctcagctccctcatgatccccagatgattgagagaactaaaagtttcacacagaccctaaataacctcatagatcatcagttctctaaaatgagcaattattatttctaataatattttgtcaaaatatgacaatcatagttgacatctgtatacttggtggcatatttttttttttgaatggcagcctgattgagggtggtatttccttttcacacttaacttgtctatatccctcttttagttgaggtcctactgaattatgtcaaagacaaaccccaaaatctcactggtttagcataacttgcacatgtgaaattcaaaactggtgttcctggtcagtaagaggctttccatttggtcattcacatatatgcctcctttatcgtgtggcttagttttttatctaggaccttggagttctcttcccgtggctcatgcttggggaaagggcatggaggaccaggcactggagaattttattggctaagactggaaatatcccaccacttccttcatgttagaatgcagtcatattgccatttctaactgtaaaggagagtgggaagcttatactkcctgtgggcccargaagaagatggaacagatgtggtgggaagctagctagtttctgtcataatacttttcaatatttattttattttctctgtcacaagattagaataatctactaatttatgtaaagggttgagaaaataatcaatgcccttatacctttattaattataaagcctcctcattttcataatatatttttattgttatcacaactctgtgaagataggaattattaaccttggtttttaaatgatgaaacagagactcaaaggagttgcccaaggccatacagcatgtgtatggtcaacgtgggatttgaaactgtgtctcccgatatgtgtcaaatacsctttttttctaggaaaaaataaatacatacagtttatcaggtgtcagagggaaccatggtgccttgaatttcttacctcatgtcataggatcatgggcattgctctgttttcgggatgtcacatgtctactgaggctttatgggacttgctatgtaggaccataagtgttggtggyatatggaagctgtggaaattatatggctcttttataactccaaggagggtctgggcagttacatgcattttctttattgaaagttcttcttgcctcatataacttttttctcctcagaactagcttaaaggtacctgcaaatayktacatataaatttcctagagaattcatctgtccctctgactgaaaagaagttaccacatctaatgtatgtgaagtaaaagtgagattgaaattactgtcatcttccatacctaactcaagaatattatacacttaaatttcaattaatacctcacacagttcatcttaactgaatttctgactccccatgtaacttagcaaaacaaacccttaaaaaatattttttctttgccttctgtgaataaccttattgacatggacagaaattaaaacacaaatgatgactaaggggaagagtcaaaattatttggttctaattataaatgttatagagaaagcttgctgactaataattcagtgtctatagatgatgtaaaatttattgtgaacttaaacatcctttaattctttttataataatttattctaaaatacataaatttatgaaaattctatagattttggtaatttcggttacactagtactagcaataaatatgctctgcatattttttgtggagcttcaagggatggatcattgtagaaaatgaaattaaacctaacaagaatgctaatacatagtgtagcttcagacacacagcagactcagtaacccaagacttcagagattacaggacaccatcatattgaaatatgtggaattttaacaattcaaatgttctaatgatgtaagatgaaagataagtagttatcatattcatgaaaaaaacaagttgataggctaacacatctgggaagatgactcaagggctaactagaaataagtgcactattaagtgaaaagctgaagcgtcaggtatattgtacctgattttgccaaagcacacgtgcatagagggagatgactctaaaattccatccaactgactgtgttacttttgttgtgttgattagctgacgagtgtgtgtgcagaaggtaaatgcacccataaacatatcaaatcagtttccttctagaggaggccagagtatttgattgattgctagcatcatccttttagaattttctacctttttaaagtctttgtgggattcagcaacttagagatcttctccaagccacctctcaatagaaatttctactgataagagagtaygtaagagtttatatagagtacaagtaaccctcatttggctcatgccaattatctgtgtgacttcatacgtattaggtgtctaagtatttattctcgaaagagcactggtcagtgggtaaagccatgtcatatgcattatctaaaactaaggcagatattcactggtcccaacctttcattggagccacttcatatctgacagtgataacctccccatttaaacctggtaggtcctctattacctgcctgttcgtgccagctggagtgaactcttgaccctgcctcactgttggaacttggagtactcataaccttttctttaatgaatttaactcctgattgagacccctaactttttaaaggcatatatttttatcacattcagctttatctagtttgattctcagttttgtcctatctcaggctatgttgttccccaaaatcatttaatgcaacaaatgtgaactaatacatcttttaaaaattggacatgtgatcttgcatcagagttattataaagcacttcttactaggcattgctttaaggctgtcttgagcatccatacttggtaactgtttttcttgtaagcctgtgttaaaatatgttttcctggtagtctgataatgagttcttattggacatactgcatcggtcagggtttggttaggaaaatagaaatcacacttaatatttcaagtcagaagtaattaactttaggaaattaggtgcttacatagcactggaaagcctaaaagacaacgatcagaaaaaaaaacaaaacgattaactctcagcatatgagagagctaaaaaaactgcaggaaattgctgctgatcttggctacctgggcactgaagttggtgattttcagaagcccacacaaacttcaggtctgacacctgccttccagctgttgttggaggaaaattaatttttctttctcatctgccttccaaatcttttgcaagtgtacctcattagcagaatcaaatttggaaccatgctggtaagaaattctgggagtgtagcttccagrcaatgcagggaaaagtgtataagggggcagagatgatgcagaattgatgagacaattcagaacatttgcaaagaagaatgttaggtaaatattgaggtcatccagatgtttccccacccaatttttatattttgtgttctaagtttgcctgccktaatgccccatatctacacgcagacacacagacacacacacactttcaaccaaaaagaatggctagagaaatattgaaatacaatgaatgtacttaatttttaaagtttatcacctgcatacttaagagataatgctaaagcatgagtcatcgctgacatttagcaccactaattttaaamctatgcagattattgctttgaggaatagcactgctggcatgtacagaagagaagacatttttagtaagtgattttccttataggagcttatatgctataagttacaataaagaatatgggcttttgatcacactgagtaaggtttagtacttgagtgactttaaacaatttactcygtgggttttaacgttcttatctataaaatggggatacaaatatcatccacctgcctcaaactttgttatatgatcctaagagataatgtatatatatataaagtggttcatattagtgagttcttaaagatattattacctccccttcctatctgttcttcaatgttctttctaagggttatactatggttttggggaagtaggttgaaaaatgtgtgggtggctatttcctaagattgttttttttacagtaaataagctttcttataaattttctaatactttgcaccaattctataaaactctgcatgaatctagaacataacttgattctttatcagtaatgttaaatattctccctctcatctgcttatctgccaatgrggaatttgttttgtaatgaagctgtcctttcttattaaggattaagctagaatgcatcaactatttagaaacaaagatacatattagaatatgcacacaactgctgaaatatcgtttctctttcatcatcccttttatgttgaccagatgtgaggacaggtaaaaggaatcacttctgtggaacatcctttctcttctgctaaaacattgctacaattcacaggtagccttcctattggcccttatattcattttttgatatgcmtgttaagggacaagggaagtgcagcctccactccagctaaagatgcagaacagagataagaagagccaaatggtatggagagaagcaggagagagaaaaataaaaacccaggacagggggagttaacaataaaggaactctgataycacatctaaaaattactttgctgatgaaccaaacgtttctattttgtaaatagtgctgtcatcatgtagttcacatattggtgtagcaatatgcacctgatgtaacttcttagggaggcaaaggaaggacaataagctaatagttggggagaataaaggtaaaatgctttcattcagttcagcttctctgagtcttggtagttattaatatgccaggtatcatagaggaagcaaggtgataactctctcaaagctctgttatttttcactattctgctrttccccaaaycgttaatttttagccttagttttttttattgattgaatagaattaatgaatttttatttcaagtgtattaaaataaaatttcattgagtcactaaggaaggttcccatgactctttgaggttattttgacaggtcacttctggatgcctttttcttcattcacacagctttagtttgttctaccagtcaasataggctagtctatgctgcactgtcaaaaacaatttaaaaaaactagttaaagtcatagcttaaaacaaaaatgtatttytttttcmtgtcatatatgtacacaaccatttgtactgggagacacacctagttttaaggaccatagtcactcaggaacctaggctgacagaggcaccacagttttctagctacatcatctggaatgatgcctagactcctcactggccrtggtagaagaagagagagagagagagacaggaacccatggtaaagaaagagaaactgccaacagcacatgagatttttgctaccttaacccagaagtgacacaaatcctttccactagtgcccatgaactagaatgtgttatctggtgctgcctaactgcaaagttactgggatatttagaaaactaactggaatatttgatgagcatggctatttctgccacaattggaaacatttacttttatgtacttgagtataaattaaaatttcatgaaagtgcttcaatactagaacatactttcatatacgcttgtcttctgtttagtcacttggcaattaattgtatacatttacagaatttttttaaaaagacttttctttgagacaaggtctctgtcaccaggctggagtatagtggcacaatctcggctcactgcagcctctacctcccaggcccaattaatcctcccatctcagcctcccaagtagctgagactacaggcgcatgtcatcacacccagctaattttatgtatttttttgtggagatggggtttcgccatgttgcccaggctggtctcgaaatcctaggctcaagtgatccacccgccctggcatcccaaagtgctgggattacaggtgtgagtcattgtgtctggcctaaaaaagacatttttatcatcgtgcctcacctaaaaaagccattcttattagtgctaattttatctccctcaacatatttgtagaatcttagaaacagaaacagtgtcttctattttttggtgtccctatggcacctaaaatatttacatatcttcattgcaaaatgacttaatagcaaaataaagacatacatgctattatatatgcaaatatacattagtataaataaaagtcatggactcctaattttgagacagattaacatagctaaactgaaaagttcattatgcattttcagatttttctccattctgattccttattcatgaagaccaagtttggatgttcagggaaaccatcacttgaccatcagaagacagatttactttctcaagatcagaacaaactgactatgacaactttaaaaaaaggaaatcatttaaaaatcctttaagactcagtcattttccaaatggcaccaaatatactttgacgacatatcatccttattaaaaattttctatggctaaatttcatattaccttcgacctaaattcattcttgccatcgagtgtctcttacaatctgtctgtgcccaaatacccctccaatttttgcaattaattgttttcaattctttatttactcctcattttcttaaacctcattggtcttaaaatattattttgctttttctctgctgaaatagaagtctctaccatttttgacatcactaacatgatgtcaattcatttagctaattcaaatcaaggttctatgtatttatttttggaaaatggtgatctggctcattaatcttataatgtgaccaacttgagggcatttagaaagtggatgttatgttaccttgttactagaactctgaaattagactgcatggagaccaagataattatgactaaaggattagattctcaagactaagtggactcatttgtgtgtgcagatatttatcaatcctttgtgagaaatgtccttcttagaaggctgcattagcagaatttaaagactaaaggagggaaaacaaaatttttagtcatgataaaaataatttcttgcctttttttggtgatttatggcttacaatgtccttgacgcctgcctagaagataggcaggtgtagtcrtactaagtatcttcattttatgatcttagaaattgatatgtgtctaagaatcattagaaaacagcctagaactcagattttctggtttgtagatgctctgtgatgcagacattacaagtctagtcacgattccttagatacacaacaggtaacccttgcaaaaagagaaatagcttgcactacttgtatactgtggttatccttcatgtttctacatcagcatgttccctaaacttgtagaaagtgctctctgggcttctgcgcacagaaaaaaaaggggccttgcagggcaatggaggatgtgaatgataccttgtgaggagggatatagttcatgggccagtcactcagttctgaatatagtggagaaagggccaaagatatttctttcaaaatgctgtaatttacttcaaatgttgtttactgctaatttactgctgttgttttaaagtagtgatttacagccagaaattgtacctgtggtggactttaaaaaagaataagaattataaaatttctcttgaaaccaatgtaatacataaaacaatatgttatctgacaaaagcctagaacaaagttctctagtaagaatgatgtgatagactaagaccaaatatggtatctgcataatcccagaatacttttgtaagttgttgcagtgtagtggttgggggtgtttcatgagatgctgtgattagaaatgtgatcacaaaataatttcctaagattataggaactgtaattcgaggtattaaatatattactgcattggatataatagtgaagagacaccagcatgcaagaaaagattagttgaaagacatgacaggtcttggggacactgtacttttctaggtgtgtctatgatgtggggaactttgcgcaatcacttatctttcctgctgattgcctatcattctggaattataggaaatcacttctgcaaagtgatatccttgagagcattaccttctttgaagtcttctttgtaagaactgatttgtggggtagagtatgaactctcatattttggcttcaatctttggtggtgttttcctcaagggatggcaaaagagactgagacagtgtgaaaggatgaatagctgagagaatagtgagagtgggagagagagtgaagaagaagctcatcgtggtggtggtggtaaaatggtgatcaggacagggctgaggacccagttcagcaaacttacaactttcctgagggtgcttcttgaagtaaaccaacctcgtgttgctgggtcagtattctcagtcttaaaaaagaagtatatcctgtcatttgagacaacatggataaacctagaagacattatactaagtgaaataagccagacacagaaagagaactactgcatggtcccacttatatgtgcaatctaagaaattgaatacacagaagcagagagtagaagggtaggtagcaggggtcccagagtgagagaaatggagagatgttggtcaaggggtacaaactagtagttatgaataagctctgaagaccatgcacagcatggtgactatagttaataataacttagagtatacttgacatatgctaagaaagtggaacctaagtattctcagcacacacacacagtatgtgacataatagatatattaattgattgtggcaatcatttcacaatttatatgtatatcaaaacatcacattgtatgccttgaatataaactctttctatttgtcaattatatctcaataaaagtgaaaaagaagatttcccaaaattgaaagacaatgttttagatcagctaacttttctaaccaattagactagagaagaagccaatccaagaggaggcagaattgctgatgtagtgcttaatgactgtgactaattagagaacttaattaagctgtcaagaaggaataaagataatcagtctcagtcagttcccactcttttgcacccaggagcatgagcarattcactcaggccaccacataatccttgctctctcacttgatattgatgtaacctcatatgcaccttcctgaggtgatgcaggttatacaagtaaatgacacactttgtcttttgtttcatcctgctctagcagatttattcatatcatagttgtcatataaagtacttgaacttgctattttaattatagctcttgagatcatagtgattgaaagttactgtataatgtaattttgtgggtggaggactgttgggtttgtgtttatttttctgtcgccacttaatttggaatgcccttattgttatccttaggaatgtggatattttagaaagtttgtgagtgtcctttgatggtattcaaacctgtcctttgatgcttaagaagtacagtgtttacagatacagatcaggagtggatcttggtttcacaagcctgaagcttatacaatttgagagaccctcatgaagaaaaataatgcaaaattgtgaacataaaattagatgcaaaaatgggtagtacgagcattcctgtaatccagtcctacattgggaagactaacaatgaccaattatgcatagaagtaactgcaagccagagaaatattgcctcacccaaaccaaaggaattcccaaacatattttccttaaacacatcctagtgggtccacaggcactccagttcttgaattagaacttgtataccaaccatattttattaaagctcagttaatcaactcttatgtgatataaattccatgaatgggcgacagtatgtatttcaggctgtaggtagactacccttttattttctcagaggacataaaaacgtgacattgttctttccaatactttacaagcattcttcatctccacctcaacaatataatatacatatattacatgtggcaaaagaacataagaggtgaggcaagagtacagtattatgctcatgaggaaacacattatcatcagtgtaaataaaacctgaaaatattcctccttgaccagaattcccagtcaataactaaatctatattcatgatggattayacaacagccatttacagtggcaacttatcattagggatatggaggttgttggggaaatttaagacacccctgatatcmttatkgcttttaagaacctttgaggtacatctttcatcctctgcccactgttagctctgaggtctgaaattcccaagccttactcccacaaaaataccaggaaattcttacaaagaacaaagcccatggtaagtgatatcctattcatcttttctgaagcattgtctgccttcaaaatattgtgttgattatattttgggtcatgttaagtttttattgcttagaaaattttccataactttctagcctgcaaatggcattgtctcctttccagagctgcagttttcctttttcattatcttagtctgtttggttaaaacaacacctacctatttgctttgttaattatccctttggacaggaactgtgtaaagttctgttgtgaatctctgtccatgactgctttctgtgtctatagtttgactgctctctttttactctagcctcataaaatctttgcttaatgagtttgttccaataatatgaaaactcaatgggaaattatgagaagttttaatacttgtactaatggtgacacctatggaagggataaaaaacaaacttatgttccatgtggggtgccacattttatgtggaaagttgagatgcaaagagcctatgcagctgtctcaaagatgcgtaggtaggaagcaggagaggtggaatttggacccaggatgtgctgactctaaaatatgtcatctttcattttcactatttctatttgataaaataaaaactgcaatgtcctggttaatgagtctctttataacgaagtcagctatattttatttttaattaagatttttggaggaaagttattgtataaactaagggggytggcatatatgttagatttaacattataatgacagtcatttgtaaaacattccctrtagttgctataatgtactaacaggatctcttgggaagtgttggactccctacctcacaactacttaaaagaagtattggtgaacagtttgggttactgagttggtaccattaagagagataagatctctccccaaagacrcctagaaaattgagaagtgttgtacttygattgtatagaaacaagagtaagtggtgccagatctcattcttagtgcctctcccactttgtgacattgtttctgtctcccgccattggaaatactgcatcatattgaacctggaaggaagagtggtaagaaaggaatcatatgagcattgcccttttctattagggaaccaataaggcattaatagccaagcrtttactttaaaaagtcgccattgttgaacccatattagtgtattttgggggaacttcatgctataatgaagcattaggccagagattgaagaagctcagattgacttggtggatcaatggtgtgatcctgctgtcctcattggtcacttagctttgtgtgacacaaaagcttacccttaaaggaacctataggtcacatctctgcttttgttacatttcagtacttttattctacatgtttcttcctgatgttctggggtaaatttttatatctccacattgttgacaaatttatattattggggtacagcctttttatttataaagttttttttttaataaccaggaggcactgactgatcttgaagtacctcctgaattatcattgccttcttacgtgaatatgtggaattataaaggagcgatggatactaagctgcttacttttgaaacggtaaatactaagtgtctgtaatctgcaaagatggacagaattaaggaaactggtcagtgggctcttttagagatatcgtgtaggggagggagttacttttcctaagatatatggatgacataaggtcattagggaaggttagccagagtctcattgaccatttgggaggtaatcatgacaatatagccctttctagcacaagtcatagatatacaagtcatgctcatttacatctgtggtcctcggattttgttttggcttcaaaagattaatctcaatgggaaaatgagtcaattccatcttgcaattcctttagcagaattcgtttcatactccttttctccattgcttaccaccatttattttttcatttgtttttgctcttcaaggactattatttagttcctcaaagatattgactggtagcatttccaggaaatttacagtttagaaaaggatcctcaaagagcaaaaagtgcttcagatgaaaacaaaagaatttatgctgtttgtgtgatagataatggaggaactatttttaatgctaactctatttcaagcttcttcaaatgatatgcatatagatactgactgatgggcagcctggcaaatataatctaaaattcttagtatttggttttgagtacattataaaaatgttcttcaagtctgccagaaaataagaattactagagatactcttaaaaaaattccaacttcttctatctcacctcagatcaatggaatcakatttttccagtaatgtcctgcaaatttgtatttgtatttgtatagtgttctaagattagcgtatttggaaaacactgcatcctagtgtgtaggtagccttattttctcatgcttgtactaaagttaattgtgtgaaggttgaccaaaccttaatattctaaaagatgattggttcccagaaaacagaatactatgataaagtaattatattaccattacaaagcagtattacaaagttcttcatgttttaggggatggtatagctctagcttttgtatgtgttatagactaaatttctatacctgctctttaatgttatttttctttacaactgaaacacatagtcagtgtaagtacaatgaacatactttgaggtaaatggtttggcactttaggtgagccaaatgagtactattattgcttcagctgtattacatttagaatttacgaaacttacatttaggactaatataaacatttattttttgttttttgttttcattcagcagaatcaataaaacttaaaaaaaagagaaaggatttgtaaactttgtttgtttctttgtttgtttgtttttgtagtaaaacttgttggctggcaggatgtaccattatgtaaaaacttaccatttagttgttagcatcttccccctcctcctttctcctcatcctcttaatagagatgccctaagcatattttagaacctttgatggggcagtttgggacaatgccacagactggaagaatgggatctgttagcataagaaatacaaatrtttatgataatgctgtctttmttgatcaccatgtgctctctgctgtggtgttttgcactgtgagacttggggaaatattatttggattagaataatttctatttgtgaagcccatttcgttctaggcctaagaagggacagcctagtgaagcccatggaatagacagtaaggcattggccgcttagtgcttttaatgagagaragagagagagagagagagagagagagagagagagtgatgagtgggtgtgaagattcttctgtgttatcccaccttgatcatctgtactgagtaggaagaggcagtgctttgcagtcagaattttctcggagttaaaaataattgactttttggctggtaccacagataaggtagaggacctagcagggaaagaaaactcaatgcttgtaactaggtaaggtggtttctttatctgaaaaatagactctcaacgacccctccaaacaaaatcccatttaaaaatttgtaggttaggccaggcgtggtggctcacgcctgtaatcccagcactttgggaggctgaggtgggcgggtcacctgaggtcaggagtttgagaccagcctggccaacatggtgaaactgcatctctactaaaactacaaaaattagctggctgtagtggggcatgcctgtagtcccagctatttgggtggctgaggcaggagaatcacttgaacccctgaggcagaggttgcagtgagcygagatggtgccactgcactccagcctgggagagagagtgagactccatctcaaaaaaaaaaaaattgtaggatagactacaatgtgtataacttcactcctcttgtataaagatgtgtgggcygagtgcagtggctcacgcctgtaatcccwacactttgggaggctgaggtggacagatcatgaggtcaaaagatcaagaccatctcaggtcatgaggtcaaaagatcgagaccatctcctgatygaggcaggagaatcgcttgaacctggaaggcggaggttgcagtgagccgagattgcaccactgcactccagcctcggtgacagggtgagactccgtcmccaaaaaaaaaaaagaaaaaagaaaaaagaaaaaagatgtgtaaggaaattagatagcatttcttggcttattagctgttaaaatgtccaagggaaaatagatcaattgaaatatcttttggtggctactaacttccctttccatagataagacatagagtacaattgtgaagacatttaaggttaggtgtaagagaattcatattaaattttaaggctgttgaattgggagaaaatttagttcacgtcttcatttttcagagacagactgagaactagaggaataataaatcacccaggtaatgagatctcattcctgccagggcagaatctccactatgattttggctttgtggcattgcttgtatctctgtctttattttattggttaatttgtatctgtaaatattttatcttcccatattgtaaggttcttgaaaacagaaactgtstcttatatttctttgtaactgttccaagagttcaataaataaatatttgttgttgtgggggctgatttgtgggactccccaacctctgcaaataatgtgatttgtgctgtcaccatggcaaataaagaatmatttgtgctacgtatgtaagtaatccaaacaaaactttgcataaatattttaagaaactgaaatatcagaatagatgagccattgaataaaaatcaacatcaatcacaacctacctcattttaaataagctacaaatcgaagtaaataatttgatgcgagtggtcatttctgctttcaatctgagaggaagtcagtaaattccttttgctgttacaaaagtagtttaaattccatgcaggacacgagtctgggcaatcacatcascctcagcgtaccaaagagcctagagagacagcagaacaatgtctcccactcgagctacagagggaaggtggtcttaggttttgctgcagtaactggaagcttaaatttaattttcagtcagagcctgctgtttaagctccctgtctgttctgcaatctaagctgaatgggtactttttttttcttttctaatattcttaagtcatttggagaaatctaatacttatattttcaaattacatcaccttagctaaagatatattttcctctctataaaattcagttgcaaaaagaaaaagtagaccgaacgctcaagaaagggagagcaggaggcctagaatatgtaaattgtttgatatttgacaaatcagttactgtgtgtggtgtgatatgcaaattrggaataatgctttcctcttatctgcattgcagattcttcagggcatgttctacatgcattctgcatgcactatgtgcaacacagcakaaaagtttagtgcaagaaatccgggcaatggaaatcagaggaaggaaatgtatattagctttatatctttatgtgaaatttgtgcatgcctagccacagtcaatgaattggtgagatcagcatctactaacttacaaatggatactgcattaaataatamatttaaagataagttatgaataatacatccctcagttctgaacacatttagggatttctaaatgtgaaacacagcatatgctaagactaatgcttagaataacataggctaatacaaaatgtgtgtgtatatattactatatttgtaatatatataaaacacatgcacatacctacatttaatctttgacctttgttctatttgtgctactacacagaatctgtgcagtagtaatttttgtgtatagactgaggccgaataggcagttttctatgtagagaatttgtacttgtcagggactgttttcttcctaaaattctacccctgaaaattcaggtgtgttggttcaatggttgttttagttttgttgtttattttcccttttttgttcaagttaaacacaaagcaaccttgtgaaataaacccttgaagttttatcatctcaaccttggtggaattaattatcagtaaactgggtgagtaaatttttgtagtaggaaatatgtatattcttagagtcaaggatatatttagattatagaataattatactgatagttgtatgtggcttagaaattcagtttacattttgtatgtagttcataaataactgcttattggataatgggatttgaaatttaatgctttttccctgacattggggttctgttgagccttcatcattggttgaattggttgattaataatagacctcttaccttatcaggcacggtctacatgatcaatatggaaataactgaccctgcctcctgtttctaccatcatcatcttttcttgtcctcttttcctctaaatgatgctgtctcacttagtatactaacattatcctgcatggaataattactgatcttgttccatagaccacaagttataaatgtcatttttttctaactggtgtttttaagataagaagagtacaaaaaaaaaaaaccagttatcatcataaatttttgctataaaataactatgttaaaagaaaataaaattaaggaataactaagaataactaaggaataactaagtataaaattaaggaatgactagttgtatgagtgaaacttcagcaggataataaagttttataaaaaggaggagaacagctttagaacatgtgatgagctgggaacggtgagacatcatgttactattatgttatgagatataatacttggaaattaatattttcagttattgtcattttggcattttctgttgtctacctcactttgctcattttatcatgtacctgtttttgaactttgatcctggaaatttactgtgagagctatgtagtgcgtcatagggttttctgcagctctcaaaataaaaagtatcccaattttcaaaggaataagtgattttcattctttgagtgttgtgataatgtatataatagtccttaaggtattttgatatttttcccattagtaacttgcagtatattagtgagctgtgcaatatttcctgtattcctattttgcatatattattgcttttgtacctsacagtgaatgaaaatcatcattctttatgttaggtctgagaacagtaagaggtttccttggtgttgatcatcatgtaaggaatttatctatgtactggctttgttttctcaagaacattattaataaagccatgcaaaatcacagactggcttttaaatacgtttaacaatattccttgatatgctagaaagtgggcagaattttcttcctcgtttatataaatgatttttcatgagtagggtcttccaggttaatcctactgttatttttgtttgtacctcatgaacatggcaggggatgaacagaggtaggaaagggaggaagaccgtgaagggaagatgtttctttttacaaaataaattattttattttttgttctagactatttagagaggtggtcacttctgatagcaaatttctaagtttttcattcttagaaagaacacatggtactgttcttgacaatttaatattccccttgctcaatctcactttcccacttcagaaagcttatctgctaatccaagattatcttttaacacccagtaggtgttagggccacttttgttttgtttttttgtttttaggatgacattgaactaagagcaggaaaactggttgaaacttttatttttagaagggtatgttaccatggaataaggaataaggggaaagccacctgttaatgctagaaaatgaaatcttaatttaatttaatttaatgtaatagcttttacactaattattttagtatgtgaaagctgatgggtatttatttcataaatatatgtgaatttatttcataaatatatagtagcaacttgctgaatctttgacaccatttattgcctatacgagagcctgaaacgatgaaggtaaaggtagaagaactggatttggtagataagtggtcagacaagaagcacacatgtttctgcctcttttctccttgtgacaggctggtttaaatataatgmagtaacactcttactttccctccgactcctttccttaatgtttttctttcacacttagcactatcctttcattgttctctcttgtttttgatctttccttctggagttaacattatttaacagacacagtctcctcctaggggcacagggaatttctggaaagaagaggagcatatttgtctttaatctcactagtcaatacctttcccagtaagcattctttattggcattttacacatctagagactccaccactcccataaggctccagaaaaaatgttaaaacaatttcagcaggaaggattgaagcattgtactagagattctatatattgggatgggagaagataagtgtactgtctgagtactgtcttcattgtcctctgtctaaactcatctctggataagcagaagcaaggaatcagatacaggcagtgctcctggaccctgaatatatgttccaaacatattgcaaacattagactattycttttctaccctctgtaccctctttctaaattggtaattatttcttctttacctactamtgtacctcttcttctttaagtcatcaatgtaaaaggaaggcagtgcccaarttttctttggacccttaattcctatctactcacccaaaaagtcctgttgaaagcttcgattatgggccatgcattcagggcaagatatcctgccaggctctgagtccctgcttttatttattcagaactagattttagagagaaggataatggtaacaaaatgctgagtcaatacatttatcttctcctgtgccaatgtatagtatccctagtaccatgcttccaatcttttctgctgaaattacatttttttttcctgaagtcttattacggtggtgaagatcatagattataaaatgtcaataattgattctgagaaaaaggtattgaccagtgggatgaaagacggatagattccttttctttccaggaatcctcttgttcttctaggaagatatcgtggcaatgtctgttagcttgcagttaattgaggtcagcctggattagaagttctatgtgttgagaatccctgtttcagttactctggtagagataactgagtgatcaaaagctgttygctcacatctgtgctcatatgctgaaacttgaaacctggcatatttgatttatggtagcaacgtggccctgagataagaattgtataaacataaggtaaattaaggagaaaatagggcagatgataggctaataagatgacacggggtctttaaattgaaaccccattaactatgttataattctacattctaatatgaaatggataatagaggtagttatgtggataaccgagtccagactgccttttctgggattagccctgtgaatatttaagcttagctattgtatttcataaggcagtctgaaatttgttgtatttctttttcacttttattttatgtaatgatacactaccattacagaaattcaatggatcaaacatgatgtggttatacttaagagagaaaaaaagaaatctgacctactcgagaagttcttgtgcatttttcttccagtaaatctttttacagcttattatttgggggaccaggttaaaggaaaagtcactgtgttaggagtcaggaaggcttcactggagctgccactaactagcaatgtggtatagagtaattcattgaaactttctccagttcggtttctcctctttaaaaaaaacagaggggggccttggctggtctcggatgtcggtcccccgctatccccgcctgggggccgccccatcccgcgccaggactagggtccagtgcggagtgcccctagtcctgggaaacggggtctggccgcaaaggcagctgcccccttgcccgtcacgcaatggaagttcgtggggaacctggcgctaaaccattcgtagactatctgcttctgggtcggggtttcctacgtagcagaacagttccctcgccgcgatctattgaaagtcagccctcgcaacacaagggtttgtaaaacaacaacaacaacaacaaacaacaacaacaaaaaaaccaacaaaaataaaatgaataaattttttttaaaaaatggaggtatttggtgacctccagggtttctgccaatttcaatctcctgtggttctttaaagtatatcatggactccttgggaacaaagatggtttcttatctgtgtttatactctactgtcacaaaacaggtatttaataaatgttggtagagtaatctcaagaactaagaataccactacaagtctgggaaagaaatacaaaacattttgtattttgttgtatgcttcagcatttactgtatgtaagcattaactaggtagcatcacgtatctggtagtctttaatatgtatttatttctttcatatttggcatctataaacttgttcaaaagctatgctattgggaacctggggggattaacatttattgagcgtctcctagatgtggtcagcattaggcaaggttttaaatatcaaatcttatttacttttcacagcttctggttatccccgtttttcccagggggaaatagaggcgctaagaaggtaagaaacttatctgaggtcataaagctagaaagtggcagagctgaggttacttagatttggattcagttttttcttggctccaaagaccatgatctttccactgtgctaggctgaatcatgctttttgctgagcaaaatatctattatgttactttatccttataacatccctaagagttcttttaaaaaaaggtgcaagtcattaaaaacaaaagttatcttagcttttgtrttcatttcacaaacttaatataacatgagctgtgtcaatcagaataagacaaatcctgtctctgagacagagggatagctatcacttcttataatgagcactcacagagattagctcaatggggaatctgggaaactttccagatagcatcaaaagtgatctttctaacattgcatttaaattttagacaatccattttgactccctttgtcctcttcttaaaagcaagtttttattaatttttgacaagttaatgctactctctatttccatattatagtgccaggtaattttaaaatcctatgagaaataaactttaaacgttttggaaatatccccttccccctcgttaaattgttaaataataaattatttggattaggctataatcaattggatttctgatctccttgaaaatgaattttgcctactatgttgcagccatattttttctttaatattacatgttctcacttataagtgagagctagccatggggtacatgtgaacataaaaatgggaacaatagacactggcgactagttggggggaaagagggaggagggaagggctgaaaaactacctatttggtactatgtttactacctgggtgatgggatcatttgtgtccccaaacctcagcatcacacagtgtatcaatgtaacaaacctgtccatgtaccccctgaatctaaaatagaggttgaaatttttgaaagtttttttaaagagattatttttgcattaaaattctccaattgtcagattgcctacagaacagaatgttgggcatatagaagtaaacagaaaaaaaagtagtcctcactgtatcataattatcctgtgctattgagttgctgtgcataaaacctaatcagattgactgaaactgtcaaagaacaaagcacaaataccaatgatagatgaaaagacatataaagatggatgattcctttttaggagcagtgggagattaaagggtaggcattactgcaagaattggtgttaactgttctttaaaaaaaaatcattgttaatgatctggcagactgaacgatcagcacatcaatgactgaggaaagatgtgagattcagagtgttacagcatcacattaggcagagaaatcattgaaataaaccctatactagaagaaattggaagagctaaatgacatgcagcttaggaggaaaacctactccctcagaaaatatttttttagatcatttctttctgtggaacaaataaagggtttcagtagcatgttttggctaattgagcagaccactattattgctgtggttctgtaatcattttgctagagaacataggagaataaatctctagtgatcagagaatatatgaatgatgtagaaccctcaggccattttcataccattcatcatctgtgggatgttgccatatctggtgttcttggcacacttcaagtatgtgagctatagggagaaaagttggaartggacccagatcttattgcacagaaaaaaaaaaaaaaaaagaaagaaagtgagccttgaggcatgaaatctcccaagagctagccctcacacctgcaggtaatttatatctgtatttcctgacttgcttcctcctatttaacactacttcttccactttgcttttgtactattccaccggttgctgattcctcaggtatggagacctagctgctcagttttcacttatttggctcctcttttatagcgttcgaatatattcaaatttgttacaggaaatatagttaaaccctctggtctattgccctttaactacctcctattcctcacatttccattggaactaaattaactctcgttgactatctaatcattgacaactgacaccatggacttctttgttctgaatccagcaaacattttcagtcctactcttccttctttttctatgacaatcaaacttgctgaccacctcttttttttcctctaatagtttccccactcttacctttcctcaccctacttgacttttcctccgttccttctcttccatgacttcctttctcctcctagcttctgacagtactgtgttttcatcaagcccttttcttaccttatatgttcttgcccacactatttgatccactgccacactctatgtcttatacatatatgactccaaatctctctcctgagctccagatctaaaaatctacatgcttagaagacatggaaaactcaaataatgtgatactcttgttatttcccaatgatataattattcaactgcttatccaaaccagaaacttgggagtcaaatcatgttttttattcatgtctcacatccaactgatagtcagctctgtctgtcctgcctctcaaatgtcattcctctatgattctctatcacagagatgcccatttgggttcaggcttccattgctcatcccctgcactattgaaattaccctcaaattagccctctaacatccaggtttgttctttttaatgtatacataaaacacattttagaatttctgtccaaaaatcctcttctttcatagttttctcctgtttattaaaaagtctaaattctgaatttaccacataggcctttttttgtctctcagcctcagctctgctcacgtctcctatcccttcacacgtactttaaggttacttcaattttatcaaactactatatatgcccaatgtgtccttctgtttcaacctcacaaactttttgataccccagtacaattgcttttatgaatgtgatcccaatcccacagggggagaatgaatcattacagccttatttcctatcttaacctgaatacaatatatcagctacagcactttattgtcattctttccttactgaattctaagcaaaactggaggatagaatattatcttatttatctatgagtcatcaaggcctagctcatggtaagaactcaattttattgagttgaatgaaagaattgatgaatgtattaatagacacatgccaattttaatgctttagaggtatgaggtagccaaaaacatgagtttgaaaatgacaatacagctggaatttaatttccattgcttttatgagccagtcaattactatacttgttttccaaactgcgtctgaaaactatttcatgaaaggagaaaaagaggactggaagaaagctttaggaatataagaattgatggtgattacctttccaatatcttttctggtgatatttgcaacataggtatacagttaatactaatgaatgtttagatcacttttggcattcactaagtaacctctattatttatagtaacaaaacaggtatcacgaaggccccttgggcagcttggggagccttaactctccataaggctggaagcatagttcaacattcaagcactagttggttcacattctaacactagctcatcacatctcagaaaatctattctgacaagtttgattttcttcagtactatttgctctggmagaacatgatcaggaaccatttttggctgaattccctagttctcagtgagacaactgacataccttggcatctctatggaccaaataacactaatcttattatcagtacaattctaagtgttttctttgtgtgtgtaaaaagatctgctttttctcctactgtaatatttctaaatctaaaaaaaagtataaaatgcttatatcaccttattagtggcataaatgtttgccacttaaaaaggattgcaagctccttgaagggtcagtcaaggtcttttttatctttgtctctttggtgtatgtcatagttgttcaatgaaagtttgctaggttgaactgatgtgtgcttataatttaacatcatgtggtataattttaaaaataccacagagaatggattctgcttttacgctgatatttcaggatgcattttttcctgacatcttggttaacctttttattactgcatctagtgaagattctcaggggttttaatttgcatcaccatcagtgtcatcatcttaataatgtcaccattgtatactgtttaaaaaatatagacacatattttctctaatccatctagaaaaaaattccatcttatattttcagaagaatccataagaactaagggagagtgggtaagagagagtaaatgtcaccatggggtagaagcagtgtgctggctcatcattttcatggcactctcaaatccaatttgtgatgacaaattggatactttgcatccaaattgtttgacctttgtgcagtggctcccattatcaactggggaaccagtacaatctttacctagttactactgaggttgttctctctccatcacaaaatttcatgctatttatctgtgagaaaatgcctgaggactttcacacagtaattcatcttatctggaacccttaggatcasatgtagaccgagcaaatgtcaagttcacagagaacacctgtgtcttcagaacattaaagggcaccattagagcttgtttcccttcacttaacatgcacatttttggcataagttggggctgaatgatgttgtcatagcaaatactgctagaatgattgctgtactcattacactaccaaaaaaaagagagagatgaatgggtgtggagtgtcactaaccctcctcatgatcagcacatggagaggacaggacagggtgacattcctgaggaactggtaacccccagacagctaatatgctttatgacagattggtgggttggctatctccaaaacttctaagacatagaaattcagattgaggtcataggtattcagattaatctgtaackgtcttggaagattattatataacatagcaatcaataattatcttttaaacaaagcagtgctgatttctgaagcagtggactaagcaagtagatctaaacaatctacttgcttgtttcgattttgcaggtgcatttttgggatggttcttaatcctgatttacttaactgtttacataatgctggtgttctgtcatgatttttaatttttctggtccctttactaattttcacctctaacctctagatattagttctctatgatgctgagctagttatctaataattattttttaaacaaaaaaagtatcaacaactctcctaataaattattatgcatcacccataggtaaatagaggcataatttaaaaattattatatacttggattaattgacaacatatgcttcatttgaatttctgaacattcgaatgtacttgtaagagcaggcttttctaatactaggctttttctgctgcacagggaaatgtttgtctccagaaaaaacttcttagaataaataacttattttagcatttatgttaactggaaatataatttcataaggtataatattcaggatttctaacagctgctacagttctatacatctgctacacttggtataacctgtaattttcctcgagttacagtttgtgaagttgtaattttggttataatgttaagtatggtaacagtatagcttatggtttcatagtaatctcagtgtgaggcatttgttcatgtattattatagagcaaatgacaggtagaaactgtaaaaataaaggagaacatatctgctgatatagcaacctcaagtcctttctaacacgaattttctactgtttggattccaattcttgattatgcctgaaaaattaatatctatcatgaatcttctcaaaagactattttttayatatgctacaagttatctggattttatagttaatttgttcctttctactaaatttgtatgtattattataacataatatataaagacatattgatgttttcattttatgcatttacttttaaagattttaagtatcagacaatataaagagagacatttaaaaaatatctcatattgaactcctggttctgccaatgacctgactaatgattttggacwgttaaccctgttaattgtttcaccttaggaattgataggaaaattttgtaagcaattcttggttgacaagtacttggttgaaagaccagataacaaaaatatactagctgctattatgcacatttaatgtattcttcaaagcattgagcttccactgattttataatccattgaaatttccatgatatcagaatatatatcaacctcattttcataaatgagttgtccttttcctgagctcacacagtagcctaggattttctaattaatggacatatattttcatcttcttatagtacgtatttttgtttctttgtagcactgctatttctttcctcataaatgatattaattgacatatagtgacttaagtaaactaaaatattaaaagcacattgaagtgactacatttgaaggactgaaggaaataattttacaatgcatttttattttaggaggacagatttttttagaatggctaatcaacaacaacaataaaataatacaatatattttawattcaggaggattatccaactgaatttcagataatctttataaatataataacttgctctgaaatgcttgctctacaatactcatataaacagtactattaaatcgaaataaataatcacatcaagtttgccactacaggtggacacagtcaacaatattattagatgtaaaatctctcgtctcctatggcttacatgaatttttttctgtttattcatgttaatccccttaatgaacaattatttctctgcctcctgtttgaatgttggtattcctgggtttctgtcctggaccttcttttaaatctatcaacctctctgggtttccataatatcaactgtcagctaatcataatttaccaatacatctcaaattgtcctaagctgaactcactgactgtaactaccatccatgtatttgttcaagttaaaaattgggagttattcttgattcctcctcctctcacaccacctacacctatttagtcataaagtcctgtcaatactccattctaaaaatggattgtaactttctacttagttcctcaccctctgttagtgtcttagttcaggttttcatcatttttcacagctttctaattcatctccttgcatccagtcatacttcattcaaatctcttctacatgtgaatctacctgaaatgcagatatgatgatcactcctctacctaaacatcttatatagtttcccttacctaaaagctaaagaaaagaaattttaataattaatacttatctctgccacttgagagacatttctttgaggtttggaattatgttttttttttcttttttcttttttttttttagatttccattgttgccacatagtgttgccacatagtaactgctgaatatgattttgctgagtacatgaaagaagagaaaggatggcattaaactaaatgattaaatatctctaaagtaacattttttgctgatgcttactgacacattacttacaagtaaacatcatttaaaaattacctattactattagttgagatgtgtgaacatctctctacttgtttaatgagtcaaatgtaaagtccttataataaactccaagatcctcacccagtcaaatgcctctcttccttgctcacttcactccaaccatttggtctccaggtagccccggaacacccaaggtctctgtacttaatgactagatcgcctgcatctcaaatagatgaatgagtcactccctttgggttgtcaaccaagtatcatttcctcctatttaaaacaactaccctttccttcctcttttatgcattattattttttttcacaatttttatccaatgttttatatattttgcttttatcctactttaatattcatttcccagagttagaattatatgtgttktgagggaagaaacttttgtctctgctcactgttgtatctctagaattgaaaaaagataatatttattgcataaataaacaaatgaatgggcacagcctcgatatttatcctttaaaaagtatactcttaaaaataaaacccctggccaggtgcagtggctcccagtactttgggagtccagggtgaaatgatcacttgagcttaagattttgatactagcctgggcaacatggagaccttgtctctaccaaaaatttttttaaaaagctgccaccacgcccggctaagttttgtatttttagtagagacggggtttcaccatgttggccaggctgatctcaaactcctgacctcatgatttgcccgcctcagccttccaaagtgctggggttacaggtgtcgctacttgggagtctgaggcaggagaattgcttgaaactgaagggagagattgcagtgagccgagatcgcgccactgcactccagcctgggcaacaagagcaaaactctgtctcaaaaaaaaaaagctgggtgtggtggaggatctcttgagcccaggaggttgaggttgcagtgagccatggtcatgccactgtactccagcctgagtaatagagagatactctgtctcaaaataagataaaataaaataaaataaatccccaaattatgtaaaacaattataattgagactatctctactaaggtctaatatctctaatagaaataaggtcatgcctaaagaggttagaagatgcaaattcagtagccatactgttaacataattgctctaattctgtatccatgttttattaaagcattgtttttgtcaaaaaagaaaagcaagaaaagttgtctagttctagttttcagaaaggagaaagtgaaagcataacttgaattaaaattctaatgttggctactaaatagggaatatagaataatgtactggacagtttctttgtaaaatgcagacgcatgcttcagctayggattttttttaaagcaaatgttgataaaagctataagaataacattaaagctcaatacagtgaaagcatttctgtgatgtactcagctgatgtggttcaggtctattgcctaatttgattgaaagattgaattttgagtactgagggaggtgaactgatagcatttcttgggctttttaaattttccttatatttctgcttctcttgtcaaagcttctgatagggtttttggaattgtgtgtcaaaaagttctccgagttagaatttactgattcacattaaaaaacaagtaaactttctcctatattctttactttctccctgatccccaacttcaaaattaaaaaaaaataccaacatctacaagagcaacaacttcaaaggaacttaactttaaataacgcatataaatataaagtcattccaaactccttagcttcagttttggtcccttctgaatcattctcaacattatattttgacaacagtaaatatgatgatgttatatgcaattcttaagaaatctagtgacttgcagcatatttttaaatcatagttttacttaatttgactatatatatagatactctatatgcagagcactatgctatacatatctatatattcatatgggtaaggaacttgtacttggtatcagcaaggaataggacagtctagcagaggtaatatgcacagataattcaatacaggtgaatattagattgggctatgcggagctatcagtattcataaaatacagtgagcacttctaactggtgacctcaataagggcttcttgaaataagtgayttctgaacggggccttccaagagttcctagtatagacataggtgggcatatttcaggcagtaagaaggccagaagaaatagcattgccaagagatatgtcaacatgatcaaatggtaagcagggaactgcaaatagatatattttattagactggagtgcatctgaagcaaatggtaggaggcaagactgatatggtaggttgggggtcaaattgtaaacagtatttaatattacatgaaagagatttacttattatacagccactagagagtcagtttttgcatctgagtaggagggtggtgatgtggttaaataagttcgtttgagaaagattaggtgtaaggagaacagaacacacggccattcttgtaatttatttgtaggttattagtaaagacctgaatttggatgatggcattgaaggagtggaaaggataatataaatgtgttaatggagggtaggagattgaaatgatgacaatacccaggaaccagaaagggagagcctaagacactagagagtataggcactggacactagaagatgtgatagatcataaaccaacatagaagtattgcaagaaggaatatcagcttcttgagggcaaccagaacattttattgggcattgtatcctcatcacttacaagtgtgaggcacataaaaggcacttgatttgtgcttgttgaatgactgaataaatkattgcttggcaaatgattgcttggcaaatgattacacagaataagctccagtgtggttaaagaaagtgatcccggttgccctggcaaccaggcaaaggatagtacaggatggtaaaggataggaaactagtccattggcactagttaggtaattaaaagcactggtttggctgcagttctaacaatgtgtcagcttatttttccttttaagaagcagtataggccgggcgcggtggctcacgcctgtagtctcagcacgttggaaggccgaggcaggcggatctcttgaggtaaggcatttgagaccagsctggccaacatggggaaacctggtctctattaaaaatacaaaaattagctaggtgtggtagcgcaagcctgtaatcccagctattagggaggctgagtgaggcagaattgcttgaacccgggaggcagaggttgcggtgagctgagatcgcaccactgcactccagcctgggcgacagagtgagacttcgtccaaaaaaaacaaaaagaaacactatacagtaaaagttacttatgcagattctagaagtgggctacttgggtttgaatctgagttccaccatttaggatctgtctgtacctcagtattcttctctttaaaatggggaaaataatagtactaacttcatagggttgttgtgaggattaaatgagttacaatatgtagttagaacagtgctcggcacatattaggcactatgtgtgttataagtagtagaagtgaactatgtctactgcactcaacttttatttacatcgtgtattggtacagtatacagtaatggttttcaggtgaattttttctgaccaagtattgatacatagataataatctgatttggggaactcttcaaaaatttcctcaaaaattgatgggagagaagcatcgagatttgtgttgcataactgtgctatgagccacagtttgatggaagatgtgcacatgtggaaatatggttaagacctgagatataatgcttttgaatgctggaaagcaccctcacataacactttgcctcagagagaaagccttatacaaatagaacttgatttcaaaatagctcaaaattcaagaggacttgaagatcatatatttgaaagcaatratctctaaaattaaaatcagtcggtttccttcaatttatttttgttaaaatagttcttttaagaatttcgagtttccaaaatcctcctggaaaaaaatagctgttatctttgttcctttaggcattggtaaaagtactgtaaaataattcaagtaaaaatgaaggtgctttatttagttcaaaggaatttcaaaagccagccattctgaatcacttcagattccatggtgtgctgaaaattaaatagaaaatgtcattatgcagtaccaaaaccttagttgttttaatatacagctgaaaagcttgtatgttagtaactgagagccaaggattcagtgtggtctgataggggagctaattgaactgagaacacataaaaaaaggaaaattgcttttgttgacatcaaagacattttattatttggcttcttttacacaggatattatataatgaagctagaagccttaaacatgatacagattcaatttgaataatgttctgttaactacctttgaatttcaagtgaaaaattgtaactgtagaaattacatcaataacatctgtctgatgcttaatacctggcagtatgtgaggcaaacataaaagaaatctgtagagagtatttttacctgatttgtgatatcttctcattaactatagcagkacctccacaaatcccacccatattctttttttcctcctcttaaattttgtaaaacaaactcatactttggaaatcaacccgttaaatatgattttattggaggcgaaatgggctattgaggaaagtaggcaaatttactttacttgatttctttctaaggatagttttcatatgtcagttacctctgcataggtaacccttgttctggaaacaaacaaaaaaaaagcaatgaagcacaatataaaaaatgtcagttctggagtcaaagtagaggacttaaatcttggctgataaccagttgctagttgtgtgtccatgggcaagttgtatattttttctaggcctcaggttctcacatataaagtggaaacaaaccttgtgggaaaatggtgaagatttcatgagctaaaatatgaaatgtacatgacctacctcattttactggaaaagaaggcagacaaattatgcatggccataaaccattttatatacaccgtgtttttgttagaactcagatttctagaattctgagattaaaaagtaattgctaaagttattgttactattgataaagactggaattagaatgccattattgcatggggataagcatgttttgtgkcccaataaaagaggctgctcaaaatgacctctgatctgtccttcttgattcaggattttatgatcttgtgacattgcagaactctaagaacagagtaattcacactcatttcttagatctttaacacaagaattacattatctttgagcggaaactaaggtcctagtctactcaaagtgcgtatttcaatttgttaattctgacagttttgttaccaggttgatgggcgtatttcaaacctccaacacttaagttctaataacctgacttctgcaaaagtgctgttacattatgtcctcttaaaggtcctaagtagtccctgtcagtcttttagtgacattacttggcagtattcctttttaattatcaggaaaatgataaattttcttgaaaatctttgaagtgagctcatgttaattcaatacattagtgataagcacaatgtatagtagaaagggataatgtagccagaagtgaagacgaagaatgatattcttagatctgacactgattttttctatcatctgcaaaccacttgacttcttgcattttttcccttctctgttactgaaaaatttaaaacctgtgaatttctacctcatttgatgttgaacagttttactaggaaaggacctagacaaatgtattgttatatatagacatatatatcaatttatataaatcagagggttttatttatacctggaataatacaactttattaagtaaaggttacttttgaagtcatctagtttaaactctttacaaacatgtgaaaacagaagtcaagtatgacggggtaaaatgtgtgttcagaggctgtgtgtgacacagctaagttatttatttatttatttatttttttgagacggagtttcgctmttgttgcccaggctggagtgcagcgatgcaatctcggctcactgcaacctccacctctcgggttcaagcaattctccttcctcaaccacctgagtagctgggattacagactcccgccaccacacctggctaatttttgtatttttagtagagacggggtttcaccatgttggtaaggatgatctcaaactcctgacctcgtgatctgcccacctcggcctcccaaagtgctgggatcacaggcgtgagccaccgcatctgaccggtacttttctgatattctggattaaattatctcttctacctcagcttcattatctctatggagaaataataatggtgataaacaaatatattgatctacataatatcttcatgaaaatatgcaaaatcagatatttatcttcataaaaatatataaaattattatatacaatatgtaaaatcactcctttggggcacttcagtattaatttatgtatttatatattttttgtgtgggtgtgaatatattatatacacataatgtataaatatagttcaagattaattccttaattcacaacagggcctaaatttttaactggtgagctatttaaatatttcattaattttataattaagagggtttttaaaagtgcttcaaaagtttataaattaaatgatagcatatgcagattgctttagaactcgacttcaaatgtttcttaactttaaacattgtttaacagagcaccattatgtagagcagaatgctttaaagtgaagctgctaagtgtaaaaatgcaataaatgaatgtctgacttcccttgtaaaccatccaactggtgctttagcacaagcttatttgttattaatttagctaaactttgaaaacagattattttgatgattaaaatacaccttctatatgattattacaagattgttttttagaaaaaaattaattttatttacctatcaaagtgtttgaaatacagggcacaaatatcttaatgcatttatgaaggatttggaatatgtttggataggtcagtgttgtctgacagaactttggccagccatggggctgttctatatctggattgtccagtgcagtgtccagtagccacacgtgtctatttagaatggtttttagtgtcattgaggaaccgtgcttttaattttaattaaagttaaataggtacatgaggttagtggctaccctattggacatcacaggtattgattggtttttgatatagaatcacagagttaaaagttaatttgtaaaaatatcttttgttttacgctttagtagagccacacttaagtcttttgggaaaattaaaatttatttttaaaggcaatgagaaaaagccatcccaaacctctcttttgtaacctacgtaagttttaaataatacaatgttaaaactcacttgtgacattcaaaatcttaagtgctatagcttaaataatgtttgtgtttgtgtatacttgactcaagtagatgagtacccaccggttatcatgcttttcctaagacagtaactaaaccaaccctcaaccatgcccaaatgccaactgctttaacctctctttataggtcttccccatttatcaatcaacctgctctgaaccagctccaaaatatccatgaccctatttgcttacaaatttgcttaatatcctccaaatggatttgggatttgttttaattgtttagttgaaacttcttatttcaactgtaaattcatgttttatttaagaatatttggtacattagtgaaccttttcaaatagctgctaatatttagcttatggagtaatggcctggatagaagtcatcagctaataaaagaggtgattatgctgaacagtagagagacataaagaaagatcagcaaagcacaccttttgaactcaccgtagtgtgctcttacatccacatatactcctgggctagtctgatgttattaatggaaagcacagagaaaacacttagtggggagttgcgatatgattgctgttgatttttgaggcactctaatttctaagtatgtggtacaataaaaagttgagttttgccttatgcttgcaccaaaatgttaaaatgactcattaattttgatattttaatactaaactactaatagtctactcagggatttcctatcttcctaatgtaattacttgtagaatgcttgggaggaaacctcaaaaatgctaaaatgacttcactagcctgcttccatttttcctagaagaccttaatcgttttagattttaaatgttctaaatagtttgctaaatattaagggaaaataaactccaagaactttttttttttttttttaagtagaactagcttgttgtatcagttatctctgacttccttctyggcctggaaaattctcattgcacatgctgtttgacataactacattctattttcaaaatgtctgctcgatttcattgactatttgcctaaagtctttacttcctagtttgccagatgccatccactctcaagtactaccttctagatttttttttttaataaagactgattgtcaaaccctaaattttttggttgagaaatgttaaatactggaagtcatgcaagctgtggatgataggtactctccaaatctattctgtagcttctgagtcaatccataaaattgttgccataaagacaaaatttaatttatctgcctgtgccattacattaaataacaaaacaaaataacaacaacaacaaacaaacaatgacaaaccacaaaactgaagaaataagagtggatgggaaactccagtgaaaagaaaaggttgggctccatataaagttgtccaaygcagtgcagcatacactcatcagtagagaaaagcaaaatgtctcaggatcagaagaataaacgaatatagcagtgtgaccttggatagttccctctgaacttcagctggtctttttcacatatgaaatacagttaataccagctaccttacttgcttcacagggttgttatgagggtcaagtgagaaaacagatggagattttataaacaaaaaagtactatacaaatataaagtgatatcatcatcattatgacattaagagcttatcattcagaagcaaacagcaaatatctatcagtgtaaattttaaagttttaaaaggaaaaaacgaatatactctttgtaggtactctggtggacatattatatgtcctaggcaatctcagaaatacctatggacaattatatgaaaatgtcagccgggcacggtggctcatgcctgtaatcccagcactttgggaggccagtggatgacaaggtcaagagattgagaccatcctggccaacatggtgaaaccctgtctctactaaaaatacaaaaaagttagctgggcatggtggcgcacatgtttagtctcagctactcggaaggctgaggcaggagaatcacttgaacccaggaagcagaggttgcagtgagccgagatcacaccactgcactccagcctgggtgacagagcgagactgtgtatcaaaaaaaaaaaaaaaaagtcatgaaagaaaaaaaaggcaagtcattatcattgacagaaatataggtatttaatattttctgagtcattaaagtaatccaggaataccaattttagaagaatgtcagttgaatgtcagatgtaaaactttcagtgagttccacgaggggaattaaaaagatctaggtgactcattcagctctatcttccttttcctcctctcatccttcctttcctcatctctcctccttttgttttcttcctttacttcctacgctcctttccctcttctgtcttctcaccttattgggcactcactctatcagcagaattctagagatgctataagggatataaaagaagtagaaggcaaaaatctacgctctcagagagttttcagatttggctgagtcctttgaaattatttgtgaattggtaaaaggagatgttttatcatcatttattttctgagaacccagaattaactgtgtcttatacagaataaagaaggcatgatccctcttctaaatggtttctattttaatgtgatcttaaattacaacctctcagagttaaggagatatatgaggaaaataagctttgtagattttaggtttctgaactcttttaattaacacatgagaagagtttgtttcatttttcataaatctctccttatgtcaatcaactctttgaacaactaagaaccagacagaagaggttttaaatgaacgttaatatactttttcgtcactggttgctcaaactgaaagagatgctttatgaagaaattggtttcctcccagggtttaagctccttttccttcaatatgaatgttcagaagactgttctttcttgagagataattttgactaatatataaggagctatttgaaggcatgttcctcttgaatgtcttccctcttagctttatgaagatttaaaacttttccatattacttatataacactgctttatttcttttgttttgttatattattttgtttttattttaaatagtatttaatacaattcattagttctatttttatatttacaaatataaaaatatttacaaaatgtatatttacaaaatgttccaaaaatattaattcatcttcttaaaactctacttgaatctggattgccagatggtcataagtatttttttctctcttttttttcttaattattattatactttaagttttagggtacatgtgcacaatgtgcaagttagttacatatgtatacatgtgccatgctggtgtgctgcacccattaactcgtcatttagcattaggtatatctcctaatgctatccctcccccctcccctcaccccacaacagtccccagagtgtgatgttccccttcctgtgtccatgtgttctcattgttcaattcccatctatgaatgagaacatgcggtgtttggttttttgtccttgcgatagtttactgagaatgatgatttccaatttcatccatgtccctacaaaggacatgaactcatcattttttatggctgcatagtattccatggtgtattatgtgccacattttcttaatccagtctatcattgttggacatttgggttggttccaagtctttgctattgtgaatagtgccgcaataatcatacgtgtgcatgtgtctttatagcgrtcatcagtatttgagtaaaaattaagaacatatgttaatgggcattataacttgtctggattttcaaaatgtaactaagaacaatacttgttgttgttgtgtaatgatatagtacttatatagtactttagagaggatttcaacttgctatatagattttaaaaatattcttcctccaggggttaaagaaaaaagtcagaaaccgagctattctcagtaacattgcaaataacaagatgcaaaatacattttcacccttttaataaacttgcttttattattatataggaagtctggaatttctgagtgattggtaatctatgatcttattttcccaagcattgtacttaggagagaacaagtatatcaaaaaattatataggggaggtaaaaagttggatatgtggcctttacaaaaccatgtttttagtttggggagaggagtttttttttttgcatgggcttacaaaataggcttatgagctaatcaaacaacttaaaaatgcaaatataccagaatttagttaactgaatgagtctttggtaattactttcagtgccaattggtgggtgatactgaaaaatatttcttgtggtttcttttctttctttccttccttccttccttcctttctttctttttttttttttttttgacagagttttgctcttgttgctcaggctggagtgtgcaatggcatgatctcggctcaccgcaacctccgctcctgggttcaagtgattctcctgcctcagcctcccgagtagctgagattacaggcatgcgccaccacacctggctaattttgtatttttagtagagacagggtgtcttcttgttggtcaggctggtctcaaactccggacctcaggtgatccgcccgccttggccccctaaagtgctaggatttacaggcgtgagtcaccccacccggcctcttgtggtttcttttaaaattcattaatattggttataaataacttttgagcaagttaaaatatttaaagsaacatcaatgacatgccaaagaatgtttagtaggctctgaaggtccttccaaataaataatttaccaatatctgagcattaacaagatcaatgaaccaattatctatttttctaaggtaacttttgctggttacacccatttgcatatatggctcattttgttgtttctttcaaagttaggaaaatgattttatagcataactccaaaacataatgactttgaagcatatattaacgtggtcttatggtaggccaaataatgccctccacccaccaaagatgtttacttcctaatcaccagaacctgcaactatgttacctttcacagcaaaagagattttgcagaacaattaaggattttgagatagggaaatgatactggattatccaggtgggctcactgatgtacctgcaaaggtctttgtaagagggaggcaggaaggtcatggtaagagagaaaaaatataaagacagaagcagtaaagtcagactctacgagaacacaatgagatgactgaagcagctagagaggagaaaaatttgaagatgccacattgctggctttgaagatggaggaaggatccaggagccaaggagtgtagtagtctttagaagctagagaggcaaggaaacatattttcccctagacctctggagggaacacagtcctgctgacttgactttagctcagtgaggctgattttggacttctgtcctccggaagataataaacttgtgttgttttaaaccactaaatttgtggtaatatgttatagcagcaagaggaaattaatatagactctgaggattagaaattgagtaataacccaaaataatcctagaaattatctagcccaacttcttacccatgaatttcatagtaacaccatccaagtattgagtgtcattctacctgaagttacataatctgtagcaaaattgtaaaactcctgtatcctaaccttgcagtcttacatgctttcttgtatattatgttaagtaaaatccaattcatgtttcagcaatttatattctatgtaatttttccttgatgtctttgtaagaagattagtagttctgaaatagatcgatacatattgactcaatttttctccatagattctaatgacagtatagagacaggaattagcattcccactttaggtctttccaagctgaggatcatcaccttgtctgacagcattagactttgcttgggtatgagaagtggaagaatcatgtattatcatagatcccttaagttagagctattctattaaataatcagctctaggggtagattttagtcatcgttctctatagaagatccatggataagcctggtggattgtcaggggttggaattattgctgaagtttgatgcttctttcctgaagttcttgacttcaggaagcatgaaaagccatgaggaaacttttcatggaggaatgtcttattctactctacatagaaccttttcagcagtttcacattccctgggtctctatcttctgtggcctattcactgtagattacctagagaattgatcttgatactatcttaagtttaccataccatcttttcctttatttgactgttctggttctttgtatttccacataaatattagaatctacttgtcaatttctacaaaaagtctacctggattttgattggcattgaattagatacatagctcaactggggaaaagtgacattagaaaatattgagtatgccaatcactgaccatattatacctctccatttatttcagtctttttaaatttcactcagaaaattttgttttcagtttatttatttatttatttattttttgagacacagtcttactctcttgcccaggctggagtgcaatggcatgatctcggctcactgcaacctccgccacccgggttcaagctattctcctgcctcagcctcctgagtagctgggattataggcgtgcaccaccacgcccggctaatttttttgtatttttagyagagacagggtttcactgtgttagtcaggatggtctcgatctcctgacctcatgatctgcccgcctcggcctcccaaaatgctgggattaaaggcatgarccaccgtgcccggccttcagtgtatatttaaaatttttcatcatttgtggttggtaaaaaatagtatacttacctttgtatattgactttgtacactgcaaccttactaaattcacttttttgaaggcatagttaaaattcatgaccttcctgccatttcctttgtcatctctgaaaattttatttttattagtctgtgaaaactacttttctagggtcatcttggagtagccaacttctatgatctgttttcccaattttccttttctacttctctataatatgtggataacttgttccttcatagaacacacacacacagacacacacacacacagaggcatgtgtgtacaaaaagctttttctcagttgccatggcagtatgctaacatggatctctaacactgactattcatttccagagtgcttctgtagcttttttgaatttcctatcttttatattggaagtgttgctccatgttctttccaaagttgtcttctcttcttgttctacatccttaaatttgatatatatttttttcccactcctttggcttcaaatacaagctacttcagggaaggtccaagttcctgtcttagcactgatatttcttcagaaatacacttcgtacttccaaatgcgtaggaaaggtctattgcgacttaacaattagagcagaacttgtttgctttaactggcatgaataaacctttttagtttacttttaattctctgactattctaccaggctctcagcctctaagtctgcatccttcttttcattcatcccttcaaactcctagtacttcactcctgtttatttctaccatgtttccctttatagtacttcctttcatttggattgccattgtcctaattcagcatcacattaatgctttaaattacttattgtgcacattttaagaagtccagaaatcttaagaggaaattttttagtatctcaacttttaattttatatgtacttttgccatttttttcggaatatatatttacattttagttgcaataatagtatagatacaattttattccatttttacatgtttctcatatcactacataactttcatgattataattttgatagctacatagcaacccatcaaattttttattgtaatttttgttagacatctaggattttttaatgtttttactgtcacaaataacatgacagtgactctttgtatgaacggtatttaaaattttatattttcagtaaaatatatatgtttcatatgacttttaaaatatcaaatttctttccaaaagtattatttactgatttattcactgattgtatacaagtgcttcttacattttaacttcacaattattgtttaaatttttggctaattttaaaggtgtgaaatggtactatattctgtatatatctttgcttaataattgacaaagttgagcttttttttcccagtattgtgttggataattgaacttcttttctgatcttgatacttttgcctaaattactttcaatagcctgactggccttcctcttccatcacattttatctcctcctgtcagagtaatagttacaaaatgtatataatcaacccactgcaaaaatgaaacaaagagaagttttaatacctgttaactgtcaagtaagggcaaactcttcagttggtatctcagactttccatagtcaaggtttaactagccttctagccttttctcacactatcttccgggtagtgtaagtgttagccacaatgtcatactcttattcctgaggccccttattttcctcttccatgcattagtcactctcatctcttcatctgaagcccctctgttccaaccctactaattaggaaaccatcaaatactacacctttctgaaacttacatggtcattccattagaattaatctagtttgtattttcattatgcctttttaaaacccaggttttagtgcttattctccccttaaataacttttgatgtccaaatctgaattttccattccattttaagttcgttgaagtaaggggctgtccttaagcaatctttgattctctacagtgcccaatacagtggataagacataacaaaatttagtaaatatttgttgaatggtttgagttcaataaacttaagactattgtgaaacttatagaggggataaattgttagactctgtaagtgaacagagatgaatcctacatagcttaacttmcaattgagataagttacaatatccctgctgccatccattcataagagaagataataaaagctcagaagggacatattattaagaatggttatgaatataaagaagcccttgtgctcttaataatataatttaacatgaggctgtatatttgagcgcttgtcaaccccttgcttcccctcccacataatagttctttacttatttgcttcatttgttaggatgatattttaaagattggcttagattgaggtggctcacccatttaatttcattaagctatgattataaaaaatactataattctgtccattcattgattttgacaacatgttttttattgtaaggcgatttgggactgtgctgcaagagaaggtgaccttggtagaatctaaactactgtacttcttgacacagtgagggaaagcagtgatattggtattaacacaattatgttgttaaatgcatcacaggtgaggtatttaaagcaaattaaacaagtgacgttcttatttcataaatgcatttaatctcatgcttggctgtttttatggtagaattacagcaatggagaaaattaggcaagaacggaagaggaacagatttgttcataaacggacgcttagaatttgaacttaaagtgagtaaggagcatcaaaagtcaaataggacaaacagggtagatggtattcatggagacaaaggattaactgaggttattttaagactatttatatggaagggatgacattacatagggagacctccaggagtcctgactttgagccccagctatatcaatgactcacactgtgtaacctggaacaaattactcaacctctttgtactccatatttcttatttataaagtgtacataattttatatacgataaagttcttgcaagaatcaattagaaaagaggcaagaaaccaggtacggtggctcatgcctgtaatcctagcactttgggaggccgaggcagggggatcacctgaggtcgggagtttgtgaccagcttgaccaatgtggagaaaccctgtctctactaaaaacacaaaattagcctggcgtggtggcacatgcctgtaatcccagctacttgggagggtgaggcaggagaagcgcttggacccggaaggcagaggttgtggtgagccaagataacgccattacactccagcctgggcaacagagcgagactacgtctcaaaacaaaataataataaaataaaattaaaaaaagaaaagtggcaagaatggtttcaaatgtgaagtaacccatatttatgaggtagtattgatatcctgttgtaaaaaccttatcatcctaccatatttgaacttgattcattaattaactcagaaaatatttagtaagtgcaggcactgtattcattagatatgtaatagtgaatggaacagaagatctaattcctgctctcaagatacttatgatctaataagggtcactagttaacaaactgatactgaaaatcagagtttgtcttaatagtttccctttaacccacttgccagattagctagtgttttccatttcatctgcaaaacacattgactggcgtctcttatacactgaatgcctgggtagtaataatatctaatatttatacacaacacttaacaccttccatgaactgttttaagtgcgttgctcaaattaactcctttaatcttcacaacaaaaccttaattaatgtcattctcattttgcatatgaggaaactgaggcacagagaggttaagtggcttgtccacggttaaaaaggctagtaggtaatggatcaggattcacacccaggcattctggctccagagcccacagacttaatcactaggtaacaacactagcaggtctgtctattactgctctcaccagttgaattgaaaccttatttaaaggtcatctgtatttgttcccaaacatgtttataacagttgtactagattttttatgtaatttaatcaaatatcatgtaacatactagaaatgcaaaatacaaatgtggttttggacatttataaccaatttgaatatgctgataagacttaaggggtgttgcctttaaaaagttgggtgaagaaaatcaggaatcaggaatcaaatcagaaatgggtgaaagcgaagagtaaactacctcataaaacatagacatttrctgtagttggcctcatatgcctttatgctctcattttaagtaaaaataaatgaaagtggaaaatacagaaaagtacatatttatagtgagtgaatcactaccaaaatacaaagtcttggccctactgtaaacacttgaaaagtgaattaacatttatatattttaagttaaaatatatgtttaatatatatccacaggccaggcatggtggctcacacctgtaatcccagcacattgggaggccaaggtgggcagatcacttgaggtcaggagtttgagaccagccttgccaacatggtgaaaccccatctcaacttaaaaaatacaaaaattagctgggcgtggtggcacacccctgtagtccyggctacttgggaggctgaggcaggagaatcgcttgaaccctggaggcggaggttgcagtgagccgagattgggccactatattccagcctgggtgacagagtgagactccatctcaaaataaaattgtacacataaaattgtacgcgcgcacacacacacacacacacacacacacagatgatttttgtgacatcacattttgtcaacttttttgattaacctactaactgtcctgtaagaaagaaatattttcaaatacctccacttccaaacattagaactatggctggtgttgtaggtagagccatatgagtttctgttactgcaagagggtgaatcacagtatatttcttaaaggccgaaccatagaggatggattgtggttcccagtgtggtacacaaaagatagattgtggatgccagcatggtatgtggaggactaatcgtggctcacagagtagatttctttttattccacataatcaactctgttcttctttccagagcaacaggatgtggtagaaagaatcctagattctaatcagaaacagcctttctctatgtcagtgtgttcttggtaactaacctaacctcactgtgttcttgggaactaacctaaccttggcctagtttatttgaagttggcaatttcagtaatgtttttagatctaacatagccctcaatgaatattagttaaatggacctgaaaacactttggaaatcacaaaatattaaatcccatattttcatactgtgaatatattgtttgctcagttattgttacatctattttattatacaatgattagctataaatctgtgagctccatgagattccagatcttggctcattaatttttgtacagacacctgcacctagccaagtgtctaggttcttctcgtatatagaaggtattcagtagatacaatttatgtgaactaattagaaatcccctattttgaaccagacattttgatggtaaaacttattttgataggatataaaatattcgtatcattccagttttagatattgttatagaggtgtttttcttactttctcaaagtctactaaaaatatcaaagaagtcaaaaaagagggaaaatattgtcatctccaagaaagcaaggaagcctcacaactgcaatgatacaaattacgaagtccatatattaaatattgaaatagataatcaaacccactaagagatgttgactcagacattatcaataggtgcctttcccccaaaaatatttggtagtttttgattaaagagagcttagtttctgcgtgatacataagaaaagtagagaataaccatgtagaaatcccgcctgagactctagaatggtagggaagggaagcctcagagggactttctgccaacaacctcgttctattctctaccactttgtctttcagcccaggcagtctgtcaaagaaggtggaagaagtaggtggtacactgctgtagggaaacttgctgtgatccatgcaaactccttaaataaaacaaacaaacaaaaagaaacgagggaagaactactttcaatgttaagaaaataaaatatttggaaagaagatgtttgagttcgtaagctgaaatagtggctgccaacttcctcagtacatttccagctatccccttcctcttcccctccccattgtactacttggtcagttgctatctcattcaaagaggagtagcgatcagaaagggaacagtggataaactcatgcataaaactaccattttctgtttcacacatggagaggaaaacaagcaaataaatgacacaagtgtatatcacaacaaatacgtattctaaaaatagggttcagaaaggagacagatgaattcaaagaagagagtatacagcaataaaagcagtgaaaacagaacaagagttcagtaaaaaatgaaaatggaaatgaaaaaaatgacagaaataaaatagacactggaagcaacacaaatagaataaacttgattgaaaacaaagtcacaagcatagatactaggttggaaaaaaatctgacaaaatgaaatgtgtatgaacagtgtgaagtttttataatgaagaaagatacggaagacagggaaaagagagacaacatgtacgtaattggtgatcctaagaatagggaacagaaaaaaatgaatcaataaaaataaaaaataaaaagaagaaaattgttacaaagatttgaatcttcaaattgaagttcatactctgttctaggacaattttagatagaacaatgaatactgagagatactttaaactgtttcctgaactccaaggataaatattcaaccagatgaacatttatggaaaagataccagctacatgtaaggagaataaaggttggctttcaatttccacgtaatatgagaacccagagaagcaattactacacaattctgaaggaggggaagtatgactcaagttttattttcagtcaaatatagtatcaagagaaagacattctgaaacaaaacttagacaatatagaaccctggagctcttctttaaactcatgtgcatgcacatacatgatgagtcaacatcagtagctcaagaatggaggaactctgatttaagatggttagcatcaaatctatctatggataaaaaataacagcttyagaaattagagaatagcatataaatggtataaactatgataatgaaagcatgttaatgaaaatgattaatatgtgacaaggtaatattggaagaggtatcagttaatttccctaactacatagcatggggttaatagctactacctaatgttgaaatagacagatgattctaacctcctaaagtttttccattttttacctcaactttggagtgcccttgtagaaaagaaaacatgttttgggtttaagaaacgtttacctgaatttcagtttttagttcaaattttctttagtcaaattaaaggaaaagaaaatataacatttaaatattaaaatgcatatataatttgatttcatttttttcaaaattaaggcttatgtatgtatacatctctctgaccatttttctaccttggtaaacatttagctatgtttggaatgatgtttacttggtggtagagatggctgttttttttctgataaatggaatttggatgacttaaagtgaaactttctgaaacttctctttattacttgaagtttttatataggacatatatcatctcaatgaaagaatagtcattcttttaaaaaattacagccttaccaccatctcttctttagaattwttttccattagctactaaagaaagtctttggcaaatacattataaattttggaattgaagtacaaaataaaagagatcataggaacagtatcttctccaatattttaatctaaaaactaattttgtctagaagaatatatttcaagaatgcatatgttacaaacaggcaccacctgggattcccagataaagatatttcttaagttatatagtccataatctcacaggttatacaattaggaagtatacagtagttaattaaagctgtaaatagaagccaagattcccttcaacaaaacagaatgacataaattacaatttttgtgtaaacctattaccactgctgcatcaattttataagggatctatgtaagtctactgtggttataaatttaagaaaatcacttgtacacctgtgaagcactaaagcatgcatggtgaagaatggtaggaaaagaaatactttttctagtgaaatgattagtgcacaatagtgatcgacttctacaatgaaccaaaatacaaactaatgttgattctttgctttaaggggaaaaaaggttattttttacactcccccttttgtctctgtccttcatcacttgtttttagagacaaattctctggagtgtttataaaacagcagtcctgggaaaccctgatttagtgggtttttagaccttggggctctggggtaccttttcacaccccaaatggcacactgggaaggctagatatcagagatcaatctacatccttgtgagagtgggcctgtatcttttctgtattcaccagtaatgactttaaaattcatgcaaatcagaagtgcacatttggaaaaaaacttccaggatattacatcagagtaactgtcaacctctttaaaggaaaattttgattatactgagctgctttacctgcctattaccttccttcaaattaattattcctcagatttaactgtatggtattaatacttttaatacttttgtatcaagaaaaggaagtaatctgtactcatagccatcaacaagtataactgtgcttttaggagtactgtgtttgccgaggtcatggtatagttcagtataaagtgttttaatgtgactttttgcacagcacgtgaatggactttgaaatagcattgcatgtctgagaattctgtctctttaaattgtctgctttgcttattggaaatgataacaatgattgtttgaagttattattaatttttttagttttaacaaatcctaataaaggaaaacatatctattaaaaactgaaataactactcactgaaataaacagcaaacattatagatatacaactttaattttgaatggtagagaattttattaaatgaagagaggcaacttaatagagtattaaggacagacaccagatgcatttgacagatctgaatttgagtcaggttcttacacccattagcatttttgactttagtcttttcacctaacttctctgagccttaatttctccatgtagaaaatgaaagatgatgtctttcctatctcrtttaggattgctgtaatataataatatgtataacagtattgcttaaagaatattacctagtggccattgcagtgcataagaactggtaagatgccttacctggaaaatataagggaaaagtgttggtttttttaaaatcatgaaaagataagattgaaaatgrcgtgtctttgctgctaattaatgattgctttatgttcatggagctgtaacatttttcccacctgcagaacatattatagtaagctctagttatattttctaggatcgcttttaataaaactttaacaaacactcgtgaattccaacaaaaatcttgatcattttacagaagtgtatatccaaaaccaccgtgaagctggaaatacrtcaaagacgtgattacatttgtccaagttaagaggacaaccaatgagggcacaatggacagggttctttaggtatgttgggtataaattgtgataatttttatcttcgtagggttcctgaagacaagcaagtaggttttatgttttctaagatgaaaaagaacaatgatgctttttgaaataaagctttggagaaagtctgcagaataacaaaggttttcatcattctaaaatcataaaggcaaatatttataatttcctcacaattgtgagctataacaatttatattatatcaaataatttttaaatgaaaaatcaacctaaagggaaaaggggagaagatactatagagaggactgacctgtaggtgggcatctaggagatctggcaccgaggtggtggcatttctattttctctgggtttcagttctctacccatgaaatgaatgggttggactagatgatccctttcagctctgaaattccgtgaccttgtgacattcttcatactctgtgacataggaagtgcatcacacactgtagggttttccccttctgtcagtacagtgcactgcacagtggataagaatgtagactccagagccagagagagttgtgtttgacttgtatctacggagcttgtgatttttggcaagttaccataatttctttaagtttctgtttcctcatatattaaacctaaagataatgcctatagagttcttgaaatgacagaggaggtaatgttggtcaaaaccatggatgggtactcctggggctccatagtgggtttcaagggcaggtgtttatgaagccaggttctggggcctgatgatctgggactgaattccacctctgccacatgcaayctgtaggtccttgggcaaattacttcctcaagttctgcttccattttctcttctgtatgtatggttgatgataatacctacctcctagggttattatgaggattaaattagttcatacatataaagtgcttagaaaagtacctggtacatgtaagcactctatatatttgctatcgtcatcattatcatcatcattattaaagttrcacatagcctagggtgaaattctactaaaaattttagggaaaaaatactcatttatattatcaccaacatgtacatgttatggaatagaatgaaagtttccataaatattgacagtaaagttttaagtttaactccagaaagacaatgcagcactgtaaagcactttctggcttcctaattgcactctatgggtaaatttctgtttttttcactagcaattgtgtattctactgaatttgtaaccttctgaatagtttattattaaaaacagaacaggctagcttttttttttttttttttgagacagacttttgctctgccccaggctggagtgcagtggcacgatcttggctcactgcaacctccgtctgctgggttcaagcaattctcctgcctcagcctcccgagtagctgggactacagtcacataccaccacacccggctaatttatttatttattttttgtatttttagtagagacggggtttcaccgtgttagccaggatggtcttgaccccttgacttcgtgatccgtctgccttggcctcccaaagtgctgggattacaggcgtgagccaccgcgcctggcctatattgacatagttgacaaataatcttaatttcagtttaataatatgagattttatagatttatattgtagattctctattatattatagttgtctaagattcatggtaaatgtgtttttgaaaatgtcaattcaattgttaggtttagaagaaataatgttaaccataaaggagtataatttgacaaatatttaattagtatctacaaatatgtcaaactctgctgagaactgggcatacaaatatggatatgctcaaatcctttctgtggaggagttcagcatttggggtatggcaaacattgttggttggctgagtcgaaagctcttgctaacactcttctttcttgcmtggctatacaaaagcattggaaaattcctagcagctactgatatgtgagcagaaacttgctggaagtgatagtggtggtggcggtggtaaagatgcttctgttttcttattaaaagaggatgattgtagctagtgctccccccactcttcttcttgccttgagcacagatctaatacctacaggatagcagccatctggggactatgaggtgataagccaaaaataattggagagatattaggcatcattaagtcagcaatccaacattaggtgacactacttcctgactttttattttcaaaggtaaatgataaacccttttatattttaaaacatattttaaaacaattttaaaacattgttggattttctgttactgtatccaaagattattctaactaatgtgggaaggaggtatatttgcctacatacaattatgagacatgttagttgctataactataataataacttttctaaagaacaatatgtatttataaatgatatgtgtaatcttctgctttagtgcatatgcgtgtgtgtttatttttcttgtaatgccatagtactagttagagtatgataaataattctccaaaagcaagagtcacaatcttgaaggttctaaagagccctgactcagaaggaagagatatatagtaatggaaggacaagtttgaatccctaaagcctccaggacaggtagctgaagaagaatctatactagaatgacagggttcttgcttagatccaagtttcagaaccagagaatgccagagatgaagaggagtgaagaaggaagaagagacagtaygtacaaaccataacatagaaagtctctgatgcaaaaggatwtgtttttagccactcactccagatggagaggtgtgacctgggaaaargaaataagagatttggtgacagaggaatggagtaaaaaagtctagcaagagaaacaagagactgcaaactgctcctgttttttctctcaatctacaaccatcaaatagaaaggagactaaagagataataacacaacaaagagctgtataaaaaaatcacaagagaaatttcccaaaaaacattggaagattaggataaaaattacccattcgctcagggaaattatactagatatgatacggacaagcaaacaaacaaacaaacaaaaagcctgaaaaaatatctatgagaatcaaagtagaggttcaatgaaaaacagatgaaagaggttatgtatatcaggagagaaatgggagagaaacacgaaagctttcatagacaaaaatattagaagcaataacaacaagtggaataaatgtgactgaaaaccaagttagaaatatggagaaaagctttgaaaaaaatcccataawatttagttcaaatgcacaaaaacacaacatttattatgggaagatgaaagatgtggaaaagaaaaaaaagggatccaatataaatataatttgtattcttgaatattaaaatagtagaagataaattcctgaaataaagacttacatatgattttaatggcattctgtatcacggtaaggttaataaatattaaaaataatgaatacatgtatgtgtttattcagcatgaatatcaagtcacatggaagagagaaaaatgaggttagttttcccacaggtttattaaataccaaaatcctatagaattatgtgtaaaaattctgagtacaagaaagtatataccaaggttttatacccacccaagttatcttttaaatataaattcaaatgcacaaacattttcaagcccataagaagttacacaagatagtataaaccctcattaaggaaaattaaaacaagaaaacactgaaaaacaataaggtaaacaaagacttaaaaagattcttatgcactggggccttctgtcttattttgctgttttgaatcctgaggctaccacttgtgaatatgcctgagctagcctactggaggatgaaagactacatggagcagagatgtgctatcctagctggggcttctaaatccaacaagcttgtaagagccagacaaatgaatggggctatcctagaccatcaatccccttcaaaactggcagatgacttcagagatgagccagrccagccccgatgagaattgccttgctaactcacacaattatgaacaaatacattattgttcttataagtaaaaaaaaattgaatagccaccctgtaaaaacaaaacaaaacaaacaaaaaagctgtagtgaatttcagcctactaagaggtgaatcaagacaaacaattcaggtatggagggattccaactaaaaaactgaatataaatctttaatcaatgtaaattcagaacgaaaattaaaaaccatgagcactatggttattgaataaaatagaaactatgaatgaacaatgaaaaatataatatcaaattgatggaagttaggataaaacattaatacgttcatttcttcagcttttatagcaagtaatggtcccaactttttaaagcataagtttttcctgaactcatcaatattttattacacaatacattttggagtgttaagaaacatttatctctactgcaggataaagatgggcattaaaaaaaaacaagaaaaaagaaacatctcattttttagtaaattcattaatttcatttaaagttcttatactgtgattaattcaagtatagctatatttaatatggtacatatatttaatatagtgtgggtagcttgagtccattttaacaaaactgatcttcagttcctatccacattacctgttggcctttcttcctctgtagcttcctttgtatatatttttatcaaaatatctgaaataatggctattttgaggtgaatggtttttatgttatgtgtaacttttgagttacttgacaattttttgaactttttttttaaaaatactatttttattaatatattcagtatggaatagaacctttctactatacttatttgtaataaattatggattttaaaatggtgggwaatgttgagtggtctttgaaggctgtaacatttacagggaaacactggcaagggtttcagaaaaaagcctttaccttatgttttcaggttttcccttttactggatatcattttaagattttagattccaagtttgacctaattaaagtttcagtggcagttgaactgcctacagtgtgaaagtcctgcttgtcaaatattttatctcttattttagaaatgaaaaaaatcatgataagtatacatttaagggctattttatgttaaaaaaaaaaagtcagattgaagccaataaaaagttggtcaagggtaatttaaaaatcaagaaattattttaaagttagctactttaatttcaatatccaaatagtgggagaggaaaaagagccaatttgttaattccttggaaatacatggtgagtcacagtctaatttcagttcaatgtgttgatgctaaacaggaactgacacccaagaatttgaaggtaaaatctggtttaggagtcacagaggcataattgacaatgctcttgaacctacagtgaagaaccaataagcaatacataatttttaagactgtaagctgagtgtggtggctcacgcctgtaatcccagcactttgggaggctgagcagggtggatcatttgaggtcaggagttcaagaacagcctggccaacatggtgaaaccccatctgtactaaaaacacaaaaaaattagctggacgtggtggcacatgactgtaatcccagctacttgggaggcagaggtaggaggatgccttgaacccgggaagtagaggtgtcagtgagctgagattttgccactgcactccagcctgggcaacagagcgagactccatctcaaaagaaaaaaaaaatttaagactgtaattttgaggaaataaagagaacaaatrtatcaaacagaatttgaacattcaaagatatttattttaaatatttcaccattaaaatgtttacatcttatagtgtgctgatggcatcataattactcaagttttaaatgaatttaaatttttattacataatttgtaaactttataatacataattctgaatctcttaaataattgagacttctactttagcaggtagaggttgaagttataagagaatagaaaacatctgggggatttgtcccaggaaaaagctaagtttttggaaatagaagttgaataaactacaaagcaaatgaagataaaattactcttttcaagatgtagagtagtatatacatagcacagaaagagggagaaagagaaggggtggagggggatagattctagcttcgacttttgcaaagtttattagcaatttggtaagacagatactttaagaggcttaagcatacctctttatcacaccacttaatagttaagtggtgtgatgtagagaagagagtacagctttggaatcaggcagaagtaaacttaaatcctgactctgccacttcctgtctctgtgactttgtggcttcactttatgcaactcagcttccctgcaagaaacaggcacaggagttcttaccttgcaagatagttgcaaagttgtttgtaaagtacctggcactgtactgttcaacaggtggtagataattactgtaataatggaataatgagataagatgctgaataatttcaaaataaataatcaaaaaaatcatggagtaggttgggtgcgatggctcacgcttgtaatcccagcattttgggaggccaaggcaggcrggtcacctgagaacaggagtttgagaccagcctagccaacatggtgataccctgcctctactaaaaatagaaaaattagccaggcatagtggcatgcacctgtaatcccagttactcgggaggctgaggcaggagaatcacttgaacctgggaggcggaggttgcagtgagtcaaaatcataccattgcactccagcttgggcaacagctcaagactccgtctcaaaaaaaaaaaaaaaaaaaaaaaaaaaaaaaaaagatggagtaaaataaacaaaagcattacttttgcttttgcttgttacatttagagattaattgcgatttgagaccacatacctttttttccgattcatcagatatattcacctttgcctcctcttcccttatctattcctttcttcagcaataacactgggaagtcactagtctacaaagctccctcccatataaaacctatggcctatgtgatcacaggcacaatgaacaggtgaagaaagaaataattttgaattaggaaatacaatgaaggaaatgaactaggaaytgagatagagaatgtctgcttgggggaagtgatttagataaagtgtatttagatcaggtgttttctcccttcaattatgcctcttccacattgatgaggaggttggtaaagatgtgaaaattagtaaggggcagagttttaattaaaggtcatcattttctattgaacagcaccattgtctggctttggaaatcattttctttaaatggaataaataaaagcagtaaaatgtcaagaaaccactttttaatttattatccaggtaaaaaagcatttctctccattggaaaaaaaataatccataggaaaaggagcttgtaggaaaaacaccaatmccacattgtgtactatttcctgtttytgtgattatctctatgaaactaccttgagggtttggcgagtaaatagtaacaaattcagtcttactaattttgtccttttctttgggggtaatacagcctaacaacaaaatctgttcttaaaatactgcgttctactagagttatttcccttttggctggaggaagtggtggctttgtcagactgaacatacatagttgtatatgtttaaacaaagcatcagaaacaagaaacttgcagagttccccaaaccaggaaatattttataaagataatgaatagcaaataattgacatgatataagttaaaaaggcatttatcagtgagtatactagtcttttgaaagcagtatttgttagactaaggatttcaactacttgccaatgccatcagttatcttgacttattgtaggattagttctgtagtcctctattagaacggatcaaggttacaggcaataatgatggtttccactgaaaaaaaaagccacaaatatcttgtgtttcaaaatttctgtgatcagcattttttgagggaagaagcattatgggaagaaaaagctaacagagatgaagtatcagacaccatgccatggggctgtccttacatgtgtcatcattttaacagggaagcaagatacatttctctccttttctcatcctcatcattaccatttaattttttgattcacatgaatattgataggtggcttgtggcttttgtccatgttttgactttctttaaagacaggaagaaattttataaagagtcagacttttaaagcaaaaatctttctctgaaacttttttgtagaaatcaaaattcaggccttcttctcaattcaatgaccctgttaattaagtatttgtcactactcaaatacatggctgatacacagccatggctccacagccagatcttggcaggtggctttttttttttaacatcaaaatgcaggtaagttatttatgttaggtgagaaaactggtttgattcaatgtccacaaatattacctccactcaatatttgtaattgttgcttcagaatataagtcctttgagtacagaaattccagacctgatatagaacttactcatgcaataaraaacatgtgcaaggtatagtctcacagtttattctcttccgttttatgctgcactttggctgatgcattgcaaatgtatgttaaaatcaaccaccctctgctagagacaacacatgaatctattaacaaaattaacctctcaatttgtattgatttctccagttaactggccagaatctaactagtctctagaggaataggacctgggcagtcaaattctgcatgaagacagggacacccaaatatttgccactagttttatgttaataagactcacttgaaaaagtaatatgaaataggtttcatggttaagtaagttttgcaattgcgtgagttaaatgtagataaaatatttctttacttcaggacttataagagccttcagtatatgaatagattaggagaatcctaaggattgggaatatagtatgcaaagtttcccaaaagtattcgatcttggaacctctccgcactctgatttttttgagcaatatcccctaagactgaaatacttggaacatactatgggaaatattggtgtagggcttgaagactttgtacagtatgtgaagctctttttatgccaggaatagttcaagattactcagtattagggttaaagcagaagacaccaaagaaaggagattggccaaaatggtcaggaagtcatggacattaatttcgtttattccccaatattattagtcataagcataggcactgtgcctgaataattggggcagtctgattcagcaggcatcctggtarggaatgaagtcactgtggcgggatgcatagattatttcaatggaaaggggcattgtaattatgtttgagtgttgtagctaaaagactgcatatgtttgttagtggcctatgaacataaccatggcattataaatagtatcataattaccgtgaaagcaatactgcatctgatkaatgtattttattcggcagccacaagtcttacgaagagtatattttaggtaatgaaaacttgagccttggtatgtttagaataataatgatactaagtttttatcctttcctagtctagtttattaaaaaattgttttttatttatatgaagacattcataatcaaatacatgctaaataaaacctaattgtgtttatttaacccagcaattatatatgaaatatggccagtgactctggaattaaaaaaaaaattctgcttggtaacttagtactatattagcctgatttttggaaacaagttttataaacaagtaggcatcctgaaatacatggcccagtacccagctagccattagagccattaaacacagctctgagataatttacctgtgttcattgtgtcaaaggagtaatttagactgtcataaataaacattttcaaaggaattttttttctttttgttttctgctcctcaaccataaataccagttaaattaaagtagctcttatctatggcttggatttagattcaaccttgtagaaagcattacttttcctatcattaaaaattaaaacatttctcacttttacagaaagcctttcaatatgtatagaatgtaaacaatgatcctagatgacttgcactgctctgagaawtagtagttatttgaagttatttgtccactgagggctttggcaaaggcgagggcagtttgatatataagtagaatattatagataagaaataattacttattgttttgaaaaagcttcccattcgactctgtttaagagaatatgaggaaaattcaaaaaggggaaattagtgaattgaatccatttcaagtcagagagcttagagatcattgaatccaacgatctcatttttttaggtgaagaaactgagctcctaaaagttaataaagcttgagtatggtcagtcaaccagacggtgacctcctcggaacctaggtcttcggactctaagactcatacccatttctgcactctctgcttcctcaatgtctatttcccagccatggtgaagccctgactgaaagagaaatgcctggttgtagcaaatgtgttttaggaatgagcaagctccttggtaatgatgacaaggctaaacagaaagaaaaggaagagatacagtcagtagaaactggtgggtttcttttcctatagcacccttttttattacatgctttgagatagtgtgagtgtgccttttgtgtccttgatgtgtgcctgacaagatgtatgtaaatcacagttttgtaaattgcattatgaatacaattaggatccactaaagttgtcttgtggtaactttctttataaaattattctttttgagtattaaagactaaatttatctgttggtaattctacatagtaatgatatattataaggttttttaaaataattagaaagttttacttcaagctggtgaaaaattctatattcctctaaattttccacctgtctgtgccccccattcccatttccccatccttctgtcccccacccctgtcttcagctcctacttcacctttttggttttaggtaaatttccatgagtacctagcattctagaagtgaactcacagcccagattttatgattttattattagtttatttaatttttttytctttttttttcttttttttttttttagacagagtctcactctgtcgtcaggctggagtgcagtggctccatctcggctcactgcaacctccgagtccctggttcaagcgattctcctgcctcaccctcccgagtagctgggattacaggcacacaccaccacccctagctaatttttgtatttttagtagagacagggtttcatcatgttggccaggatggtctcgatctcctgacctcatgatccacccacctcggcctcccaaagtgctgggattacaggcatgagccactgcacctggcctatttaatttttatcgtcctttcttggactattccttcctattttctctctctactttcacattttattttttaaactcaacagaagagtttgaaagctgctgagtcagcccttggtcactttccagcctgttgttcatgagtaattgactttggctagacataccaaaattaaattctcagattgccttagcttttacagaattgcactggcattcttctctactcttcataatgcgctccccatagaattttattgtaattgtcaggtgtggggtgagggaggacttgtatttatactaattgactttacatcaagatttcttctattgaattcatatatctaattcagtttaattgaatgtaaagactcctgtaataggaggcagcagatctgactcctgtttcctgggtaaattatataagttcatggtttctttatagatacagaggttggaggaggtgattggtgtaatttttagcttgttgtaattttgtgattactgaactggccttaagcccaattaagtggaagaccttgtgtaagtaggtgttgtctctcatagaactaactaggtagcagtcaacatcatcacaataagtagatcggtttcatttctcctgcatttaaccttcttgtgccaattcgccatcaactttcgtcatcagctgtcttgtctattgggtcagcaagagtaagggcagccttttcttacctcaatcactcaccaattatttatgtaagaggagtttagaaatctattccaaatggttttacttctgcagcacttagtaatttatctaaagattcttgtaaatgtttctcttgagctcatatagcaatcttaaaagctgtcttcaggaaaccagatctagtcatctggaaggccctatatttttacaatagagccttccagagttgttagaaatatggagaaaatgctatcatgatcatttccatgtatactaaagyttcagtagttttaattgtgaaaaacagctatcccataaattgaagtgttagtaagacaaatggatgcattgtattaaagctgacagagcagtgactgggaaaatctagtcactgatctaaagccaacacaacaaatcagatgaccttcaatgacttttaattacaatttctgaatacattgctgttattaggaaaacattttaggaaaataagactagaattagtatacaaatcagaaaaattgatggtcaagtaatctgtcagtgatataaaattcaactaagataaattgataaaatacagtaaaattgccaattgttttttgcttaaagacttatgaaatgtacattattcatttctactttctatctaagttaaggcctatttcatcccaaactaaccctgatctagtttatgtttccggaagcaccatttataggttggcatttaataggatttcttttgtgacctaaaagggatgcatgctgtctgatcacctctatagttagaaaagagagacaatagtgattgaagctagaagaatggattttatggcataatcatgttctgatccatacaagatgacaacagcccagttttctgtgtaatacaaattgatgatcttaatttaattattagatgcttacctatccttgattatatatttttttcaggaatcccaagttttttcttgaaaatgttaggcagaaggcccatgataatttcagattccagtgtcgatttagcaatgcctatttttaattaattgatttacatttttattcagtcacaggtcttttaactgataccttttaatgcataaaatcatgtttaaattcttgaaataactgaagtcttaatgaaatatttgagtgcaaaccrtcaattgaaaatgataaataaaagtagtacaaatatctttaattttgaaatatgagggttttctgtgtttctatrgtgttccaattttattaacttttgccctgtcttccgttttctttataactaaaatagtaataaatacatttctaatttaattgtcttatatgcacagaagttctgagtgatactgaatttttggtgttgattgagatttgctttatgtatatgttcagttttaaagcttattatrtatttaagtgaatgtgtgttctctaattgtagggtccatggttttacatatagccattggaacaaacttcttagttgcrttatttgtatctccyacaatccactaatgccttctgctgcctgatgtatcagttataagaaaagtgcattgaaatctcccattattgttgatctgtgacaattgctctttctaatctcaattttactttgtatattctggacaatgttattwctcacatatgagtttggaattactatattttttgctgattccttctttattgttccrtagaaacttctttatttccaatgtgccttttttgcctctctacaagtgtctcactttcttctgttcattgtcattcttcatctttttattttcaacttttctgtgtcattgtattttatttgtgtgtcttgcaaaaagcataaaaatataatttgcaatatctgtcctttacttgcaaatttagtccctttgtatttattgggttattgatatattttgatttatgtctacattttattttgtgctatgcttttacattaactatgcttcttgtgctttaaaaaatattgttctatcttctattttgaattttattcctgcaactagtactaaaacaacagtgtatgctaagtaaacatagagtaaggaggcacttatttctgcttatagaaaaagaattgtagcactggagtatatgggaaggtagatgagacataaatctggtgagatatgcaaaggctgtgctaaaaygccgtgttaggaatttggtttgcatcttatttatgtaggggaatggcatcagccatctcattttagaaatataattacaattgttgtagaagaatgagctggaatgggggagaaatgaggggatgaaactgagcctggtgggcagggaggccagttagaaaaatcactgcaataatccaagtgatgaatgatgaagcagtggtagtgaacttgaagaggaacaaatagatttgcaatatattcaggaggaagagtcaataggtcttaatcaccaattaggagtgtggggatggagtggaatggatgactgtaggcttctggcttgggtgattttgtggatagttgagccactaattaagaagagaataggaaatagcaacaaatttgaggacttcctctgcctggggaacaattctcttatagattgttatgacggaataaggtataagattatttaatgaggtatttagatgacaaacttgcttgggaagaaatgtgatagaacagagagatggtgtcctaataatgaggggaagaacatccagaaccctgaatttaggaaaacagtgtataggagtatttagttacatgaatacatattaagagatttactaaatagcagggatctaaaagttttaccagagcttatgaacagacaagaatttggtttaaactgttctagatatgcctttgaaatgttattgttttatcagttgttagattaaatcatgcttaaagtgctagttttaaaatgaaatctgattaaaacaatttaacacaggtaaattaatttttacaaacaagaaagaatttgtggtcatttggtaataagtatttcctgctcagattgtatcagtcacattcatttttataagagattgtatcagtcacattcatttttataagacctctgcctatgaataggatatgtgagtcacaactatggaaaattaggcctctgaaatgctgaaataatacaaagggttgttttgccaaaygcttgacactaagcaaagacgaaaaagctgtttgatgtgcagatcatcttctgctcttattcttgccatcacatctaaaagttttgggaactgtttgactctctgttagtattaatataaacagatctataactgctatccaggcagctaaatgtctgtcttattcttgattatcttttgcatttaatccaagataaaatattaaacctcttgatttaatgtcacaaaccagtagtactcacaaagctgaattacagactgtcaacaggtggataattgctgaacatttacagatgttagttcacatggaattgtttagaattactgtgtttaacagtgtaattgtagagcaaaatttcaaatgctactttagataatatttttgcacatacccttagaaattttttttccaataagttgagcaagcagaaaactgcataggcgctaattaactcaaataaacacataagtgattgacacaaacatgctttttttttttttttttttttttgtagagacggagtctcactctctcacccaggctgaatgcagtggtgcgatcttgacccactgcaacctctacctgctgggttcaagcaattctcctgcctcagcctcctgagtagctgggactacaggcacgcgccaccacgcccggctagtttcttgtgtattttagtagaaacagggtttcaccatattgcccagcctggtctcaaactcctgagcccaggcaatctgcccgtctcggcctcccaaagtgctaggattacaggcgtgagccattgcacccagcccaaacatgcattattaaacaagcttatctttgagatatattaatggcactcttgctctttttactttgttgcacagctactaagttagatagataattgctttgattcaagatgcgttaaaatttttaatgcatttgttaacatctctaattatataatatcagtctccttgaaaccattaaacttcatttatcaacagagctttgagacctacttgtgcaatgaagtagcttaggcaatagagagtaagatgaaccacagttcagtcctaagtagttttcagtttagtaggataatattacaaaatatgtaaataagtaggtaaaataaagcgtactaaaataatttacaagtgattgtgtaggatataatagtaaggtaatgtgaaaataatttatgtttataggatacaataatgtaataaaccactgaatacaatgtctaatgcaatatcagtactccataaatattagttcttattagatttatgaaacaaagatggaagtgtataatttcctctgtggatttcaggaaggtttgtagaggcagtaatgcttgtattagaccttaagaatgagtagaaattcatcaggttaaaggcaagtaggggagaagatttgaagatcttttaagcagaaggagcagtgtaagcaaagctacaaattagtgagactgagtctgagtcttagttgtctggcatggataggtagcagatgaggaaagaacctgaacttaataaaaaaatatagagatgtagacaagagccagggaataatgttaaggatttgtaatttatcctgcaagaatattggtaacctttgaaaggtattaaacaggtaggtatgggtaactttatctgcttcgtgttttaaaaagatcacttggtgaatgtttggagaatggattaaaagaggtacatctagaagcagggggtcctgctagctsactgctaccatgggccatgtaagagatgatgaggacttgaaccaaggctatggcagtgggtatgaagaaaaggaaaaagatgagatcctgtgtaattcccaggacttggtaaccaatttgatatgagaagtaacagagaggaaaaagtgtcttcagtgacacccaaggttctgtcatagaggcctgggtggatggtggttctattcacggagagagaaatacaaaaggaggagagtatggaaatcatgggttatgtttgagattatggartgtgcattatttctgtgacattcaagcaatgacacctcagaggaattggaaacatgggtctgttgctcaastgacacatcttgggctagagatctagatttaggagtatttagcatatacttggaatgagaaggcatgaactctgggaaataccaggacagaagtagcaggaagatagaccttgtggagagttccatcttggcagtgtgttgtggtattagctgagcccatgttttccacttgttgcatttggrtttcctagttttacatttcatattgtaacatttggcagattttaaataacttgtacaatgtatngaaattctcaaaggactgatgttttgtaaaacttcttcacaataattattagatatacaaagccctgcagctgtattctataaatagtattgaatgtagtgaaatagtcatcaagctattccttatcttaatcataacttgaaatgttgaaaattctgtttggtggtaagtcatgattttgtcagcaattttcacagtgtcagatctgcccttgttgagagtaaagaattgaaataatgaactttaggtatccttggtacttaatgctatttttgtatcatttgctattgtaatattacttcaactgcttttttcctactttagaagttcagcatgatgcaaaactaggaattgcagatatttggtaattgagggatgaaataggaatgttcttgtgcttttaaagagactcacactgagcttcattccatttattaagtgagctaatttgttccacactgtacctaatgtagaagcaaatttcgaagttattagctaaaggtgtgattagcaaaggccaggcaaacccatttttaactacgttaaatgtccgtataaagcttggagagcattttcctttcttccttctttcttttcatcttttccttttaaccactggagtacctgggtagttgctcctttacattacttactggtttttatacgagggaccttctataagaatatagtgatggcaactcacttactacatgaatgctacttatttctaggagcttaacttggttaagatagtttgacctggcatgattaatatttacaaatggaaaattaaatcttttacttcagtttttattcagtctgttcaccaagttacattgtcctgctatatctggcagtgtacttggtgctatcagaagacaaaaagttaaaacatttgcccaaagagcttagtctaaatgttgggagaaacaagacaaaaatttgtctaagaataaatcggataagaagaaattataaagcttagacgaaggacataaaagaagacctaaccaaatttgcaaaacaaaatatatttattagaataacaaaggtcataaatattttaattttctccacataatccgaaatacaggctcaatgaaagatggaggttttatctgtttttttttttttttcatttatgtatcattagtgcaagagcatagtaggtactcaataaacatttgttgaagaatgttatctgaaagttcactcaaaaatcacattataaaatttggatggaaccagacaagttaattctaaaatttatagattcatagttggaaggaaaagggtccaaaatggtgttgaagaagcctaatgagatgataaggcttgtcctgccagaatgcaatagattgttatttccaaagatgatcacaacactattttccttcccaggtactttttagcaaagtgacattgccactcccccatcaagaggtgcagtctactttaccttcttttaatcaacttgtaggaatagaataaggcagaggtggctttgagtgatgtctgaggctagactttaagacatctgcaatttctgcctttgctttttgtaatatttcttcttggatcccacctatcatgctttccaaagctcaaatagccacatagagatacccacatggagaaaaacaaaggctttagttgaaaaccccagctgagctcccatttgtcagctagcactgtggtagtcaaccatgcgaatgaggctattttggacctcatgatygtccagtgcctgggctgataccatgggaaacggaattttgtggctgcccacaaaatcatggaaaataatgattttttagaaaacctccactgttttgttttgcagcaataaataactgaaacaccaatccaaaaaacttataaagctataacaattaaaacagtataataatagtaccgggatacaaaaatggtcaaattgaagaggatacaaagcctcaaagcagtcctcactcataaaagccttgttgtatcactaaaaaggcattaaaattgagaagaaggaagaactagtggattaattaataaatgagaagtatccataaggaaaaattaaaattagattcttgcttcacattatgaaaaaatacaaacaacagattgattaaagacttaaatgtgatcaacaaaatgttaaaactgtgataagaacatttaagaaaatagttctataaccctgggataaaacattttcatccaaggcattaagtgttaaatgaaaagactgatacatttattcattagaatttaaatttctgttgccattaaaaaaaaagtaaaggacaagccacaaactggaagaacatatttgtaatgcataaaactagaactgacaaagaattttttattcagataatactaagaactcctaggaacaagaagaaggagaaagaggagtggaggaggaggaggaggaagaataataggaaaaggagaaggagggagaagctcaaagaaacaacaaataggcaaaggatataaacagttgatttacagaagtgcaaaaccaaaggacaaataaacatgtaaaaagatgtttagcttcaccagtgattagggaaataaaaattaaatcaataataaaattgcatctcacagccattagatgataaaaattaaagcatgacaatacatatgtctgggaggtagagaaactgraactttcattcactgctggctggaatgtaaattgatattagttctttggagagcaatttggcaacatctgataaggctgaggaagtccatatcctaattgttgacgttcacaaagagacatacaaggatgtttgctgcagagtgactggatcaaatcaaccctgggatttatacggtgaaagaagacccaagacagaacactgaaaggggaggtatgaaggttaatggccaacaggagtggtgaatagatggccttcttttctagaatgagatttctttggtataaaataatcataactgattaaatgaaagtatttgatattattctggcatatatacagaagagactagaaaactagaaaatatcmtacatgtgatatactttatgaagtttaaacagcacagagttctggcaaatgttactaatgatgaataaaatattttgttttctggtgcatgcctctaatcccagctactcaggaggctgaggcgggagaatcacttgaacccaggaggcgaaggttgcagtgagccaagatcacgccattgcactccagcctgggcaacaagagcgaaactccatctcaaaaactaaataaataaataaatttgttttcactgagtctacaaaatgttttatttgttagtgtactttataatgtttaaatatacccttttaaattacttcaaaaatcaaaataaatagagataaaacatgatggtgttacctgtgatttagtgttgatataattttctgagtaggctatttatgttgataaaatatcctttaattttaaaaaggattatcttaaatattatttcagaaaagcaaactaattcctggacattggcacttagaaatatatgtcttgataagtaatgtgcagatcatttaaataacttccctcaaattatactaatttgaaatatgaaaatttagaaaacctggcatagtgacatttttacttccctgaatgtttgaaaagttggaaaaactccaaagtgctgctcatttacaaaacccctatgttgtgtgcttttagaacatctgttcttcaaggtcagaggttattttctgaaggttcttctgcagcgtgtcttgtaagacttgtaccactagcaaatacatttccatcattagcagatatttgtttcacyaaaatgttcaatacatgccatcatgattactcaaaaactgttaaatgttcataggaataatgatgctttgtttgcctcaccattcaaaacaaattaactagagttctacttggtctactgaaattgacatgctaaagatgcccatgatactagtgaaattttacttccttgaataggatatctgtattggtaaaggacagattttggttacataattcaatttatgaacattatcaagtagtgagacataaaattccagattatctacatgaatctcaacaggttcaatgttaactttgctataaacatccattatccacatggtgtagagaaaaggacactkatctggtccacactggctcctaacttgctgagtcatcttgagcaacatttgacctctttatttctcagttaccttgaatgctaaatgtgggtattagactagaactagatgatttctagttttttccataattctctaggcatccatgtacaaaaaaatctaaataggttccgtctgcaaacatccctggaataatatggtgattagaaattccatatgcaaaatatgttcaataatgggtgggttgaacctctgtgcatctttcttatttaaatggaaacaaggatgtggttaattcagcatagaggagaagaactgtggtagcttcaaaggatagtactacagtttcagagtccyttcacctggccacagcactacagtgttgagtggctgctgtggatattgggagacaatgggacacattggccccacctcattacttttgccatggaagagaacctgacttggttcatgaagcagattcaactgagcaagagaaggaatctcataacagcttaatgwtgtctactgacaagcttgagtataaactcttaaagaaaatgaagacttctccaacccatctcatagtgagatgagcttctcatctgttttatgcaaggattattattgcatttctcttcgtataatatatatgtgcctgaaaatgtgtgtataaactaagatattgaggtggctatcttaattttttaatgaagttcaacaaatatttcttgaacactaaatgccaggaactgtggtaagtcctattgccgctaaataatcatagagtaacttctgttctttgagatctactctagtggataataaaagcactcaagtctgtttcctggatgagctcagaccagcagccaagtatgataatcctctgtgccatgaaaatgaattttctgaggaaattcactcaaaaacccatctagaggtaaattcttttaaaatttaaataagtagtcttattatrtaaagactgttacgttaggtaagctattcactcatatatagaaaaagttctttcagtatgtatatatatacacatctctttacccactccttttgtttgttagctaacatggatatttgagttcatacatgtatcaggctaatcccacatgaccaaacatatataacaatcaaaccatagtgtggcatctgcagcactcattttattccacaatgaaataaaaatgaattcagctattaaagtagtctaattctgttatacctacaaatataatcaagaagcaagattttggaacaatatttttcaataaattttcctctgccacaatgcttgtttctgtggacttttagggaataagttgacatatattaaatatgtgagaactttatgctgtattctaaaataacagttgattaattaaagagttaaatattgacccctaggagggccctctgctacagtcaattggagaaagaagaggaataagggcttggcattaccttcaaaaagattttactccaagtcggattcttcatttcttgctgctagacaagagccatcaaagtaaaacagatacaatttccaggaaatacaggaaataaaaaaacactttttcttgctatgagaggtaacgagactgataaaagagaggtagaaaagggattttttttttttaagtgagaggaaacatcgaggaccaaagcccaggaagcacccggatgtgtaaggaaatgaagaggaagatgatccttcagtgagtagtggagcaaataggggaacccggtgtatttaagtgtgtgtgtgtagggtggagagaaacagggaggagggcagagtttcaggaaagaggtttataatgatctattgattatattattattaggaaatgagaataagtaggaaaaaaattgcacctgtctcctttcttcttagctgtggtctcattttagttcctagtattsagaggtgacctaatcagactgcagaatgttctgaaaggttttaaacatgaactgttggttttggcaatcagaagcactgacataacatagtgtatcaaacaaaaatatcagcttcttcacaatactatataaaataatgcatgcaggtctaaaaatagatttaaattcagaataaaattgtcaaagtgactgccaaataaaaacacacaatacacagaagttggagcttttccactcagtaagaatgactgagtttgtggaatgtcagtaaaagatgtatactttaactttagatgagtatttgtgtaatagctagaaaatcattgtattggcttaaatgttgctttgatgaatttctaccaaaatcataatctctgttaaattagtaaattccaaatgagctaaattcaaacaaacagaaaacttgaatataatcctgtgaatataatcctacctcaatgatcctgtgaggtagtattattttggggatcatttttaaatcaatgaagatacttgagtttgaagattaggaaacctgatccaagtttatgatgccagcaagttacaaaggaattggaaatttgagcttagtttctgtcttcaaagcctgtgttccttcatgatactatacagtctctgccatcctaaagaataataaattattgacaaaaagactaaattatattaaataaagttttgatactaaagcatatgattatattctaattccttataatttggtaacccacatttgttatgatagaaatgtttttaaaagaycatttgaaaaattgaaaacctgattttttaaaaccctctgcataaaaaggagttcctttaattcattgtaaactaacttaaattgtaaagccactgattaaatcttaaatctggatcaaaatccatctttgcaaaatttatccaaatttagttatcatgagctaaattcacagaaatgaagtagttcataatttttattttgccagcatcttaccttatgtttatattctatgtttaaagtgtaatggtaagtctttgaatggaaaaatggtgttccaaagttaactatacaaagcttaaggacaagacatttcctcaatgattcttgggaatgagacagtagtaactggatgaattttcatggcaatgaggtaaataacaactggatgagcctctctttttcagagttaactggaaaataaattaaacaaacaaataacaaagtctttctgggcatctcggattgctaagaccccaagcctcagcattttttgactcctttctgattcttcagccctacattctatcatcaagaaatcatttcacctctaccttcaaatataagtccacagactatgatcacttcttccatctctcatctgaatcaatgtgatactcttataactgtctctctaattctgccttgctcccctgttacaatgtcaatcaggtcatgtcatgtgccactttgtggccaccygtttcattcagagaaaaagttaagtccttacaacatattctgcttccctctcccttagtcctgccctgtgtccgtgtttcaaaacctacgcacgtggctctagacaactttgcctgcttgctgtcctctaaaatgctaaaaggacttcacgtcgggacttttgcacttgctattctttctctccagaaaatcttgtatatctgcttggtttcttcttcttgcttctttcagatcttggctcatgtatcagcttattagtgaggcccattctgacgatgtgaccttgactccttattcaaatataaacttcatgaagacagtgatttttggctatttggtgcacttctgtattcacagtgtctagtgtaatcccatagtaggtgttcaataaacatctgttaaattaatagattaattgatggagaaatgattgactatcatatgtgttatttaactgccatgttaactgcagataggtagtatgatctctgttttgctagatatgataaatcaacctgattagcctgatagccatggagttgtaaaagttgacttacaaggtatagttgactatagttgattcattctaaaattcttgtcaggtaaaatgaggtatcattttgtatcattctcctataaactacagagtatttcctcatgaatgattagttttttcaatgtattgtttttaatcacagaggtcttgctactttattttattttagtttagttyagyragatggagtcttgctctgtcgctgaggctggagtgcagtggtgaaatcttggcttattgcaacctctgcctactgggttcaagcgattctcctgtctcagcctccagagtagctgggactataggcatgtgccaccatgcctggctaatttttgtatttttagtagagatggggtttcaccatgttgcccaggctgtctggaactcgtggcctcaagtgaactgcctgcctcggcctctcaaagccttgggattacaggtacgagccaccatgcccagcagtcttgctattttaattaatctggcaagtaattatatctaaagtatacaggcactggtttaatctctgggacatactgattaaccagacaggcaaatctggaatttatagttagttaaacagatgcacaaactaaaaagaaaatatcaaaattgtaagtacaatgcaaataattaaaagaaggaatgtgaggccaggcatggtggctcacgcctrtaatcccagcacttttggaggccaaggccagaggatcatgaggtcaggagatcgagaccatcctggccaacatggtgaaaccctgtctctactaaaaatacaaaaattagctgggtgtggtggcgagcacctgtaatcccagttacttgggaggctgaggcatgagaatcgcttgaacccaggaggtgaagattgcagtgacctgagatcatggtactgcacyccagcatggtgatagagtgagactctgtctcaaaaaacaaacaaacaaacaaataaacaaacagaaagaatgtggtaggaagtgactaggggcaatgggattgggttcttgatgatcatttccacctgcccttcctggtctctttgcccttctccattctgctttccactccagaagaccaaactttatggactctgtcgttggtctgccttacttctggcctctggttgtgtttgaccaatgggaaccatctgcagaagatttgagaactaggggaggaggagggctgggtatactttcccctggatcctccctgccagctccccactgattggcagtgtttttctttacctaaggccaggttcctgttgggcacccttcccctatattttcatgttctgagctgtaggaactgtttcttcctttattctctcacccttggtaaccactcctccctggctcttgtagtacagaattctgcattatatgtgctatcatattgttaaactttataacaataaataatcactatattactataaatcacccctttactaaataaactatatgagtacctgatttgttttttactcacccatgactgataaaggtggtaggaaatacctttgtggtgaagtattagataatgttagtcttgcagaaggcagccataaggaaaatatctaggaaggaacattctagacaacggaaaaatctgagacaaagaaacaaaggcagggatgagctctgtatgtttgtagaactgaaatattttggctcaacagtagtgaagaagagagaggattgtaggaaatgagggtgggatctaggcaggtgcctaccttgaattaatgttcttattgtacttaaacaaaaaaaaagcaccaaaacagagcaaaaaatgtgtgtcagtaaaaggcagtattttgtggggcatgtctttacctaattctgtttatttgtgagttttgtgaaagtgaaaggaaaattaccaaaaataaattatttaaattttcgttttcctttctttgtagcacattttcttaagtcatttaagtgtgactttagtcatcaagtacatacaagaaaaaaagcataaaggaatgaaaattaagagggtaaaacttctgcaggctatatttactatttacyctaataatattaaaaggaatcatgaacgcattgagaagtattttgaagatcaagtttatgtagcagtttattttttaatctatcctcatggctttgttgtgtttgtgagacaaaatgacttcctaagaaacacagattttatttccttagtgttacttctagtaattactctttctctcatatttacatttggtcaattttatctgcttcctctatgcaagaaaaaattaacttcttagacttttaaccttccttcttgttcccccatcactctaatttgttgtattcacatactaagaataatgtttggtattctcttagtttccctttagccagtttatcaactatcttctggatttctggttctcaatcctgacaataaatgaaatcatattctgaaagaacgtcatcattcgttgaaatattttcatttctggtaaatacattgtcttgacttaaaaagtgttttttttggtagcggatgactcctagaatagtacctggcatgtgttaggtgctcaataactatttactgatggaatgaacacaggctctagtgtaaacagatgagacttcataatgtcacttaccacatggcactcaggagatatttagcctacctaagcctcgattatcatcaactataaaattgagataataatagtatctaccatttaccgttgttctaagaattaaatgacatagtgcatgcaaaggacktagcatagagcctatcacctagcaagtgctaaaacattagctattatttttaacattaattatttttcaaccctagaatggtacatttttaacaggtagtacattttaacagcaaaattttagcagaatgtatttatcccccactttgcattttttcctaaaaactgtatcatgggataatttattttgctgtggagaaagactaaactatctatgcctccctccacctgaggtcatttctgaagctgttggcattgggccaggggttgagtggcagaataatctccttatcaattttgttatgtttgatgttgtacaaaataaatagctcaataaaaactscagtttagatgttaccatggttgggaagaaaatggcagtggctacctattaagaaccacaatcacaaatgcagtccttctgtattttatatccttggttaggtgggtttcttgttcttttccttgtttgctccatctggggatgcctgggcacccgtacaaaactcactagtgcctaaacacagacacattagttggggctgcccctgcttcagataccagggagagatttgttggcataatgcaccagggtcttatgccagctcctgattctttgctgatgctgagatgaggaacatggctgggagggggctaggatggaatgaaatctgtggcagccaaagcctccatttgtctttctgccgagtgtgctgagctgtagacactgcagtgttttcaaaaataataataaaaaaatttgctcattagtttttaagtcctgctgactttgtgaaatcaatatagcacattgtaattgatttatgaaatcaaaaaacccctgcttgaccaggaagttcggcagtcgctgctctcagcaacctgcccttctgctcattagtgcatttcctttagtgctgcctgagccgagggcgccttcagagctggaaggctcaagccctctgcagacagtctgcttaagatgtagcttgcattgtgtccctggggtcttatgcttctccccttyttcctaccaggtcagctgaaggacttcagcttctctcttagggtccctaatgttctcataatatcttactggaaaggcaagactccattcatacctgtattttgacattttaatctatttgctacttttcttttctctcaccttttattcttccttgtcttattacttagcttatcttttgccatctgaccttatctattcattgatctcttttattctattttatataacctcacaaggtkaacaatttttttctatttcaattgtctttgtctaatttcagtacctactgttttattcttaagataatattttatacctcttcctgccaaagcctgctataattatgtttgtatgccacctttcaaaaattgaagtaactgctatacaccaaacattgtcctgggtgctttacatcaaattatcttctcaagaagtgtgtaaggaatgcattatccttggttagaggtgaaaaaactgagatttagagaagttagtaacttgcctgagtcaccccactactgaggggcaaggctggtatttgaaactaattctgtttgactccaaagcctgtgtttcttttttccagtacaaaatgattattccarttggcctctgttttacattaaatgcttaactagcaaaatctagctcttggctgcccttaaaggggctcattctctttagtgccattcttccaaataactctgctgttcaaactgccagaatgcaaatgtatttattttaagatcttggtctatgctagcatattggatggcttatcctttttcgtggaattctcrtctatctaatgttatgtgtatggagccccttgcytcatcattaaaggtgagggaagtgttctcatattgtcaaaagtcaccaagagcaatctcataacctagaaaaatcgacagacagctgagccaaataggcagcctttgggagcttcctgtggatttcattttctctttgttcttttgatgcaactttgggagcaagtaagtgggaaaattatagaacactgcagcagcaggaagatgatgcaatgtgctcgatgtcctcacttcttaagtcgttgaaggaacctgtagtttctccatacaggtactgtatgtttcaggtaagtgctatgccatgttcataatgcatgagtttgcaatgagttaataggttccatccatttgatgtcttgcataatattgcagtagcattgggcattactgccattcaatatgtgcaatattgtactaaaaattaaccacagatgccatattaaaacagctgcagatttagatttagctacagaaggaagaaaatgtgctatggaagttggccagaagtgcaatggagatatgctgtaaatgaggaggaggagaaagatactgaggttgaagtgccaaaaaaaataaatggaaatggaaatggggatgggtaagtcatatggtcagtggcaattcaaagggactcaaaatccagaagagtgcagaatgcagggtgacttatgcctgagtgagctgatgaagttttaaagcaggaggtctaatcagaacaatatttagagatatagatgaaggtgtaaagaaaacagctataaatgtaatcattcatttttaggatgcttractgtagtcaggatattgatttaggaataaactactagaaaaactggatgtggctgggcgcggtggctcacgcctgtaatcccagcactttgggaggccaaggtaggtggatcacatgaggttaggagttcgagaccagcctgaccaacatggagaaatccctctctagtaaaaatacaaaattagccaggcatggtggagcatgcctgtaatccagctactagggaggctgaggcaagagaatcacttgaacccgggaggtggaggttggggtgagccgaaatcacaccatcgcactccagcctgggcaacaagagtgaaactctgtctcaaaaataaataaataaaaargaaagaaaaagaaaaactgtggatgcttgaagtgatcaatgtgtgagaagaaagttctggtgtacagggagtcatagcaattccagaccattacaaaattcaagattatcttgaacactcttgtacatgaaggttgtcctctgacaatggacccttgtgagattgacgattcccattttggagaaaagtgttggagggttcagttggcacaattttgtactgaaaactgaagtgacaaaattttatttcaacagaattgcgggcttgcaagaatctcattaactgtagggccatctgccacgttgctactcatttggctcatttaatcacaggtgggtaggaaggtctcaatagtttyggttccyrttcaattctgatttttgcttgggaaacagaaggaaggtctcaatagttttggttcctgttcaattctgatttttgcttgggaaacagaaaaggccagtgacagctgtggcagtgccagggttctcttttctctgtgtgagccagaagatggcttccctatatagtttgctgctaacagagcaagcagacagtaagcatttcctcgccctagtgtttggctgctgaaagaattatctttgttgacttgtggtatacttggcttaggagaagagacaaggaacacagtggtctctaaattagtaattgacttcatcaggggaggaaagactggttattgactgccstaggtcagttaaagcacctgacatttacctataacttgtgtctgccttcctggctcagaaatgaaatagaaacaaatttgattagtaaccaggaaatacagttggtgctttacaagttattaggtacattctaggcctctaaacattttagggaaaaaagtgtctccagtgccaatgcataaccttgttttccttcctcttcttttgaacacaaaagaataaaaacttgatggaaccccctggtgttccaacggtacttgaggaaagtaaagcaaagcagaacacaacaaaatacaaaaacaggctttttctattttgttttactttgtttttcagtctagtgtttcaaatccaggaaatgtcagttctttcaaaggaccttttctccatagaataaaattttgggaaattttgaaaaagctgtagttctattatgatagtgataaagtagattatagctaacatttattgggcactcaatgtgtgcacaacagtactctgtatctcacctatataatcctattcatccccacaaacatctatgttctaagttctgtttatrctccccattttactgatgtggcaattgagggatagaatggttaacaaattcttccaggtcgcatggccagaagtatggcagagtcattatcaaagcccccaagttagtgcctgagtctgcaccctgggccgaaattttccagcttctgtgatacagaattttatgccagaaactcttacattactaaatttttcattctttcttttaatataaatatacataaaaatgaggaaaacttccataggtgtgttctaatactgtgagcaaattaaaactcaattgaatactattttcacaaatacatgtatgcttatctcactttaggatgaaccaattctaaaagtcctacttaagaaatagttatgaccaggcatggtggctcatgcctgtaatcccagcactttgggaggccgaggcaggcagatcgctagaggtcaggagtctgagaccagcctggccaacatggtgaaacactgtctctactaaaaacaaaaattaaattagccaggtgtggtggtgggtgcctgtaatcccagctactcaggaggctgaggcaggagaatctcttgagcccaggaggtagaggttgcagcaagccaagattgcaccattgcactccagcctgggtggcagagcaagactgtctcaaaaaaaaaaaaaaaaaaaaaaaaggaaataagtatgtgaggagtggctatttaacaagggacttgtcgctagtcaagatttagtaatggcttccttcaaataataggctttgtgaaatttacataaaatacagttaataataattcaggctaagcaataatttaggaccacatttgttgcatatgtcaggccttgctttcatgctactttttatttaattaaataaaaatcctttataaaataatgtgacaggtttagtaaatgtatttattcactggaactttatgaattgctaatttttatttgctatttatagtttctttcagctctgtttttttctctctttttaaaaactgtggtaagaacacttaacataagatctactcccttaaaaatattaagtacaccatactatatatatatatatatatttttttttttttttttttttttttttgagatggagtctcactctatcatccaggctggagtgcagtggtgtgatctagactcactgcaacctccgcctcccaggttaaagtgattctcctgcctcagcctcctgaatagctgggattacaggcgcccaccaccacgcccagctagttttttgtatttttagtagagacagggttttgccatgttggccaggctggtctcgaactcctgacctcaagtaatccacctgccttggcctcccaaaatgctgggattacaggtgtgagccagtgcacttggcccacaatacaatattgttaactctaggcactatgttgtgcagcagatctctagaacttattcatcttgcataactgaaattttatrcctattgaatagcaactccccattctcttaattatctaggatcatattttcaggaacgtcatcgcatgtgtgtgtgtgtgtgtgtgtgtgtatatatatarrgtgtgtgcaaatttatttcactcatgatgttatactaaagtatggatttctatatacaaccttgattattccacacttaggaataaaagtttgactaagtgtcatttttcctaaaatatgttttggttccataagtattaaacaaggatacttacatttataaactattttgtattgtttccaaatgaaagcacaagtgatccagacatataggaggctataaagcatgacatatctttagtgacaattggaagtacagaattatggacaaaaactatccacccaactcagaaaagagaatcctgtttcctttactttgctatggcaaaaagttgactcctttatctaacaatagtagatagctatctgaagatttatttaacctttaaaacatacaaggcccagcttacatctacaaatttagagcacatttggaagctctttagataggaatgctgaagtacctctggctttctattttacacgtgacagtgaagcatagaaaattgttccttctgtgagctcttaacagaggccactcttgtagtttctaaagttttattgctaagcttaggctgagggtcatatcatatgatctttatacattttttttttttttgagacagagtttcactctatcgccaggctggagtgcagtggcgtgatcttggctcactgcaacctctgcttcccaggttcaarcaatcctcctgcctcagcctcctgagtagctgggactacaggtaccagccaccacacccagctaattttttgtttttagtagagacggggtttcaccatgttggccagtatggtctcaatctcttgacttcgtgatccacctgcctcggcctcccaaagtgctaggattacaggtgtaagccaccgtgcccggccaacctttatatattctacccattataggtcctttaaacaaatcttgccatttcaagccttaatctattttcccattgatttatattaggtcattattttagacaatggaactatcaaccattggctaattctcctggaagcatttgtagatataaaattacattgattttcacctgaaaggcccaataaactcgcccatactagaaatttaaattttggttcatttcagtaaccaaatgataagcacatcaaagtagttatttggaaagcaatcactgtctttagacaaaaacaagagcaaaaacaaaaacgtgggtatctcctaagaggcctgtgacttgttatacattttaccaataaaataatcatttacrtgaaatttaaagacttactctagatgaaatgaataatgagaaaacagcactaagttcagagaataaaattgtattgacgaagaaagtaaatagatcagtgtggcagaaaagtcatgaaaataagattggaaaagtaagtttgattagtattgaaaagggccaaaaatgccaaacttgggaatatgaccatttttctttagggaagtcactgtagatttttaggaagagatgatgtcattacagttatattatatgaagacatctttcaacactttgtagggtaggctagtaatgaggctattggagtaatctatagaaaaagagatgaaggcaagaatagaagtggtggtgagaaaaatggaaaggtcatgtgggttccagagtcgagaggatgtttgacatgtttttctttgtctgaaatgttcttctctactttttctgccttaccagttccttaatttcaggtctcagctgaaatatcccttttacaggggtatcgtccctgattccctatattagtgctgccattccatttctatgttctccaacactgtttctcacctgcactattagaaatacttataattatttcatgagttactttaaattatttttaaagtccttctcacaagaacatatgttttacaaaggcaggaacaatgtttgtttcattaatacaaatctactagcacctaacagtaagtattcaacaaaattttgtggactaactgacctattattgggccttttatacagggaaattaaagagggcagttggtagaaaagaatcaactctggtttttaactgcagtagcatgttaagcagttattggtctataatttatgctttagaataaatgacttttatatattttcctataaggaggtattgatatactgattgaagaagaccaagatttttggtcagatagaaaatgacaagtcttaatggagtttaaaataccaaaatatcatgtgttaacttagaaaaacagacagaaaggagtgctaaatagaggaaacagccaagaataaagagcagaaatactgtgtctgctctgcagataggacgaacttagcttgatggagaaccagataaacttgtggatgaaccagctcaatgccaccactaatcctgaaaagttatacacaaaccactaagccaagtgctctgtacatgacaatcatagactcatagaattggatagtgcaagataagtcaaagacagaccgcttcccaattcttgatctgatttgcaatatccagccaaatagttgcgaagcttttcctgaaatcctcaggaaagggaaacctttccaacttatttttacttacaccagtagctgatgattcagaagccaatctgaacagggaacatttaatcaaatcataactaagtcaagtacatccttacctacaatgcttaggcatctgctttaatactttgcaaaagacagcagcatgcatgttgtgcatactactcacagatagtacttattactattaattatatgtgaatacctttattagaaaatatgagagctgtatattttctaagtgttccctcttatcaaataaatcagttattgagctagctatcaattgcagaatcacatgataatttgcttagattgaagcaggmtttttgaaatgatgaaatgccgattttaaatgggactaaagaatgacccttttggtcagctacaaaatggcgagtcttaatggagtctaaaataccagattactcatctcctcttcatcaagagctacctttgattccaggcctattgtttcagaattgcatctgtggattttagacctattcttgactcagagcttgtgctgacctggactggaatacttttttctccttaaaaaaaatgtattattaagaatgcttagaattcaatatgaagaaaaaacaactcaactaaatatagatgaaagtcttcaacagacacttcagaaaaaaaaaaacaaatggttggtaagcacatgaaaagatgtgcaatgtcattagtcattagggaaattaaaaataaaaccacaatgagaatataacttcctgctcattaaaatgacaaaacaaaaacaaaaagtcacatattaagtgttgtattagtagatgatatgaaccaatgaaactcttatacattactgatgggaatgtgaaatggaataaccactttgaagaacagtttagaagattctttaaaaaggtaagcattcacttacactacgaaccagtaattacaattctaaatatttacccaggagaaataaaaacatatgctggcgaatgacttgtatataaatgtttacagcagcttaattcacaatagtcaaaaactggaggcaacctaaatgtccatcaacaccaacaggtgaatgcgtaaagtgtgctgtataggaatacacaggggagtattactcagcaattaaaatgaatgaactgctaagaagcacttttttagattactcctttcttcttaaggaataacttattctccagcctatgtcaccagaagctgtgaatcagaagtaggcctaaacttgtaatgagcaaaagaaagcaagaaacaaaaacctacattgaatgatttcattcgtatcaagctcgaaattaggcaaaattaatctgtggtgatagagacagatcagtggctatctggtagggcataagaagactgactacagagagactcagggcaacttttttggtgatagaaattttcttatatcttgatttgtgtggtggttacactggtgtatacagttggtaaaacctattaaaccgtatactttatgcattttgttttatgaaaattatatttcaataaagttgattaaaaataaataaggctggacgcggtggttcacgcctgtaatcccagcactttgggaggccgagggggataaatcttgaggtcaggagttcaagaccagcctggccaacatggtgaaaccccatctcagtaaaaatacaaaaaattagctgggcatggtggtgggtgcctgtaatcccagctactgggaaggctgaagcaggagaatcactkgaacctgggagatggaggttgcagtgagccgagatcgcaccactgtactccagctggggtgacagtgagactccgtcttgaaacaaaataagtaatttaatagtctaacaaaattatttgagagtgtatttaatttagcactttaaaaaataaattatatattgctaattataaatgagaatgttactaaaacaaacttagaagggcatacttaaaagtcttctatatagaattgcttggttaccaaaagtttagttactatgaaattaatgcttctaagcttacagatactttattgttcaatttagttcagattgttcttgtcatttgttaatacaaattattgagaattcattgtaatattgatgttagcgtcatatcaaaaatgtggaaagtcctagtacaatgaatattatgaaattttcttctaattgtcaattttctttttcaaaactcatacattatagtctttactcaatactgttttatttcaattggaaactgacatttttgatatttataagagatttaaaattatttttcataaatatgtagattacaagactatgaaatcaatttgaacaattagaaaaagaactgttcatttgatcttagccaaaaggctgagaagcaataaaaaragaaccatttttaaccctcctcaagtgtattactattatagcatattttgtaaacatgatgtaaaactgcttgtggttgacttagtttttaatactgacatttctgaaatgttatttctctctactgtatttatttatcctactttttaatytatgaaacttgtcaacatggtgaaaccccatctctactaaaaatacagacaattagccaggcgtggtggcaggcgcctgtaattccagctactcagaaggctgaggcacaagaatcacttgaacccaggaggtggaggttgcagtgagccgagattgcaccattgcactccagcctgggtgacagagccagactccatttcataaaaaaaaaaaaaaaaaaaaaaaaaatctatttgacagaacctttaaattgtatctatataaagcttttaatattatgggtttgcttatgttcatgtcttacttagaaaaagcactttatgaaataaatttttatcaactgaagtaataaaacaatctggatgggcctgttaatgacaaagttaactattctccgagagcaaatggaccaaaaataccatttatgcagaagtaagaggaaaataatgatttttacgttaataaaatgtattctgcaaggcacagtggtgcgtgccttaggtccagctactcaggaggctgaggcaggaggactgcttgagcccaktagtttgaggcaagcctgggcaacatagacctcatttcatctctaaaaaaatgtattctttgatgctatatatagtataataaattttgagctgattatgtcatgtgggtaaaggagttgaactctgaagccgaataatgaaggagggagaaaactttagcctgtgagagaaagaaatctttgttcattccagtgaaactggaaaaccacaataaattgactatatgttgttaatttgagaaggcgatattctatcataaggagtaggtgtgctatggcaacactaaacaaagcttaaaagctcagtggagtgtagagttcaagatattataaagactgttaaagaccatagattcaaggacaatgaggaaaattttcaagagtcatgggggttaattaaagaaaatttaattttcatttcctgaaacaaatattacagaatggaatatactgaagtacattagcatgtttaaaaaaaaaagaatatgctctgaccttgttgaaaaaaaatgattttggctcagaaatgagaaatattaaagagaagaacctattgttaatttataataatagtagagatgacagggtctcttgtaattaaaataaattatgtttatggtatattttctctttgttgggcactattgccaggaattgcctgcaaattcagtgaggtgggagtggtttatacccttacctgttcttaccaacacagttataatgatgacatttgtcatttattgagtgtttactctaagtgggcactctactaggtgcattacataaagtaatcctcatagtaaaggagtgaattacactcctggttttataggcttaaagaagatgaaaactggcacaaagccatacaaattataaagagtacaattgggatttaagcacagtcttatgcttattctaacactgtttatgtatgtatgtatgtattttttttttgagacggagtctctctctgttgcccaggcttagagtgcagtggcacgatctcggctcactgcaacctccgcctcccgggttcaagcgattcttctgcctcagcctcctgagtagctggaattacaggctcacacaaccatgcccagctaatttttgtatttttagtagagacggggtttcactatgttggtcaggctggtcttgaactcctgaccttgtgatctgcctgcctcggtctcccaaagtgctgggattacaggcgtgagccaccacacccagcctttttttaacttcactatcctgcctcattgctgcccagtgtaattaaagtccaaatagatacattttcattttttttcctttaagatgattcaaaggggaaaaagagcaaataatgcaaatactcatagaaaggcaaataaacttgcatgaaaagaagaaaggaaagaaaacaactgaaatcctggcacaattaatagataacttctttctatttcacttggttgagggaattttcttgcttgaacattgagaattcttgagatctgtattatcttgaaaaacagaaggactaccaagaggaaataatacacagaggatggtgttaccatgtatatactgtctcttttttggtataattcaaatatcacttgggcaatcatttgttatcttttgaaatagttctgcctggagataaggaaagatttttggctttctaagatatcattttggggctatgtgaaaatagtgtcattatgtagatgcagattttctggttatatttcatggatatttgaggtcacagtcatctctaaatttctataccttcctctttgaaatgtattttcttggcattattagaatttatgtaaaaataagtaggtgataaaaatttccctaatagaagaattgtatcccccccccacccaagaatatagaccttttgtggagtatttctggctaccagttacctcactgaactcaaatgtaatattaccatgactgtctgggaaggaaagaataattgttacatatctgctgtatatcgagaagaagctgactgtgtatgcaggtaatatatggatgacttcctaagagatagtgctgtaaaaccaaagtgaaaatacaacagagtaactgtaaagaaatcccaatagccatccttatgactgacagactataaacttttgtggatgcttgaatctaataccttcttaccacaactgaccttgctctagtttagagcttctaactttcatgtaatcaaagtgtctgtatttttgtgtgggtttaaagatgtggctgtccatgagtggccctgggattttttacaagttacagtgattttgcagttgttgagataggtgccacgcattaaacctatggaactcgccttgactccaagtcaattctagccttatagtactttgtaataatgatgtgggagaaatctctgaggtaggtcagtactgttactctcatgttcatgtagtaatcctgaggttcataaactttcatgctgtttcactaagatgtttctgataggagttacagatactctccatgttgtggaaatatagagggtctctagggtcaggaagccttatgaatgttgtgagaggcagcttttctcctcaaatgtgaggcagctcacacaaaagaartacaaatagttaataaacaaacaaaaaattcaatctcaccagcaatcaagtttgaagtatatcagctttgacctatcaaattgtaaaagagatcttaaaatttctagtttgaagtatcatggaataaaaattttcataactactgggagcagttataatacaaattatcatgaaaacagtgtggtgttatggatcaaaaatgctaaatctgtccttttgatgcagcaatttggcatataaaaatgtatcccgaggaaataatccaagatacaattaaagttttatggataaagctgcttaaaattttctccccaactttttgatattatacattattcaaatgtgcatcaatagcataataattcaattattgcacattcattttatggaacgatatgaggccattaaaactcatgattttgaagaagttttaatgacatggaaatgttcacaatgtaatgataagttataaaaataagacataaaattgatatacagtatcatttcacatttgtaaatataaatgcctgtgcatagatgtatgaatgtttgctggtggttttatctgtctattaatattatgttacattttcttattaatatttgatttttaaaaatattctgcaatgagtatatttgcttttgcagtcagaaaataaagcaatggatgttattttaaaagaaatagctcataaagtaaatatatatatttacatataatattwgtttatttatttatttattttgagatggagtctcattctgttgcccaggctggagtgcagtggtgtgttctcagctcactggaacctccgcttcctgggttcaagcaattctcctgcctcagcgcccccagcagctaggattacaggcacatgccaccacacccagctaatttttgtakttttggtagagacagggtttcaccatgttggccaggctcgtcttaaactcctgacctcaagtaatctgcccaccttggcctcccaaagtgctgggattacaggtgtgagccaccatgcccggccaaaaatatgtatttaaatttaacctattaaaaatgtaactttaagactcaatatggtgctgtatacccagtttcatagccacttatttattcttcttttaatgaatatgtattgagtgtcttttctctgttaggtgctgttttaggcactgaggagacaacctttttgtttgcagaaactcctgaatccaatcgcttctaaccacgtttttttagatatgaactttcttcatatccagtttcttcattttgtctttcctaaatgtggttctaaaattgtattttctctagtttaaattcatcttgtctcttttttttaatttctttcccttaatgtcaaactaatatgtatgtatatcttttttcgatgtgttttatatatatatataatatttatttagatatatactctaaaatagtgtctgatattccttacttgccatactgtagaatcaaactgcctcttggtattgttttggaaactgtttttaaaaattaaaactataccaaaatccacagccagcaacatactcttatttgatgatggtagagatggtattttgctcttgagtaattctatctaataaattctgtggattttgttggcaagttttttctagaaacagattgggtttttcaggctcagcagtcatggggcaaagaactacttccaagtggtaacttcatgctcagagtataaatttcttttcttttagtatagacttagacttttatataaagaggacaaatccaattcagtagctgttaaaaaacccattcatcaaaaagcattcctaaatgtttgaaacacactgaatcatagattttattrctattcagtagtacaatgacttcctcccttctaagaacctattaactactcattgttgtagaattgaacctttcgaggggrtatattctttcttaacaggatttggtgaaatataatgataatttaaatctactaaacagattatttttctcactggcactcttatctttatgtttcacacctcagaattttcttaagacttcatttttagaacgttcatttttaaaaattcttaataaatgttagaaaatgtgtcagtttttatttgatctgggaaaattattttaatggactgttttacatagtcccgcctcatatggttgtatcatttgcatactgcttaaaggtatagagggtgcagatgcaagtagtggttgaaatcttgtattgctgagggaaagatgtcattttccaatgcagttaaccagatgggaccattattgattaattaattgtaattcatatgcatgctatgtgtatatatatatgcatgtgtgtatatatgtatatacacatatgtagatatatgtatatctacatatatctatctatctatctatatatatatatgtctatatccatatctatatctatctatacctatatctatatctatccactagcagatgacctgggcttatataagacaatgttttaattgttaacaaatagaaggtcatggtttatgtcaaggctaatgtatgcgtgtatgtgcttgtacacataagaaaaatctcacgtttccagaaaaatagtctattttttgctataaccattgtttcattagcagaaccatcaacgttcctaatggagtgttaataatcacctgcttatagtggtaccaggttctatgttatacttaatatttctttttgcgctatgaacttatattttaagaaaattgcaatagcatatatcaaatgtaagataggccatgatatccaaatacaaaaaatttctcttctaattctcccatttagttgaatttgaaacagggaatgaattcaggaaagtatgggaaaagctactaaacatgtcttaaataagctatagttctatgttgggtaacacagagatatggagatgtgagagcacactgattcatgttgtttttttccatatttattttcttcttacagatttagaaccctgctaagttctaaatatggtttgcctatcagtgatcaccccaaaacttgtggtttttattcttatgttaatgtttgtagaagaacatcttattttggttaaatgtagccactgcttccccctcgccgtaaattaggtgtatgatctattaaatttttaacactaaaactgacctacagttggctatgttaaaaagcttctttgaatctgatagctcatttttagctatttctttgaataatctgaaaggtatatcctgaaaaaaaaatatattacatagccgagttaacccagctgcatattaattctttaaaatgataaatatatgacatttggttattttaaaaagtaatgacatcaaataaattaatttttcatttcattatacaaagtcttttaggattagttagatgatgctaaaattctgtacatcaaaaatgagaataagacttttttacttaaaagattaatttaattgtctacacataatttaaaaggaacttatttttcctaaattctgaccaaaaatagggaaaattgttttcgtttattaatgctgatggttaaaatatgtaacatttattgaggtcttctgtcagaagcttcactatttttcaaaatggcactataaaataataactattgttatcccaattttacaaattaggaaactgaggtacaggcctctcaagtaatatgtcaaagtgaaggaagcaaaagactcaaatcttaagtcctgactacagttctatacactgcctttatggtactgagctatattaatttcaggcccctctccagacttatatagtgcttgcaaagcaaacaacaggctttggaattgccaaggaggatggatttctctcaaaattgttttataatgatgggaaggcacatttcatgaaatcattattttcacttaacatagaaaaaaaatctgcatgctgaaagtactgttctaccctcctatatcaagtatcctttgaaacatatgcggcctttgactgagcaaagaaataaaagaagatggaaggaagagagaaaaattcagggaaaggctttgctacagttttgctttgggacaatcagtaaccgttttctctacgtggaagttcgttagacattttgggaactgtcttgccctcctgggaaatatttagtttggtttaattacaaaaaaaaaaaaacagcttttttttttttcttttctttcttttttgagacggagtcttgctctgtcgccaggctggagtgcagtggtgcgatctcggctcactgcaacctctgcctccccagttcaagcgattcccctgcctcagcctcctgagtagctgggactataggcacctgccaccacacccggstaatttttgtatttttagtagagacagggtttcaccatgttggccaagatcgtctggatctcttgacctcatgatccacctgccttagcctcccaaagtgttgagattacaggcatgagccaccatgccgagccaaaaaacaaacaaacaaaaaaaccccaaaaaaacccagctttttaaacacaacctggaggagactagtacctaaatccagggcattgtctgccttccaccgtggctcccagctgtctttttggcatgggacaaagaacagggcttgacccacagttggccctcacagagtggaagccagcagaataaaggcaggaagttttaggaaggaaatatttgcttgtttgctttaattcaagagtggaacgtggcaatcttattgcagaattcatcttattttattgctttttaatagctttaaattttctattattccaaaatgtaacttttgtgtaaaatgtttctaaacacaggttttttacattagtcagggtttaattttgagttgtgacttgaacttgacttttctgtgagcgatgaagctcagtccttgcaaagctggatgggtttgcagtctgcctctcatctgctttatctcctcccttttccctcctacttccatgctgccttatcagttttagggagggatcatgaaattctgtaagagaagaaaaccaagtgcaggctgtaggtataattggtgactcagtcctgtgatggtcatcaaaggtgtcagttcctccgaagtgaatccaccatcacctgacagatacatttattgtttaaatgtcatgatgaaagtkcccaagagccccactggtctaaagtgaggtttctcccaggctgagcacattccttaggaaataggaatcctggtccctaatttatgaatatttrcaattgttatcatctgatgaacattttatctattttcttgccttctcccaagacagtacttttgtgccagtttaaaaatgtatgtaattttaaagtatgagagaaacaaggtagagtgatttatgaaaaagcacactgcttctaagtgtatctcccccaccaatgtaaacatctagattgaaatgcggaaaaaaaaaaaaaagacctgctcttcaatgtagaatcctcatactttaaatgtctaaggaaagagaagaatgttgtgctgaatcccaaagcagtgtgacaaagtttttcctacgatgttactgtggacagaaattgatgtctggctgggtgcggtggctcacacctgtaatcccagcactttgggaggctgaggcaggcagatcacgaggtcagaagatcgagaccatcctggccaacatggtgaaaacccatcactactgaaaaaaaaatacgaaaattagctgggcatggtggtgcatgcctgtaaacccagccactcgggaggctgagacaggagaattgcttgcttgaaccagggagttggaggttkcagtgaaccgagattgcgccactgcactccagcctggcaacagagcaagactccatcttaaaaaaaaaaaaaaaattgatgtctatgcactgataaaacaacaaatccttgagaatggggcaacaccactttctagcccaaattctgcttggctttgtcaccttccatttcagatgataatgtctcaccctgctctttctcatgaatagagtcttggtctccttctattttggaacctgttttcgacatgccctctataccttaccctgaaaagggatctaaatatcatttttgtgggaactgtcagggttagggtgaacccagtaaacctctctacccaaactaccactgcaggtgatcagttcatctgatcacagtctttccaatcctgttcttatatttgaccatttttaagtacactattatttgctcacatctacttggaaagtaatcgttgtcaagaggaatgatgaaaggatcatctttttcaagtgcccaggaactttgtgcatataatttcatttaagatgcattaatcatataatcacattttccatactacaagcaaataactgaggcttatagaggtaaataatttcccagtgctacacagctcacaagttgcagaggtggagttcaaagctaaaagtctgtttgtgtcaaagtgcttgctcttccatggcataatgaagcatctccttgtggatgcactgtcccatgtggttgtgagccactagttagtttttacagtatttctatagcaaatactgtaagtactagctttgttttatttcaagcatcacatttaaaataattttggttaatttacagagtatgatatagttttggcaagtagaagtatgtgtgagtcttactgcaatggataaatgtgctagacttcctggaagataagattccaaagaaccccttcattcattcattcagtcaacaactacttattgaattcttgccttatgccaggcactggggagagatctgtgaacataccaggcaaaaatctcagcctttatggggtgcattgttgggcaagacagataaacaaatgaataaaataagtactatattatatggygataattgctttggagaacagtaaaataaggagaaacaattctaaaagccattttaagtagggggtatcatgaaggccttattgaagggacatttgaataaagacttagaggaggtgggccaggcacggtggctcacgcctgtaatcccagcactttgggaggctggggcaggcagatcacgagatcaggagatcgagaacatcctggccaacatggtgaaatcccatctctactaaaaatagaaaaaaaattatctgggtgtggtggcacgtgcctgtaatcccagctactcagtaggctgaggcaggagaatcgcttgaacccgggagatggagattgcagtgagcagagatcacaccactgcactccagcctagcgacagagtgagactctgtctcaaaaaaaaaacaaaaacaaaaacaaaaaacaaaacaaaaaaaaacttagaggagttgaggaggcagacatttggggcaagagtattataggcagaaggagktgtaagtacggagaccatgaggaagttctcttcctgtaataagccaaagagaggctagtgggtgataaggtcagtgagaaaatgtatattgtatgaaattctgttaggccttgaggcattgtaattactttgcctttcatgatgaggaaatgggggatgtcactagagggttttgaacaggaaagtgactgctatgagttatgttttaaatgatcactctagcccacattttgagatgaggtgaaggtggaagccttacttcaataaaccaagacaggaataacggtggcttaaaccagagtagtggcaatatggttagtaaaatgagagacttaagttacatttacagcgtggagtcttctaatcatagaatttagtgatgagttggaagtggctttgagagagaaggaaaaacatcaagaatgacttcaaacatttggcctccatatgccattaactggactggagaatattagaggaggaataggtttagtggggagggagtggaggtgaagatcaggatagtcactttgcatgtattaagtttgaaatgtctattaagcctttgaaatgtcctcaaggagtaatagacatttcaaacttaatatatgcaaatattgtatagataataggatatacaaatctagaattcaggggagagatcaaggctatggatataaatctggagtcatcttgatttgtctatatcagtagtattgatgaaatcactaaaggagtaaatttacacacaaaagagaaggtccaagggctaacctgggacaccccaacattaagaggttggtaagatgaaatggaaaagagaacttcwcaagagagtcccagtgaggttggaagaaaatcaccagtgagtggcatgcttgaatgtaatgaagatggtaggttaagaaggagaatgtgatcaactgtgtcaaatagtgctgacagttcaagtaagaggaggatggagaactgactttagactgagcaatgtggagtttattgatggccttaaggrgagcagttttggtagaattgtggagcaaaattttggagtgagtaagagagagaatgagatgaactggagatcagagactatacaaaacaatagaaatcaccaatattgtcataatagactacaggtattatagctagctttaaagataatgtttatgttcgtaactttttttgaaatgatggcagtttctagacttgctagaagaccttgctattgaacattttatgaattagcatatctattactgtatcactaatttgtgtttttaatattgtgataactatgtcaagttaattgaagttatttatagtcctatatttttatttatgcatttaaaaacattgttctcagaaaggatcccttgtgattaactagtagtccttagcaaaaaaacttaagaaccattcccattttagggtcactctcaagatttctacagakcctttccttctcctatgctttatcaacactgtcactattcctaaccctaccatccccccttttctaagggcagtcacaaagtggaattaaaactaaagttgctatccaccatagatcctatgccattctgttctgttctgtatttcccccttaaaattttaatttggaatattatgctatgaagagatgcttgcaaatttaaatgaaccttccaatatctttcagaatgtcaaagatggaatatgttcacaatatttgattcaattaacaaatgtcttctgtttttctctcttttctcttgtagtcatttgtgaataattaacttgtattttcatgctacatattatctgagaaaagatcattgtaattagtaattagttctctactctaaaactttttgaagttcttaactacttctgttttgctgtagggtttcaaatgaggcaaattgaaaaattcaatcagacttagctggtattttccatacaacatctggtttgacagctagatgtgtagtcaagcttataaatcaaaatgaagctgagttggaagtgatatagaaatgcaaaaatgctccatgatttttgtaggagatttgtgatcattttttatgttaatgtaattaaactaaaaatgaacttctgtattttaaattctacacattttcattgtgaaaatggttttattataatcactttatgaaaaataaagttatctgcagagagagaaggcagagagcttgaggaaagaggagagaaagaaatatttttagggagtctgctagcaaagaaaaaaaaatttcaaatagctatgagggtcaacatgggaaacttacatacctggcttgaagagacttctgaaaggaaacaattataaactcagtacagactagccttgtagcaggatctgttgtttgaggtgttgccaactcatgcttagaaacttagacataggagtatagatgtggagggagtcttgagattggagaccttgccaaatggctttggtagaagaagatggggctaagaaagagaaaagaaagatagcagtttgtgtcagcaaagtttcttactcctgagtttctggtcggatagagagaaaattaaagctaggaaaagaaagaaaggtgtgctaagaaattaggacgagcttaagaaattagagattgcaatgagggacaagtaagttcagttgcactgagagtagaatgggggcattggcacaaataaggttgtggaatgttagacctgaaagtagttgtagaaatcatctactttcaccagttcattttccagatttcccagagaggttaattctctttcccaagctcatggaaataaccaggggcagagcccttagaactcaggggactgaattctgaacccttgcatatttttgttctcttggcccaattgccgcagaagtggaaagaatgataatcctgactcctcttcataaaataaatgatttaaagaaacatctcattatttttactgggcatgaggattgaaacaggaataaaaatagaaatcctgtcttggtttctagctcaaagagttccctgatcatcaatccaggcattccctgagaatgctaccattatcactgaagatttgggaacatgaaattctatagagaggaagaggttttgaagagaataaaagattgtcaaaaagttgaatctgctgcattaggacactaagccaacttctgctgtaagcttttgccgtgagtctgagggtgtaaaatagcagcagactgaagatagtaattataacttttttcaacatctaccctgtggataccagcgcttggcaggacctgtgcaatrgggatgtgtataattaagagagaagggtctgtagaaaggctgtggggaggagataattcatttacactctctctccctatgtctgaatagaagcgtaactacttggacaagttaaatgatatctgacctataaagggaactttcatgaacctcccatttatcacgtatcttgaaagtgcattttaaatctcaaaccttagctctccccattttaattcctttccttcttctttgagcagtcatatttggaggatctcaaaatgcaagagtgtgagaatcaaaattaggatagtttgccccaggagtagtaggatagtgagtgttcctttgtcaaatttggctctggtgctggaattttaacatgtgttattggctctggggattatgttctggttccggctgagttaaagcttgctttgcttttgttttctgtaagtatttaataaaatggcaggattcgcttacttacttattgaattcttttgcctgggaaacatgcaaattctgaacccagctgcacatttgtgacaaagagatagctaataatctgagctatatgctatttttttttaaaaaaaagctttttatttttctacaaaggcagaactatagtacacaaagttaagccttttagagactgagtttaaatctgctttctattaatagctttcaagagtttttctaaataaccttcaggcacaggcattttttttttttttttttttttttttgcaagaaagcaggtggaggraaaaaagacctgtggtttgttaaccaataaatgctaagttgctaaatcttcctgtttcaaataaatcagttgggccaattagaatatttattttcttcctttctcttttattcaatattcacaaatgatactagagatggaataaactcctgagattatctggctcagattcttaatgttctggaagctggtactgaaggccagcaaggatgaatgatcaaaattgcatagtttgtgtgttcaataactgcttttggcccctctagttctatgtacccttcctctgtaccctgctccaggccacagaggctcacctttatgaaatgcttcagagggccctctcactgcttctggttgcatttggccatatgtagggttcatatgcgtaagtccaggtggcagaaggagagagaaaggagaactctaatttctctggctcccttcaggcctagcttagtagtggctgcaatgctggtgaccatctcctgtaagcacacttttcagcagttctagcaaattttccccttgtcttctgccttaggatggtgatgccatcctgctgatgctgtccccatgtttcaccatccttgccagctccccctaagtcggcctacatttttgcaaaggtttgctggattaactttcttgagtcactccttttgagtgtatcatctgtttcctgacagaatccagactggcacagctctggtaagcaccagtgctgggactgggacccaggactctttaccctattctaatgtccttcccactatgcccaagagtacaagaaaactttgtaatcttccttcaggatcaaacatatatatatgcatatatatatatgcatatatatatatgcatatatatatatgcatatatatatatgcatatatatacacacacatattctggatatatttcttctaaagtattttttacttgtctctcatttctactgtggaataaatgtattctttcaatttaataaatgagcaaatagtaaatttaggaaaaaatgataataaaagattacatctcacttcttttgatttacttggtgaagccagactgtgggagatatctttgataaagttggtcctattgaccaagaaagaaaacattatactaaagacttcacataacctgtttattctctatttcccatcaggagatggtttgtcaggaaatgtgtgatagatacatgtcatgaattcaatttagacagagctaggtagcattatggctgtttgtccacttttcccttttgaattatcttctacattccatggttttattaccactagttttctttccccaaagcaaagccattaggcattctttttgctgtgcacttactacataatttccccaaaaagcttctaaactctttttgtcccgtaggaggatgaggcccttgccagatctcctaagggttaggattaaacggaatattggttactgttgagcctgtcactgcatcagttttctggctcctcttagagtgtgatttgccaaattcagttgaaatcagttaagcaaccactttggaaaaatacagatgcttttaaacacagtcagaatactgagatttactctgcaggaaaacagagcaacaggtaaaaataataagaggaattaatttcactctgaaatgacagcattrtgccttttgactattgactttttgcagagaacatttcactggagggaactgacaactcttactagctgcctgcaaagcttgcctcctccttgctaaggagtagaaataatgtaattattgtttattgcctggatgacaataacttgcaaagattctcagcccaagctctgcaagccagttaactctggatatcagttggttttacagggtcaatacattaacaagatagcaagcaatgcctactcattaaggctcaatttactcccacttcccttgggaagaatcccctctgctcccaaaactcttaccagtggttttcaaaccttactaagcttgagaatcatttgctgggtctggcttattgaaacgcatcctagatttgcacragacagccactggcctatccatcacctttgtgttaattagaaaaagaggaactctttgggcagatgcagcccccacatgtaggaaatatgaaggctaacaagcaaaaaggttcttcttccttgggtggtcaggtacctttgcaaaatgcacaagaacaaaaccaaatgccatagctctagggtcttaatatttttgtcagcttctgcagaattcccttaaaggctctgcaagttagatttgagcacccctttctggcagagcactactccatgaccagaatgactaaattttgcctaagcaaatttccaaatgccatgttgtagcgtcactagagaaagataccccccagtcagatcttggtgatgaaggtgagacacaatgggctccaagaatttgaaatccctcatctgtgaaggcagaaatactaggagaatgggtaatgtttataccatcaatgaagaaactcttgtaacctagggttttcaaattacagaagaggaagaacaatggaggctgatctccagtttgtgacagtctagataggtggcctcagtcttgctcttataaattctaattcccagaagtcatgcagtcgtgtgtctatccatatatccattcatccaacatttattgagtgtctactctgtgccagctgttatgagaggcaatgaggaaaactggaattaatgtaggctttggagccaaacagataagtgcctgaattctgtctccctcgacttcttagatgcatactgtcatgcaagatgattaattttactgaattggcattgtcatttggaatgtattttatcacctacatcatagggtgattgtgagaataagatattatacatttctatagtgcctactgggcttggtacatagtgagtaatcagtaattgatagatattattcagagtcatgatacaatgataccacaaaataatcgktatctttttcttcctattctctattgatgatctatgtatataacatccattttcctgtcttatattgtacctgagtcagaataaaatggatcttttcagggaaacaatactcagagtaagattagaaaataccaaaggcacctaggaaaagtttctgacttttcagaggttagaggaagtcttcctwctattttgttgtttaccatgtattatatgataagaaatttggaaagactttgataatgctatatatgttaatgtgctccaatgttttccaaagcatgtttacgtctagtatcttggtacttttcctaattgagatctgagcttattacttccrttttatatatgagaaaactgcacaaaattacattacaagccaatgacagtgtttaggccagaatccacagctccaggtctagtccagtaatttctctacttgtagcccaaggcctataataatcagccttttgtgggaaagacttgaacaattcagcaattaaaaaagaaaaagtagcagtcgattccgccaaggaagggtatacctgggctgtgacagtttctcaggaaatcacttaacattttgaggcctgctagcacattggattttaatccaaatttatctaaaaataattttcaatggactttaaacctcattttccttctgttaacaatttgacataattttaactgaagctaagtttatgtattcatattcatccatggggcatgaccagtgcctacagtttgccctaagaggtcagcattaatattgtaatccattgcgggaccgtgtagtgcacaacatgctctcctgtacatagtagccttgcctttgcctgaatgttgtcacattattttcgctattttaagcgtttttatttctcctctgcagtcactgaggagccctgcaaaaggagctcaagaagcagcaaccttgatttttaaattagtttaactagacacagaacaaatttaagataagtttcaaatatatggtttacaacatgattcacatttgtctgtcaaatactatatggttacattcaatttataaaagcagatactgaaatgtattaagaaaaatctatatatttcaaatttcatactagaaactttattttaaataaatattttatgtttagaagaggctggatttactgactagtagaggcataaattttatttttgaccagcattttaagttaggaattatgatgtacatatccagaatggaagtaacagctagtatttgcgagcacttactatgcaccagctttgttctaattattttgtatttcaaaacttctgtgatagtcttaacaaccttttgagatagattttattattatcctgattttatagcagaggaaatgaaggttcagaatgggtgggttatttttccaaggtcacatagctcttctggttgagatttgaactgaccagtgtctctagaacctggcctacaaagccttgggctaatttttaaaaaaataaaacttatatcatctaatattatcttaggaggacagtgtcagcatgtcataaaacatatcagaagcacaatctggatgatatctattttaagtttcaaagataaaattattatgtagaaaatagatgaaattctctaagcaatatttattatttttataaggtaatgtatctttgaagtttatagctatcttagaaaaaaacaaaacccatgagtcataactaactatggtgtgccagtaagactgtttcaagcaaagagtctttctggaagaacatgatggtatgacttattctttgttgggaaagtacagaaaaaaaatgtaatgtaatcatcaccatttgatcaaaatatggaaaatcttaaaataaacctccttgattcatgtattcattttcaactctctcatttcagacaaccggcagtgagcatttactagggaagatttttgtctttaataacttgaattattggtgggtgcacattcaaagacaattaatgatttccttcttcataagaattacttttctgtgatatcagaagtgatatgctggattgatttgtgtgttgcttacacaaaagtcagaaagatcttgagggaactaagttatgagcccatcagcgaggctcaactgggtcaggtttatgattaagataaccgaggtcagacctgaatagaaacttccacttggttttgctggttggtttctctgtacactagagttgtttctcagtaggctctgttttcttcagtggaaggtaaagaacatagtgggaatcatattaatagctccaggtttttgaaaactacttggaggtcttctgtggaagtatttcaaaggataccttgcattctgaacggctgtaacactactgtgctggcttttgactcttaggttagctaaccagggaagaacctgtttttgtatcaggcttatcttaaaattgttgaaattatataataaattacaagcagggctaattttcaaaatatttaacaactagtaggacataagcactaaccaagcagaagagtccctggctgtaaataatgggtacattgataataattgcaagtcagattataaaggaaaatggattttcagagagatcctcaatttacctgactatgacaatgtcaacttagaattaattgatttaccttctataatggcccattattgcttaagtagtacatcatcatgatgcacatgcatgtgtgcgtgcmtccacacacacacacataaatacacacacaattaatttttccattaggtatgatatcctaatgtcatcaaatgaaaaacaagacggcataccctgaatcgtctccaaggcccttcgtagcttaaaaaatttactttctggctgctacagatgygttgcttatgtcttttgtctctgaagatttgattttacctcctgatgagctgttgaaaggtagtagctcttagattgagtataaaagtgacatctgtctcttttcaaagcctcagaacttttgtatgcatctgggaagctytgtcccctgcatagtttcaattacaatgagtattcttttcattttggatcttagcaaagacttttgccactgtgtggctgtgtgacagctgctgtacacccctccagtggtggttgaygtgatttctgcacctgtcttatgcttaaaaatattggggggagaaaatggacccagcatgctggaaaatattgacttgtttcccatattaggcttagctgctgaatgtcacggatctggaatgagaggaaagccagccaatttgtcaaggtcactagctccctctctgaaaagtgctctgtttatctaaagagttctgagacagggtcttatgtccattaaagatgaaggttcactgttattttagggctggacttggagatgggctttctgaaaaatgtaaacaacttaatcaggccaggtgagatgagcctatctctgtatgcatcccctacctccactttctgtcctctagatcccttcccagtgtagtattaaatgtttcacatgctaaaataaatattctgaacaaacagcaggtcaagtaatccagtttcctttttgggaaaaaaataaatcacattcaggattaatggagaggaacaaaagccaatagtrtggttaagaatttggattcaggagcaagaaagacttgggttcaaattccatttcatgccctatctctgtgatcttcaatatattacttaaaatttctatgcccagtttccctatccggaatatgagtaaacagtacctatctcatagatttgtcgtaagaattaaatacgttargggacacattattgcaatgcctcaaacatagtaagccatttaaaagatatggtgttgggctgggcatggtggcttatgcctgtaatcccagcactctgggaggcagaggcggatggatcatctgaggtcaggagtttgagaccagcctggccaacatggtgaaaccccatctctactaaaaatacaaaaattggccaggggtggtggtgcatgcctataatcccagctactcaggaggctgaggcaggagaatcgcttgaacccaggaggcagaggttgcagtgaaccaagatcacgccactccagcactccaggtgacagagcaagactctgtcttaaaaaaaaaaaaagacagttgtgtgtgtgtgtgtgtgtgtgtgtgtatttaatgttaaagaaaaagctggcaatagccttgtgataaatacagtgcagcaaggcaaaatgacttgtcttgtatttaaataagcataccatctattcagaggaaatctagcattcaaagggagtttctgcacagtgacaagagaggtgctgaatccgacagatcagaattcaaattctgtctcatgtgattacacctcaatttctttacctataaaatgggttaagaccaaactccctgcactgtgcraagcctctaaaatctctctctatgcccctcacacagtgtggcccttatatgaactcatgcttttttgtttttgtaaggattaaatagttgcagctgaataaatgttttgcatgtagctacaaaggttgcttataattcaggagtaattttatacttcataggatgatgcttttatatttctaatggttcttttgctgtatggagccattcacataactgaaaatggtaaacatttattaaaaatatataaaatatattaaatgcaatgttttatgatatgaactaaatctcaaatatcatacatattttgacaaagatagggaaataaggatcttttgtttaatatactagagtctcagtgagactctcacaagtgtgacattcatgtattcacatatgattctttaaacagacatttattaaacatatagtatatctcaaaacctgccttaagcatgtttaggatacaaaaaaaatgtaagattttttcctccctgtaaaatttccctgaaaggaagataattatagatataagtaaatatamttcaagttagaaaattttaatggctatagaagtaaaataataataatatmcaattagagttgaatggggaagaaaaatgcttttggttgtatcagaaaatagtttatgtaagagttaaatttggttataaaatataatttgtcaaaaagcaatgttccaggcagaagaaataatttgagcaaattagagatagaccctgaaggagacgttcaaagagtggtaaatcatggttttgttggagcatattggtattaagagtaattgcatagagaaacagaaagactaggttgagcccagattgtgttaagtcatggggagatgttagaactttctgagctgtgaagtgacaagttttctatttaatgtctggctttaggcccgtgattctgaaccactcagaaatctagagcttttccatttcatagttacagtatccattcctctctgcacacattgttagaatcacaaaacatgtgagaaagctatccttttaggtgtgcattgggaacacaagccctgtgaaattggaggctgctgcctgtgtctagcaagtctgctggtatttgccaagcataagaaaatggactttaattttcacatactataagcatttgaaacatacgtagtggtactccaatcatgtttaatcctatactcactgcagactggatgttttcaacctaacaggtcctaattttcatattggccatagtgacttttttttttttttattttgagatggagttttgctcttgttgcccaggatggagtccaatggcgcgatcttggctcactgcaacctccgcctcctgggttcaagcaattctcctgcctcagcctcccaagtagctgggattacaggcatatgccaacacgccaggctaattttgtatttttttagtagagacggggtttctccatgttggtcaggctggtctccaactcccgacctcaggtgatccacctgcctcggcctcccaaagtgctgggattacaggcatgagcccacagcacctggtctggccatagtgatttttaaaggggatgtttatcataatatttccacaactgatagtttctcagtaaatttattattgatttggcaaaatatatatttgaataaatactaatcatagaaatttgcctgcattctttcatattgctgaatggctccattgaatactttaggaatgttatcaatgcagattataaatttttgctaatgtttgacaataaatttgttatatttgtttgcaagattacatgctttttccagagtctcctaatcaaatagctttaacagcaaagaaaaaaataacacaattataatttatctgatctggaattatgtctttgttctcaaaattaatacaaagcctaattaagagacccacacttgacaccttctcctccctctcttttactgaaaagaacatttcactgaagtattatattggactgctttatgttatgatttatggattcacattgagtttctgggattttttttacttcattttaataggatcataggaatgaagggagcaaataacagattgttatcatttaatatgttcaatttcatcagttggtgtgattgcatatgtggtttaccagtccaggatagaacaccccatgtccttgtggtattcttcctgtagatataaattttataatgaaaatgagccatgctatatcttatggttaagctccataaatcaatgactcttagataaataacacattaataaaatcttcccgagtagatctttaattgagagcattgaaaataagaatcggtcagttgtcacaaagtgtcacataacacatgtagtaacaggtctgctctcttaaaaacgcatctccatgttgttacgcaagtgcatttgtcttttatcctatccttgatctagatatttcctagacattctccccattctgtccattttgcttgttggaaaatatctttggtcaatgcattcagaaaagctttattaaaactttctttgtacatggtactatgttatacgatgcctcaactaccaggtttttcagtctgtctgatcacagttcaccaagtgggcataatttgagaatttcgagaagagccctctccctaaaatatacagtgatgcactacaataacaatgttgtggccaatgagggactacatrtatgatggtgatcccacaagttatgatattgtgtttttatcctaccttttctatgtttagatatgcgtagctacacaaataccattgtgttacaaatgcctacagcattctatacagtaacttgctatacaagtaagttcctagcctaacagcaatagcctataccatatagcctaggtgtgtagtagactgtcatctaggtttatgtaagtacactctgtgatgttcgcacaatgacaaaattgcctaatgatgcatttctcagaacctattcctgtcgctaagcgccacatgactgcattttcctctcttggccagcctaacttagtgtcagtgattaaaattttttctttaagaaatagtatattttattgagttaatctgtattttccctaaatttatcaagattaaaaaaagaaaaaaatatttgaaaacagaatgaaagaaaaagtatgtgaaaccaagggtgagaaaggtagggaaaaaatacaaattatgaagtcctagaaacttattagtctctggaaatttattagtgtttgtctctgatgcttttttatattttcagcaggggagagggagacagagtgagagagggtgggggaaacaaagagggcaggctcagttgcttaaataacaacacattttaaaataaagttatgtagaagaagcagaaccattcccctttccccatggaccctcataaagaaaataccttgtgatatagtgaaatggtaatttcaataatgttctaatagtaaaaccagcattgagtgtgatagctctgtttcttagtgtcctttaatatagtgggacctcagaacaactcaagaaatgcatctgtacaagataccccattagagagtaatcagagagtaattggtcctctaagttacaacactgtcctggggccataccttggaaagataaagatttaggcatgaacaccttggtgtaaagtagtttatgcaagttttttctaatacaatcattagagtagggctggctttctaagttgaaggccagagacagaaagaaggctgccctggagagattaagtaaaagtcagggatttggggctgaaaacaagggcaacttaaaaagatgattacctcagtgtccttcttggagctggttgtgtacatgaatagattttaaaaatgcaaaatattctaagattaagatttaccagcgccaagaaaagagactgtaggaaaattttcattagcaattcctgagtcattcatgctgtggaatacatgaaaaaagaagtttatcaagaacttccaagtacatacgtagatccatcatttgaataagagggggattaattctatgtgtgtgcctgggtgtggtggggagagaaaatggggagggacagagatgagaaatatgtagttctacaactacactcaagaatatagatgaatcttgtaaaacatgatgtcaaatgagaaataagtgagactcaaaagtacatgctttatgattgcgtttatgtaaagtaccaaaacagataaagctaccctatgctgttacaggtaacagtagtggttaccttgggtatgggaatagtgattggaagaactagagggggctttgaaacactgctgatgtgttctgtttcttgatctgtgtgcagagaacttgtgtgtgctcagttattcatcaagctgtacattgaccatatgtgcacttttctctatgtatattatatgccaacaaaaaaagtttttgtttaaactatacaaatgtctctcacatattaaaatattgctaacttaattatgctgctgctatcctttctcaactttccagcatgcaggtcaaaatgtgatcactatttccaaagaataagataattatcattggattccaattctctccctctctattttctcacagaattaattatccaacagagtgcaggcacacctcattttattgtactgcattttattgcactttgcagatattatgatttttacaaactgaagttttgtggcaaccctgtttcaagcaagtctatgagctctgtttttcaacagcatgtgctcatttcatgtctctgtgttacattttgttaattattgccacatctttaaacattttcatgattattatatctattatggtgatctgtgatccatgatctttgatgttactactgtaattgttttggggtccttcaaactacaaccatagaatctgacaaacttaatcaataaatatgtcctgaccgcttcactgaccagccattctctatttccctcccttactgtgggcctccctattccctgagacacatcaaagttgaaatttcacccattaataaccctacagtggtctctaagtgttcaagtaaaagagagtcacatttatctcacttgaaatcaaaagataaaaatgataaagcttaatgaggaaggcatgttgaaagctgaaataggttgaaagctaggcctcttttgccaaatagctagccaagttgttagtgcaaaggaaaagttcttgaagaaaatgaaaagtgctactccagtgaacacatgaatgataagaaaccaaaacagacttattgctgatatggagaaaattttagtggtctggagagaagatcaaaccatccacaacattccctttaagtcaaagcctaatccagagtaaagccctagatcctttcaattctacaaaggctgaaagaagggaggaagctgcagaaggaaaggttgaaggtagaagaggttggttcatgaggtttacagaaagaagccatcttcataacataaaagtgcaaagtaaaacagcacaacgcttgaagtggaagtgatgatgtaaaagctgcaacaagttattcagaagatctagctaagataattgatgaaggtggttacactatacaacagaactttaacttacactaaataatcttctagtggaaaaagatgccatctaggacccccatagctagagaggagaagtcaatgcctggcctcaaagctccaaaggacaagctgagtctcttgttagaggctagtgcagctgctgactttaagttgaagccagtgctcatttaccattctgaaaatcctggggcccttaagaatgatgctaaatcaactctgcctgtgctgtgtaagtggaacagcaaagcctgtatgatagcacatgtgtttatagcatggtttactggacattttaagcctcctgttgagtcctagtgctaaaaaaagattcctttcaaagtattactgctcactgataatgcatctggtcacccaagagctctgatggacatatacatggagattaatgttgttttcatgcctgctaacaaagcatccattctgcagcctatgaatcagggaataattttgactttcaaagagtattatttaagaaataccttttataagtctcttgctgtcttggatgataattcctttgatggatctgggcaaagtaaattggaaaccttttataagtctcatgctgccttggataataattcctttgatggatctgggcaaagtaaattgaaaacctttaaggtaagagtcaccattctaaatgttgctaagaacattcgtgattcatgagaggaagtcaaaacatcaacattaataggagttaggaagaagttgattccaaccctcatggatgactttgagaggttcaagacttcagtggaggaagtaactgaagatgtggtggaaatagcggggaactagaattagagatggagtgtgaagatggaatggaattgctgcaacctcatgatcaaacttgaatggatgaggagttgctgcttatggatgaacagagaaagttgtctcttgagataaaatcttctcctggtgaagatgttgtgaatattgttgaaataataacaaatratttagaatatttcataaacttataaacttatttgatgaagcagtggcagagtttgagaggattgacttcaattttgaaagaagttctactgtgaataaaatgctatcaatcaacaccatatgctatagagaaatctttcatgaaagagtcaaccaatgcagcagacatccttgttatcttattttcagaaattgccacagtcacctcaacttttagcaaccaccaccctgatctgtctgcagccatcaacatcaaggaaagaccctacaccagcaaaaagattgtgattctctaaaggatcagatgatcatgagcactttttagcaataaagtatttttaaattataagcacattgtttctttgacatagtgctactgcacacttaatagactacagtacagcataaacatagcttttatattcactaggaaaccaaaaaatttgtgtgactcattttattgcgatatgcactttatggtggggttctggaaccaaacctgaaatatctctgaggtatgcctgtatttgttttcccctgctgtacaaaagtacaaaactatgtttaagtagcatgtttaattcttgatgccattattaccacataacatctttatatttttatacaaaacacctcgccgtgagagtttcttaaggctgtgcttagtgttaactggaagccaatgctaatactgaaaaaaaaaaaagggtgggggaattggatttgggatcaggatgtagataggcttcccagaatttcaggaaaaaaattcagaacaggaaagagcatcttgaagatataccataaaaagatggtctttttgagtggtatagtcagtttctaatttaagagtaatttctctctcagatgtgttaaagtgtaaaaaaaaatctaataagatttaacacttcaaagtcattaactaactaattaactaatgaatccacacaacagctctatgaggtttatgctaaatatctatcatttcacagatcttgtgtcatttagaaactcttctagcttttctcgtctctgctcttttcaaagtctttaaaaagaacgaattattttcatgtctccagtgaaggacatgtatcaaatttgtctcttgagaaaatccaatgctttgtgaagtaaatttccaaagccagtcaattaactcagtgcttttcctattaatgtgactccaaatttctgatatcccttgccctgagaagctattttgtttgccctgggaagaaagaaaagtcaacctatgtgcctgcacattataggtgctcattaagtgcccattggaattcttcctttgtaactctttgattaatttgcttttgcttaatttagccatcatttcacagactctactggaatttttaaaaacataaatattgatattgtgttttcttcctttaaatgcctaaattatttcacactagaaatgtaatagttactaagttctcagaccattttggtttactgtaataacaatagcatgttctcttgagtgctgagtatgggaaggtgtgatatgtccatgtttggggtagagaaaggaaagagagagtgagaaagtgaggaaggagaaaaaagggaaagagagagacacatgcacacacacgcagacacacacacacacatacacacacacagagagagagagagagagagagagagagacattatggcaatgttttaaagagagatttgtaggataatggaactaatttctcaagtaatgtttataaaatggaaatgatgttgaattactagaagaaacacaatactaacaacagaatttttctgttgtgttgctgaacaacattgttacagaagaatacttaatagagcaagtccattaaaggatattaataacgggcttgcaaattgctggtagatccttttcaggtttgatttaataatgattggtaagcgtcaaggacatttaatcattttttatatattgcagacttggcaatttatgtgtttaatgtgagaatttccacttcaccacttgaatcaacttgctgcattgtgaaaatatctagcaaacgacaggagaaaactaacttttactgacacctgctgtgcctgcaaacatatgttatctcaatttatcctcaaaattgtgctgggacatgaagtattgttcccattttacagatgaggaaactgataccatgccgtgctaccaggctaaccaaaactgcascccaggtttatttaacttcaggtctagtggattcgaagtctacgatctccctcctacaccatgaaatcaaagtaagtcttccacgaacagacttaatttgaaaacctttaaaactctgccggcccatctatcttaaagtggtttttttaggtcatcctctgtatatgctgatgtactgatataataaaaacttggatataagaacctcttttgtcattttttgcttttgtcttctaagatgtcatttgtgtgctccctctttcagccacactcagctcacgcggcttgaattctggctggcacgggcagtgcggtcaaggctgcagctgttagcatcccctcctcccatgctcatcatgagttctgcaaatgagccctgcagactgatatcgtgttctgcagtttatttgacaaatagcttttatggcctttgattttttttcaratcacttataaattctagcaacagacaggttgtttgtcagattcaaattccatacagttgaaaggaaagaggtgaagattcctgcgttcaaagtggactctaaccttaagatttatttgtaaattttacttaaaattaccttgagaggaacctaagatattctcctggcagtgcctagttgcaaattatttctatccttatgtcataaatcttgataataagtcttttaaaatgcactcgagaaatgtattttgtgtttatagtgctggattttagtgagtcaaattgtgttcaggcagtatgtttgcctcttcatgttctgtgtgacactggagtaaaatggagacttcagtcattcagctgcaggctctaagaaagtctgttgtaactgtgcattttaattaaccgactcagctgaggaaatattgtctctctactgtggtgwagctgtctgccttgtaaagtacctccctggataaacagaggacttttatttcttaaactgcctttcccccatcgtctttaagagtatgttgggctttcttttttttattaaattacaggtggagaaggtttaattaactctaaaatgattcttcagcaaactcagttgcatttttttacaacactttgagctacgatatagttactgcaggctgcatactgttattggagcatacagaaacatttagaaacctaaatctgttttgtcatattaccagagatggcatctgcacttgggtacagttgaaatacaaactgaagatcagataagtttttttttttgtttaaaccagtcagtgggctactgtgaactgagctaacaaaatgggaataatttagccattgattactttgtacaacacactgctggatcttaaaactgagttgaatgtgaggagatagtcatagttcaaggagttatatgcaaatttgacctctggaaatataatttgtgggtttcatatttaaagctgctgaatacattttgtcagaaacctcttgcttctatgattaattatagattagttaaccactggacttcttttattcagtcatcatgagacactctatgcaaaatatacatatattttttaagagacatgatcttgctctgttgctcaggctggagtgcagtggtgcaatcgttgctcactgtatcctccctgggcttaagcagtcctcccacttcagcttccaagcatgtgccatcacacccaggtaattttttttcattttttgtagagatgaggccttgctatgtttccagactggtcttgagagctcaagtgatcctccttgcctcggcctcccaaagtgctgggcctataggcatgagccacctaccacacccagcctatgtggaatttttgaatctaaagtagattaatgcaaatttcagaacaacgttttccatcttttcaaactatgcgctctggagcccaagattctctacctaagttggaccaagcagattccagtactgaaagcaaaaacaaacacaaaacctaactacttattttactgttcctctttaaaaagaatgaaaacaaagaagaattaaaaaaaaaattaagtaaccactgggtttatcttaagcaagatgcgtataggggtaaaaaatgatgcagtgaccacagtgaaaccatgaagtggataacaaagagagaacttgaggattgcagttcttggaagattgttacaagtacaatgaaattagtttggaatttcaaatagaaggtaaaaaaaatggactgcaaggttctcaaaagtccttataactacaagtttttataactaaagtgaagttttatttcaatttgtttatcacgtatgttccaaaaaagaatccactctgtgaatgacaaagtttactgtggtccagaggctgacagatacttcacatgaaaagggatatggatggtctgtaagtctgccctaccttacaaattgtaattaaaatgcaacttaaaatatattagggaagaggtcatttttatttctaaaattaaactataatttacaaaattatagttcttcatttataggcccaaacaaaagagttgaatacaaatagaatttttccctccttttacattaaattattagatggtgtcattttaattattgctttcatgagagataaaactattagtattttccttttaactcagtytgaaggcatatatccaagttgtatggattgacttaaaagttggatagaaagaaaaattgaaagaaattttaagtggagatgagaaagagaaaaagaaatgtagtgcaaaggaataaaggaatgaacagaagggaggaaaggagagactcagaaaagggaagatgcttcagttctgtatgatctaacatgccttctgcatgatcagcttttaggaggtaaaaaagatgagcattactacttgtcagcttctgagtgttggaggcctccagtagagtagttactttggaaacgcgtaaaatcagaggccaagacctagtttctgtcatagcgtagggtgttcccttggtgtgggtaagagaggagaggcctcagaatgcatctaaagctgaatccttgcagaactggggctgagataaggagacatccaagctaaagagcaaaggacctttctcaggaggatgtggacggggagagatcacaaatgtatggcttttaaacaaacgttgactacctagcctctacaaaaatgaaggtgtattcgcagctagacttaaatattatttctttgtctcaattttttgtagctcttattccctttaacatatccctccaaatgttcatagctttggtaactatcacaggaaaaaatgattggtagattattcacaacacacaagcaatttaaatcagaacatgatcctttaaaactgtattttcctaagaatacgattaacctttggacaatatgggtttgagctgcatgagtctactcacacgtggattatcttccgactctgccaccctgagacagcaagaccgatcgcttctctatctcctcctcagcctactcaacatgaagatgccaagaatgaagacctttaggattatccatttcgcttaatgaataataaatatattttcttttccttatgattttcttaataatattttcatttttctagcttactttattataaaatacagaataagatacatatataaaatatgggttgactctttatattatcagtaaggcttctggtcaacaatatgctattagtagttctgggggagtaaaatattatatggatttttgactgtatgggagggtttgttctcttgaccctcacattgtttagtggtcagctataatttttgaagcccgttaaatggtaaatgagaagagtgtacatagtgaaaaagtgtatattaaattaaaactaaaaaaagtttttatgactacacaaagaaatataaggttgatacaattaagtttccatagagttgaaatgtttactgtagattgtttgcaataataacttcataataatgaccagaaaatcaattcaacaacatctatcatgcataaaagactgtatcagccaccattggaagaagaaggaaaagaagagattatccatttcctcaaatcgtgatacaaaccccttaataactctaacataaggtagactgtgatgcagtctctgggagagggggaaaaaaaacagaaaagagggaaggaaaagattaataagacatctggagtgagcagaatttgatctattctggaaaagctcagaaattgactggaggacttgggagggaggaagggcawttctcacaaaggaaattgcttgatcaaaagcacagagattgggaagcatgggctactttgagaacctgccagtggtagagcatgggaaagggtagggcaataaaggtggttgtagctgggctttgttgggaggctgaggacattggttttatgtactaccatcactcttcagtattaactacgtgcccagatgcccttgagcttatggaaatttagattctatttccggaaagtccaccaggagtctgttattcaaaataaaaataggtagtgtaatatgactttcaaagcgcattrtggtactgagatttttagcagttggaactaatgaagggaaggagaaagtattatgtgccaacctttgtattaaatgattttatctacatcatctcattgaatcttcataggatctttatgagtattagattatatatgaaatgtaccaggaaaaatatttaacaaatgctgattctttgccttcttgcaacaatcccatgataactacattgttttacacatttttattaggatgacgatgttgagactcaaggtttcacagttactaaaatcccagaaacagaattcaaactggatccatagtccaagttctttctggtatacaaagttgtctctccatgaaaaaaatttaaggagaaagactttgtataatggcgattcactgaaaaaaaaattctcaaatatagtttattgaatgaaacatggattatttaccctgccttggctcctttggaaaggcccaaactcatgtttgagaaaaatactgaggaatctatagaggatgatttcagagtgctttacaaaggtctttgcctaagaagaactttccccaaccctgctggctatgcctgctcttaatatataactttcttacctttagctgaagactttcatctctatttaaaggtgagtgcccttggaagggacagtaatcctgctctcrctctgggagcagatatttgataacgcataagaaaccaagaaagctctgggcaccactggatggaggaatttcaatatggatactacttccaaatagagaaaatacatggaaatgggatgctgagaagacacaaggcagacatctcagagttgactagattgcgctgtagagttcaatctagtccatctgtccgatgactccaaccatgaaactgaccctgtgactttctgacaggatcaacatttgattgggaattctagaaaaacaggcaaggcagtgcactcaaagaattaagatctgcaggcagaaaacaacagagaaacaaaacagaacaaccaaaaaacaaacaaacaaaaaaacaccaggaaaacctattagaaataggaaaatagaaggaatgtcagcttaaatttaagaatgtgatggcaaacttagaggagggtaaattagctttcaagaaagtgaattacaggatctccatcatttgggattttttttttaacattaagaaacgtataatgtgagcttttggctattttgaaatctactttgactttctcttttcgtctatatctagcttaatgctcttgcattttagtgtaaactaataaagactccacacatctgtgtgtgttagaccataaaagtgaccagagtaaagcccataaaaatatatgtagatttttacattttattacttagtcctccctgtaaaagtccaaaagactaaacacttactgctttttaatgaatgacatgagataggctggagtgggtgccacaggctggaaggaacactatactggcagattagactttaactagcagagggatgttctaatggtaaatcatcggaaattatttcctaaagggatctggagatgcatgatttggctttgagaagccttttgtgggtggggtataaattattttagagcagtcctataaagaagtgaaaatgtataggattaatgagtgaaacttacaggaagacagactcaatataaagggctctgttcttatattttaaggaaaactatctgagtttacgaaacgcataaaacactttttatcaaatcattagataatatatacaaattcctggtacataataaggactcaattataccaaaatatcttcacattataggaaaaatattcacctaataggaaaatatatatatatttttttaggcatgtacaacatacgtaccttggtggaaatacaaatacgtatgtaatatgtcctctgccatattagaaagatctttaaatattccattttaatcataattcagtgatgttacctaaccctctattggtgccagtaaacaaaccaagtatttatacctttcacattaaaattttgaatacattaggcaaaatccctttcataaattgacaagtacatgccaacactaatctcaaagcgctgaattttaaacttcttggagagttttcactatggtaaacttcctagagttttcaccgttataactattttcactgttgtaccttagagaggtttcactgttgtaatcttgtcacacatttatcagaattttaaaagctactctactttttcaatatcaacatgatgcattctacaagtttcctttaaagctcttgtgagattctggttgactgcatcaaatattaatgagggaaacttataggaagacagtcaatatgagggctctgttggtaagcatattctttcttttagaaagtacatagatcaatattaatgacaaggagcacttttttagctacatgagggccacccagttgaagctatgaacaccactcaaggtagcatagcctcatgatactgtagcttcactgtctgatgacattttcattctgctcccacttcattaataagctttagcaccaagaatgctgactaaggatttacatttaattgaagtcattgcctccttactgacaaaatgtattttccaccctgcatagatgtaattgatgtgatgaaatgtcaacaaaaattgcctttgctaaatgtagtatttgccttactattttatatgccaggccaaaaaaactatattttacccttgagaagacaaaattctgattgttggaaagagtgtttctgattggtgaaatatagttgagtacccctatacataaagtcctatactttgttttctaggaattagctaattaaggaggaaaacagtaagctttaatactttgtaagactgtaattcaactatatatcctgttttttcaattgcaaatcataatatactgtagaggtgttttatagattgtagaggaaagagaagtgtcagccagctttaaatttgttttatgtcctaatatttaatgcaagtgtgtaacttttcttttggagataatgctgctcttttgagccaaatgactgaattgtgttggtttataaaggaagacattttttggtgatataggaattacagactctttcaaataaggagaacaatttaagagtgagagaaaggataaatgagaatcctgattgggagaagtgagagcccttaaaaataaaaagaaaacatggagaattgttaataaagttattaattatcattacaacatttgctggaaakgataagatagaagctgtttttcttttttttcaataaaatggattattattgcttatagaagttctgttgttagaaagtataattgtaaaatacattgtacttgcttggtcttatatcatgtcccagatattcctgttctctctgtgttcctggaattttcctcacgtgttcaggatccctaactcaagagcgtccattcatgaccctatgaagttaaaatgtcagaaaactcacaactgcttccccacctgaaaaaccatcatcctctctctgatctttagatatgccataggaactcagctgtcaaagaggaacagtctgtgtcttcttaaatgacaaacattttgaaaatacacctgctacttcatattggtaagagcagctacatccagcggaggaagccttttgtcattctttgatgaattaatgatgtaattttgcataagcaatgacatataaaaggaagtccctgtacatttatacccctttttatccagtgatttttcaataattataattgataaagtcaatagtaatttctatactaagaggagatcttgggcacagtcttccactggagtggccaggggagaaacatcagagcagatatcatgtgactgatacctggaatgcgtgctaatcctacagtaacatgttatatgcaattactttttgctcaataatgatgtcatgttgccatataaacattatattgatccagtgtaaagtcaacaaggattgaacacaatgatactagaaagggagtggacaggtaaacgtcctgattgaaagcccttgctatagttgcctgatctgaaatacaagtagaattttcaatgtgtttgataattatttgttttagtgttcgctggtcggtgtctttatgtctgttgtacattgtgataatcagtataaaaatcatagacttagataacatgaggtggaagaagctgtgcctatgtgaaaacagaaagtcaaagacgatgttctagacttctaatgatgtaaaatgggcttggggttctgtaacatggaggttactgatttctttttggctcatgccaaacatagaacaacaaaccccactcagtatctcactaagggctttttgaaaagaagaggtagttgccattttagagtttacaaagtacttttcacatttcgtcctcccaattaccatgagcagtcaatagtacacatctgtgttacatatgagaaacttcaaattcagaaaagccaggaaatgtacctgtgatgacttgattagcaagtgtcaaaggaacttgaatttaggtcttaatttctaaggcccrtattctaccatgcctggctgtgatatttccctcaaatgcaaaagaatcataaattattgttatttagattttattggtagtattaagtatccaaaatcatcaccaacttttggaggctaaaagaatttgggtccaattctgtaggctattatgattaggaaagcagtgactttcacctatgtattattattatttctttaattcatttttaattagagctatttgatacaaactatttaacatccatccattttatttctcttaaaacttgtgtcattcaaatttacctatatattctgttgtgctcattgtttcccccaactgcctctgatttttagtgtaggtagctaggagaatacaacaatagcaaaactccgtgggttagctacagatctggattctaatgagaatccagagcaaaaaggaatagatgaagcaacacagattctgaattttttatttctcatggctcgattcttacttgccatgtctggaactcactttatctcaggcttcatgacctgatgcttgtttctgatgcagtctaatccacactttaaataaacgatttgagttctcattttggtaaatgtcaagggaagaagagatatttcatgcacctacagcatcctaaaacctcttgccaaatccatgaatctgactctgcattatccttccccagaaggagagcataatttcattatccatgaatcatcacctcttagactgtaacatcattgtcagagagcctaatagaaccagtgttcagctggctgaaaagggggagggagggagaaagcgctgaggcaaagcacaggtcactggcacaatcagcaaactggagagttctaaagccggaaggggaggcccccctcctttgacacctttgacatatccctgaccagtaaatgactgatgctgactcttttgatataatattaaaatttgtttttcctacctaaattacatgtatcttgctgatgaaaaatattaacccctttaataaaaatatcaaaatgcttagccagcatcgatgagtataagcactctaaaatatttcttatctattcttattgcgttattactcgcttttcatcttggacacttatttctagccttcagtaccaattctatggcctctgttccagcattactataaaagtcaaaatgaaaagtataacattcaaaaattacattataattatatttcccaaggaaatgaattaaataaaattcaaatctgatttactagtcaaaaaacatgttgtaaaccacgtttacataaggattcaggataaaaagctaaaatgtgtgaatagctgtggttagtctaaccagacactagaggtcactgctgctccatagaaagacaatttactgcctgtctacttaggtagttcactcaccaaatcaagtaaaaaattgtttaaattctttgaaaagatgtaatgtcaacrtccttggaaaatacaaactcatttcaatgcaatatatcttgcataagtattgcttacaagactgtggcactgggactatttaactacatgctgtggtagcactrtgtgtactggggttaataaaaatggaaaaaaactcacatgaagtttagagactaaatcccatttcttctctgttttggtaaagcaaagtattctgtgttctgttgtatagttcaacaggtcaggctttttttttttttttttttttaactgttgtcacctttgagggaagtccaatattttatgtaaatacgtactagaaaaataaatatcaatcacatttctctaatctgcatgaacttgaaatacttatacaaatagatttatgatatgtagtccaraaagtaccatgggatggaggtgaggcaacaacttttgagcaggagactggcagttggcgttttaaaatttacagtggtaaactagttattaaatctacaaraattatatatctgtgctcagaagatactgagaattacagaagattcattctcaaagagtgaggagaaagaaagaacttttttcccataatttcatgtcccaaatcaaaatgagttttaccacctaagggattttattttcgttcttatctattattatgtttattagtaaagttaggcattaaaaagtgacagctttcaaaatattggtgattcatttagtgttatatcatattttatattccaagtagctttgaattttaggaatgcttttcaatacagcaagcatattttatatatactagtagcaccatggcattgagaatttgcaataattcaaaaatataagtattccttgcctaaatatatttggtatccatcacaagtaaggcagaaggttaagtgaaaaagaatagaaatggggttcttcactttaagactgcatttcattaatacaaacatctttagtacagataaaaatgaggctagccaaagaaaatttctttttaagatggaatatgtatttactgatgctttatgaaaaatgtaaagttacaacttcagtaaaaaaatcacaataagctcagtcatccagtaagctgtgaggaagtatctgcattattaatccattggaaatatgtgactttttgtcatgaatacatgtatattcaacaattattcatgggtaaacattgtaactaagatgtttttctgaagtggcatctattgtaagatttaatcaatatcaaagtaccttgagaaatccactttaactatttctttttctttattgcttataaaagtatgattttaatratctggcatccttaaaattttattttatggtgacttgcctagatttttcctctcagcatatgaaaaacccccaaacaataaaaaaaaattagtaaaaatagccattcactttttctttgttgctgcagtgattctgttttcagagaagagggacatggttaaagatgtaggggttggcaagccaaattaaatgaaacagcctcaatgttgcagttcctgatatttgcttctataatagaactgttcattttggaggatgaaggagaatacagactaaatatatctttctaaaaaccttaattgactgtggttcaagttactcaaatatggaagctatgatattcgtgctgcagtcaataaactttcaccaatgacataaaaacatgcatgcagcttgcagattgccaacagggtctgtacagaactgtactgatggatgagttcacaatacagatgaacgcagggacattgtaatgtcagcaatagaaaagcaacagagaactgtcatagtgttggtcttttttcctctaagattcgttttrtacatttattaaggtgttatcaaagtcgtccttttcaatgaggctgtgggtggaaggcacgtcttggaatgtgttctctttacacatstgaatgaagtgtctgtcattaggggactggtgtgtgcaggacatgtaatggaacacaacagggcagcctgacaaattctgaacagaacaggacagagctaaggattctactaactacattagggtcttcgaaaaaactggaaagagaaattctggtaagctctcaaccacatgcctgtagcaagctgctytcccattcgcgaaccttatctgaaaactccctaactaatgtgaggtgtggtggagaaatctggcttctcaatgctgtttcatttatttatttatgaaacatacaggctagaagaaattggcagtgaaacctstagtctgattttacagagatgggtttcagagacaaggctgagtcgaaaactttacatttttgtcatctcctcacattttgcagttgtctgcttgcagtattttaacccttcatcactttgtccctgtgcttgccttactgtaattcagacacctctggaaactgctcagggtgctgctttaacctagcaccatcttttgatagtttcctgcaattttcttttctaagtcaggcattggtttaaaggctctgcctgtctgtaaaatgttcccataactgagtcatctccaagaatcagctcaagctccgagcacctggaatcattcacctctttccttgatttgccagtgaggtgcaaaccttctataactgtagatttggtcccaccaggaggctaacagcgaatgtgggggattacttatgaaagaagttttatcttaaaacaaatgcgacattaatggaatcagtaaagggtcttatacaataggtattatattaaaccggagttcaagcttcacrttgattgtggtatttaaatttcaatgggttgattatgtatgagaggaaaatgaccagtattatgaatgcactaaaacggacaaggaaggatcttgccagcaaagtgagagggagagggaaggggagggggggcatcgcgttcccttgatagtcaccagagttcaataaagcaccacttatttcccagcttttaagagctctttttatcacaatggttcatacctcacactccctggagcccgatttgttataggtgcagggtcccgtcccattcagcagcatctcgctggtctccgtgttggtgggtttataatctacataaaattcctgggtgctgggagtcatttgctttagggactgtcttttctttttcctgtgccttcgcatgagggagcgctgctgcagctgcttcatgctcgcagggtaccgcttccatgacacgtagataaccagcaggatgacgagcacggacaggaaaagcgccacgctgcccgcgatgattttatggaaagagatgtgctcggcgtcagcatcggtctctgggccgggctctgtggctcccaccgtcgggggcaaagggggtttgctctcatgcttcggcctggggagcttgggcttaaacgtcggctttgggagagccctggccagatcaaacctctctgtagtacttttgccacagatgctgtagttcttcactgcatcgatcacatttactccttgcagctctttgggactggcacagataattgtattctcccttagacctttaaaacttttcagccagtttacaagggagcaaatatttctgctgcattcccatatattcccagcaagactgatgtcattgagggatatccaagaatccaaaatctcttgaccaataaatgtgagcttgttggaatccaggttgaggcgctgcagattcgggacacactggaaaacactgggtccactgaaagcttcgatctcattgcctgataaatcaagcctttgtaaggagctccaggtccaggacatggtctgtcctatgacactgattttattccactgcaagtaaaggttctgaaggctgaccaaccttggaaaaagggccaggttgagcttggaaaattgattgtgctccaggtgaagttctttgagtctgatcatgccagcaaagacattcctggctaaacttcggatccggttatatcccaggtccaaaagttccaggttgcggcagtcttggaatattcgcacagggatggttctcarggagttagaccgtaaatgtaaactcagcagcttccgcaagccccgaaactgttcagatcccagagaatgcagctgattataggacagatccaagttccgtaaatttgtcacaggtctgaaggtattgttaagaaaataggagattctattggaactaagaatcagctctttgagtctgcgtattccattaaaagcattttcgtcaatattgctgatatggttatggtcaaggtatagccaggtgagctggttgagccctttaaattgattatacttaagtttttgaaggctgttatagcgaagggacaaacctaagcaaccagcagatatacttgagggtatctcctgtaatttctgagattcacaatataccattttgccttcacacctacagcccttagggcatcctcgttcggcagaagaaagcattgtcagtaagacagtgggggctataaccagtgctacagctgatccgctcagtagcctaattacattgaaacctggaaataaaaacaacttagaaaagttatccccccaaaaaagaattaatccttaatcaagcaaaaataggcatatatttttcatttttaaaaatttaaatctaaataacacttaacatcacatattatctctttgtaattaaagagaattgtctttagkgttttgtttttttaaatagttaaacamggaaacatgccactaagcaaataaattcatagtcttagagcagagcaaggtaatctctaaaataattaaggcagaattattacacacactagaggttttttgttttttgtttttaagaaggaaagaagaaaaatgacaaaacatacccatcctttgtattgttcaaaggtcgtccttaggtcttttgctttggcttaggggccagttgcatgacagcccctgtcagctgcactgtagtgagtcagggctcgctgacacccaggaagaaaaattggaccccttgggagatggaccgattttggaacattattctttgccagccacgcagaacactccaagaacaaataaatcccaacaccgcattcgcagcaaaacatcaaaatcttcctaggtaataggatcttcatggatattacgtttttgcatctttacagttttttggggggtggggagggggcggttaaaaaaaaaactggatcctacaatttcttcttatcgaaaaacatgatgtattcttccaggcaatttggggctacctgagctgccacatctgtattccatascccagcagttcccgtgatgagcacccagttcagccacagagctgcgttggagcccagaaggcaggagagccccgtaccgcgcacacgctcagctcacttctgcagactgtcattctgaaagctgctcggactgttgctttggtttcagtgaatgcartcttatgtaaagctgcccccagtggtgaagaacattatgggcatgtgcagaaatgtctctcttttatcttgcaaatgagcaggctctctgctggaaaatgaatgrttcttttgggtggctcagtaggaactgaatggtcaccgtgatcaataactagcaacattttctgtgatttccaagtcttgttttacaatttggcaacgtctttattgtctgtgtccacttaattgctaaacatgtgctgcccagagtttttctggagcttgacattaagttcacagaccgaacgtcaatttttcttaacctcaacgcaggctttaaactgaaatttataaaatgaattattgagcttttcacagagaagcattaactgcctgcccatttgacctcttggagtcacagtgattatattatgcaaggtgtctcaggatgttagaacacaaacattttggaatagaggggatgactgatgacaagtgaattaatgtgtccaatagcctttccggttttctcacagacgatataattgattttatggctatagtttcgtttgttgttttggttgttgtaattctcttttaattagaagggaaataaaccatttttagtgttaggatacgaatcaagagatcatttggttcatactttattgatgttgctgctatttattacactaataatatttatggagcactttctaagtgctttaaatgggctacgttgttttctctttaaacaatagtatgatgtgggtcctattataacctctcttttaaagatgaggaaacagacttggggaggtaactttctcaaggtcatacagcaagcgagtgctagagctgagcttcagaagcgagtcattcttatgccgaaccactaaccactagatgatcctgttcaacaacattgttatcttcatttaaaaaagaagtcagtgaaaatgaagccgattaaaggattggggcaaggaagctgtgattagcaaattcttgcttgttctattagaattgcctaaatttcttttggtctgaggttcctaaagaagtataaaaactaaggcagcgtagtttagtgattaacagcatagattttggcacctagattccaactcctggctacaatttaccagctatgtaaccttaagcrcgttacttaccttccctatgcctcagttttytcatctgcaaaacgggcataaaaacaaaaactcacttcatgttttgagaattaagtcattttaatatctgtatgttacttagaacagtgtgttgcatgcaataagcctgtgtaagatatttgaataatattaactttatttgtacttgctaggattacgtactgaatattgactatactgaccttcattaactcacaaagaacaactttagtgagcatttttaaatattgtacatggtggatttctgagatttactcagtcttgccttctttgatgagataacttcctttatgttcatcatctgaactttatctttaaaataaatcttctggttctgtggaycatractaataatgttcgattcttttcatctccaaagtagaacataataacatctgccatgtagaggcattttatttaaaaataatggtattcttgaaaaagtttgccttgttgttttttgttaggtgaactgtctgtggaaaaccgtggagagctttcacattctccaaggatgagatgtttgataaaggctagtaatgacaatcaaaaggggtcctacagatatagtacaatggatattaccaattccttgggcagtatgttcttaatagggcagtgctttcccccagagttacctaagctgtgaatgcacatgaaacatccagtgagtttcttaaaaagatagactgcccaatccctcccccaggattctcattctagggggatggaagagtgtgtgcttttcaatagtctctgatgaaataagtttaagaaactcactgtgaaggaatgattaaaaataatattttctcctagtaggaagagagggtttgcacacttataatactgagatgtaagttccacaaggacaaagacaatgttttgtctacttcatttttcctaatatctacaacagcacttggcacattgcagacatgcaataaatagctattgaaaaaaatatgtttttatatcagtcacaagtacaatggatatagtataactgattatgtaatgttcaacatttgtacatgggattgagtcctgaaaatttcctcagtcagtgagactggaaacaattttggagaaagtattcttaaaggaggtatatacaaagacaaaaactagaaagtgagaaaacttagttgatcagaaagtgatctttacttttcacagatatcttgtcttcatagttaaactacaaatttcatgagaacagtaaatatgcttttgactattctcctttgcacagcacagaagggtaatactgaacccttatcatttaatatcccaaatgggcttgacaacttgtatctctcaaaaacagactaatgagaattatattgataacttctctctcacacctctgttgcttgaaaggctctgagttttcccctcactctcccacgtagtcattgagacatctgttttgcccaagagctgcagagagccactccaggaggctggaggacccattaactttgtgcttcttgctcatcatactttacttcccattgacagaagaacagaggaacccactgagaatgtgggctctcactttgcttttcctgggataaatcttcttgaattatttacggtgaatattattctctgctgtgttacacacattgctcttagttttcagacatttttcttttatcttggttcctgatcttatcttactgcatagttctgactttacacctaccctttggatcttatgattaatatttatttagtcttaatactaacaactgagggtataaaatattagartgagtaaataagacctagtattggctagcacaatggggtgactatagtcaataatgaattaattgtgcatttaaaaataactaaaagtataattggattgttttttatacaaagcgtaaatgcttaagggcatggataccacacttacccttatgtgattattacacattgcatgcctatatcaaaacatctcatgtaccccataaacatgcacacttactatgtacccacaaaaataaaaaataaaataaaaataaaacaaaactatatgacaggaatgatgtgctacaacaaaaattgctttggtagcaatgtattgattgacaaggaaaaatgttcataatgaaataatattaaggaaaaaaatactgaccatcaatctctttctcaacagtaatcagtagccactcttggactgagtcagcctccaggaactgtgtatggcccctactttggcacgaccccttaagtcggcatcacaaccaggtctgatctggttcargataataaattgtttgaagagggaagattatccatgaggctagttgagaaatccaaaacaaaataatgtgattctaagccacactgaatacttgaggctgcrgaagttactgcaaagacatagagtagtccctcaagagaaaaagaaaagactgtgttctaaaagattttagtaatttgcctgtatactttttaaaagttttttctccttttacttgtcgactatagcgagctgattatttctgatttgcctttcagcagaagcaaaattatattgcattatgtatttagaaactagcaacttcttttgcacttaatatcgcatacagaacaaaccgtaaactacctgacgagttaaatatccccaatgcatccagggccttaatgatttatacaattataaaaatagtgtcatgtatctaaagactttttattttattgtgcttataggacttcaaatagctaaacatattttgtttarattgggtaaataaatcaaatctcagtttggcaatactgccaaattttagtccaatatgaaactgagttgccagatataaacttagaaattcataactgaaagagaatggactgatatcttaacagttgttgacttcagatattttatttattttacaaatatttaatttgaataaccattgtgtgctaaacactgttccagacactgggaatacatctgtgtgcaaaataaaggcctgtacccttgtgaagattacattctaaagggataagacagacaattaaaaataaacatatacagtatattagtaggtcatatgtactatgaaaaaaaagaaaaatataaggaagattgggagtgcaaggtatgaggtgggctgagttttaaataggatggttagggccattaagaaactggcctgagcaaaccttgaaggatatgagcttgtgagacttaaatgtatatatggggagtggccagtgcaaaggcctaatgtggaagcagatcatgtgttccatgaacaacaaggaggccaatgagtctagaatggagagaccaagtgatagaataattggagatggaggtcatggagggctttggatgacattctaagaatactggctttattatggagaaaacggggagctaactggagatttttgtgcagagttagtatgtgatcaaataacctattaaaaggatcactgctgtggatcggatgttctcatttaccgtccccaaaagccatatattgaaaccccaattcccaatgtgatggtatttggagatagagcatttgtgaggtaattaggtcatggtattggagccctcatgacagatcagtgggattataaggataaaaagagacagaaatgagagagcttgcttcttctctctctctgctacaagagaaggcagctattaagaagccagaaatcaggctgtctttgacatcaggtcttctgttaccttcattttggacttcccagccattagaactgtgagaaataaatgcttactgtttaaaccacccaggatatagtatttttgtttatagaagcacagactgactgagatgatcactcttagcaggggacacagtaacgaggccaccatatcaatccaggagatagatgatggtgtttgggccagggtgttagcagtggaagtggtgagcattggttagattcgggatatatttacaataaaatcaacagaacttttctaaggaaatagaagtggaggtatgaaataaagagggaaagtaaagatggttcatttttattggctaagcaaccctrgggatggtgaagccataactgttttcgtgggtcacattttgtgagcaagaccaagagtttaacacatttggattaaatctggatttggctcttgctttccttcatttttatgagactttagttcttgaaaatatttcttaatcttaagcctcaaagcaccatgatrtatttttaaatattttaaaggtagtttttgaacagaaagttatgaaatgatttgcaaaattagcccccaaacaatagcaaatggatttccattcaaatgaactagacagaggcaacatytttgcatatggccttggagggcagtagagccaaaagatttgatgaaaatctaaatgcgagattgcataaagactaggtaaggaaacatttggactcaacacatgtactgtttattgcatatgtcagttgacatttggaatttggaactgattctgtgcaaacttctttgggtctcagtttgctcatctgcaaaatgggacttataaaacctgacttataaacttttaaggatttttacttaggaaccattttcatgatttatgagtaagtacattgtacaatatttataaagtgttacagatakttctgcaatcagagtatctatgacaaaattaattttcccttgattctgtataggttctgtggccatgagcatatattaagggttatcaagggtcatgaacatgaccaaggacatgccagaatttactaatattataggaaacattcctcagtatttcttttctactaattttaataccacaaccatttattatacagaatacaccattgatattctgtgtattcgcttataaagtactttcaccaatagacgcatttgatttagcttttgtaaagagtttaatgtttgtgacccaacaatatatcagggttgtcagaatgccaatatagagtttcctacagctgtgaaaataattttcttcatttctagttagaatactcatatgcatgtctacttttgtaattatatccagatcttcatcagagcattaacacttccctgaaatatccttgatttccatctgcttgctttaagggctccattaaaaaccctgtctggtcacatatggttatgagtgaatatctctgacttagataaatgaataaagaatattccaggtctgaccattaaaatggtctctcagtgtctttctgggaaaagacaaatttaatgaatgagacattgcaaggttatccaacatgtctccctcccattcacctgaagatacatttatgcagcagcgtcaatccatattctcaggttttattgcattcctcactgtcacttcctgcaaaggtagtcctaaggtaaatatgggaatacagaaatctagccaacactataaacttcagtggcagacttatgaaggctgaaaagactatatgacttcaaggaaatacttttttttcttcctttcagtaggaaaggtaaagcatacgcaaaagttgagaggctagtataataaatatcaactccaaaaattattactattttgctaattttatttcgtcgatactcacacctcttcccacataagtgcaatatttttttctttctggagtattttaaaagcaaatcttcaacatatgtcttttttttttttttttttttaagacagagtctcgctctgtcacccaggctggagttcagtggcacgatcccggctcacagcaacctctgcctcccgggttgaagtgattcttgggcctcagcctcccaggtagctgggactacaggtgcctgccaccacgcccggctaattttttgtatttttagtagagacagggtttcaccgtgttagccaggatggtctcaatctcctgaccttgtgatctgcccgcctcagcctcccaaagtgctgggattacaggcatgagccaccgcacccagccaacatatgtctttataacctctctctctctctctatttatctatctacacacatgcacatttcaggatgcattcctaacagccttttaatttaaccatctagcattattatacctaataaaattaacaagttcttcaagtaggtttgttcgtatcaagatcttagaaaaagcccacacattgcatttgtttttgatgtatttgaagtctctttcattttgtaatgccattgatgtgttggatgccacgtcatttggactttagctttttccatgttctgcatttggtggttttcccattgtaggctttaacttgcacatagtcagttttcatggcatatatgtttaacaagagtctattcattaatttgagcagaatatccagccccaaagtggatatttkgggcatctattcattcttggtagcagtttaagatttgaagaacttttgagtaatacaggacttagagcttagagtaaagttgtacttctactttgtggtatttatgccrtcagagaattcaggaatgcgctaaatggcaagtttgagaactttattggttaacattcatatcaccaggatttctgttcttcacatcccatcacaattgcctttttacccttagcaacagcaattatttgttgttggtacttgctaaataaatctgctaatttttgtattgccattgaagtgttcatctaactgaggcacaaaaaattcttattaataggatagcaatcaaaattcatttgtagtcacttaagctgagagaaatcagttttctagcttttctttcagaacaaattccatcaagaaacatgtggcaccagagtcacattgtaaaacgtctagttttatatatattcctaaatttcctgtattttctcacagtggagaaaagacttttagagggactataaaaacctcttaaccaaatttataccttaatatttgatgttttactttgcatctatgactgtgctttgaatgtaaagtcagtcagtgttctttaaatggtatcataacattttgctatatccacttcacatgtattctgaggtgacaagagtttttgaagaaaatttcatattgtatttttaaagcactgtatataatagtttcaactggatacactggtgtgttttaaaattcgacttcctggcaattatatcagcgttaggaattaaattccccagtcaccaggaggagaaagataatagacaatcttgattttgataaagaaacagctatgccataggttggttttatttttgtttctgaaacaatgtctgatttaaaaacgtttttattttagggcccagatctgaaagatattaaacttctgacaaatgagaatccctgcatagtttgcaatgaagtagcagagaacaggagtctgtgggtccttatattactctaaaatatatcagcctatatgtcaaaccagwggatccttccttatactgttagtacttggtagctgtagctgtggccattcccagttgaacagttcccttaagaatgttggggaatgcttaggatactcttgcaactaacagcagagcccccatgtgscaatattgtaactcgagcaaaaatttacttagtcccgggtagcaaatgccacagatccttaataaaaataaaattaacttgtttattcaatgagtatttattaaactcttacactgttcttcgtgctggggatacagtagwgaataagacaaagtgccttccactggaggacttcttgcattcttgttgatgagatggtaaaaaataaaaatagctacacactgcaatgtcaactagtaataagtgctgtgaagaagactaacaaggatgagggcaatgaccatttgatactgtggccagaaaaatccctttctgagttgttgacgttggagagcaagtagggagcaactcacataatcctgtcaccttagatgtaatctccttttgggttttcattggccaccattaaaaaggaaaagaaaattgtttttttatatactccacacttctgacaccagggtgtggagtttttccataccaaccaattctccaactctctggacatcaactgagtgtcctgcaattcaatttccccccagcacctccttacctcttccttactgattttctttcatttccactttgtctccaggtgcctgtggtgacccagttctttttggacatttttccacttatcaacaaatgaatcctatggtattagctgataatggcttatagtattagctttctcaggattcttgaaatttaataggtgagtctgagaaatggaaagtattaaggaagcacagagaactgcattttatgcacatactgtagcttaaaaagcaaataggagaaaaggcctgtattaaaaacattcatccttgctcttccctctcaatttcttaccaattactctttttaggtgcaatcattttattttagctactgtttaattcttataatatttttgaattttgttgatattttaatttcttgctattttaactgaggattcagtatcatttactctccctgcttcccatgttaatatgttattattacagtattaaataaataggcgatatgactcacaatcactgtgtaaacaaagacactgatgaattaagtggtgtactagactgtgttgccattctcattcagcgttttgcttttcttgcagtttaaggattgttcctattttctttctctctctacctcttttacatttgcttttttgtctgtatctagggcttgttgtttgtcccaacatttaaaaatatatgtcaaggactgggcacagtagttcaaacctgtaatcccagcccactttgggaggccaaggtgagcagatcaccaggtcaagagattgagaccatcctggccaacatggtgaaatcccatctctactaaaaatacaacaattatctgggcgtggtggcaggcgcctgtagtcccagctactcaggatgctgaggcaggagaatcgcttgaactcgggaggcagaggttgcagtgagctaagattgcaccacggcactccagcctggctacagagcgaggctccatctaaaaaaaaaaaaaaatgtatatatgtatatatgtgtgtgtgtgtatatatatatattatatatatatatatgtcaaatgccgaagctttccaaacactcaggcatttcagataatcctatttgcctgcagcactccatttcttggctccaatatccaaytctagctatgtacctagtacttcaccattttccagaacaggatccctatttcctggattccatgtatttattttcttagtttaccactcattttgttgaagcaccttccactaatagatttttaggaaagggtgcatgtgaaataaaaatttcatgtctaagttttttagtccagtattactgattgatagattgctgtaatataattctgggtggtaaataattttccctcagaatctttgagacattgaattactgtcttcccataccactgtcactgtagagaatcagacaatattctgattcttatttctttgtgtatgatctatttttttcctctgtatgatactttcttccctcctggtattcggaaattgtttacagatatactttggttcgtgcttttttttttttttcgttagtttttgggcagtcagtgagctttttaaatatggagacgtgtccttcagttctatacaaatgtattgtatgtttcaaaaaatgatctctccacatttttctttgttctctttctctgaaacttctattggacaaattttggatttcctggattgatcctttggtttttctttcctattttccatctctttatctctttccatcctacagagtaatgtctatgctttatgatccaatcttttatttatttattacaaattttggccagatgtcagaagattatggcacaatcaaatccagcaatgataccactgggtcaagcaatataaataaaattaagtttttgtaaataaagaaacattcatgtgcattcttttatgcattgtctatggttgtcttcaagctacaatggcagagttgagagatggcaaatcctgcaacttagaatatttactacgtggccttttacagaaacagtttgctgatcccccaactcccatcctaatttaggtgatcatattggttagctccatgagctctttttaagttrtctttttgccccttcttcatrgcatactgttactctcatggatgtgccattttttctcactgtgaggatattatttgcagtttttttttttttttggtggtatactgcttgctgcggtgccactacttcttctgaggtaatttagccagttcgtgttggcccatttcatgttggaggcgtttctctacggttaagattcttctgtgttcattcatattaatgagtgaatcactaaaaactgatagaaagtaccctgccggagggcagatcatgaggtcaggagatcgagaccatcctgggtaacatggtgaaaccctgtctctactaaaaatacaaaaaattctccggccgtggtagcaggtgcctgtartcccagctactggggaggctgaggcaggagaatggcgtcaacctgggaggcagagtttgcagtgagccgagatcgtgccactgcactccagcctgggggacagagtgagactctgtctcaaaaaaaaaaaaaaaaaagaaggcaccctgccagtgggcaaggttttggtggtggattttgtgttagcaagattagacagagagcttgcttcaggtacatgtatttagactccactccccacacacccagagaagactgccaaccgctcctacatggaagatgtacacctgctaccagtgttctgggggcaaggcagggaaagggtgctgggtgccccaagttcaacatgtacattctcattttagtcttaggttgtcagtcccaagtctcactgctatgcctagtatacttcagtgtagcttttcaggtttgaatttgccagaaaataaactcttttctgttagagggatggggtagtcttttgattgcttggggtaaagaccgaaatctggcagttgatctcgctctatgaagatcagtccccatcttttttgtgacccctacttctggtgcttctcatgacttttatggcgcgacataaggtcccccttcagtaagcacttagactgtagctgccttgactctaccatgtattctgttctccaaaaatttgtagaaattgttcattcattcctcttttctctatcctcatttgtattcatttgtcattgcttgagttttgacgtgaaagagacaataaaagcatgcgatcaatctgccgtgtttcagatatggatttctcatgacagatttcaggcatggcagatgatactggaaggatgccgtatgaattaagactgtagcccaaggttgaaaatgggagctgaagatctttgtaaaagtgagatgctgtcctcctttgttatccatatcctccaatstattttgcactagtgtcattttaaggtctcttactatgtactcatttcttttttctttttctttttttttttttttttttttttttttgagacggagtctcgctctttcgcccaggccggactgcagtggcgcgatctcggctcactgcaagctccgcctcccgggttcacgccattctcctgcctcagcctcccgagtagctgggactacaggcgcctgccacagcgcccggctaattttttgtatttttagtagagacggggtttcaccgtgttaaccaagatggtctcgatctcctgacctcgtgatccgcccgcctcggcctcccaaagtgctgggattacaggcatgagccaccgcgcccggcctatgtacgcatttcttaatacaacttttaaattggaagaagcttggatatattgtatttacttgtggcttccttggctgtatagttcgttaagggtgtctgccattatttcatttactctactgtgggagtgattaaaatgttcccccgtgtgttcatttatttatgaattttgaatcatcactttgatgaggtttctcccacatcctccttttagcctagaccaacctgctaatatcagcaagcccagcagcctccaaaaatgctaggaaaaaatattttttactaccgttcttgggggttatatcttactatagatattgagggaatgtatttggtggaaataggatgactcttcctggtgttgtgttcatgcacactaaatttgctttggcatcttatactttgtatttattataactttgcaaacttaaatgttttcaatatcttacaggtgtttaattttcctgagcccaatgtttcttctaaaaaaaagaacttttaatttttaatgaaatagaatagaattttatgtaaacttttaaaagaaacaaactataccctattggtatctgtattcattttcctacttttttgtatcaagattttgtttttaattattatcatttatgctttggaatactttgctattttcaaatttgtatttgttattttatagtaaaaaactagaaaacctgaatttgatacatatgtgtatggttctggtggtggtgtggtgtgtgagggtgagtgtgtgtttacaactctaggaagtagaggtttacaagtaaatttaaacttcaaataggcaaccacttatgtataatccaaatctgtaatcttctgatgatgcagtatgggcctgtatgcaaaatctggtaatagtaatgtaaaatttcttctcttcattggctatatttgaggccagactttttctatttagttaaagtcatgaaaatatttttgatttagtgtattcaattttcaatcattgtgttttccttttgaaatactctaggcttctgcctagagaaaccaaaacagttaaacatgtcattatatgttcaggccattagtcctgattcttaggctttatatattttctgtgggtagttctaaacgacttgagaggttttacataatttcaagtggcttacaagctttgcaagttaaacttggaaaatattgtagtaataccaagtagtagtgacataaaggcttaagagactcacgtaattgggattttgagattattttgtccaattcacattttacagatttaaaaatgtagaccagagagatgaagtaactggttcaattaatatacgacacagatacaagactttgagtagagcctagatcctttgagattagtctatttcttataatcattctgtcttctttgaagtcaaatcaatgtttttgtacaatgtgaaaaacagtagttgacactttatataacttttttcctaacctcatatagatttaactagaccactaggacttaaaatctgttttgttaaatagaaaggaaacaaacaagtcttcaattattctctaagtttgttttctttgcattataatagtgatatatatttattataaaacatgaaccatgatctcgccatccaaaagtaatccttactaatattgggaactatacaaattttttattaacttgaatttaatgcatggcattctttgccatgggcaaaacaattcttttaagttcctcctactgttggaaatgtatagaacggtctttattaatgttgaattatacagactttcccttaagtaactgaaacgtgcataattggctctgaaaaggaaagaaattactaatattctagcacacataatctatcttccacatggctagcataatattttaagtagaaagttattccccttcaagtaacaaggtaaacaaaagaattattgcttccttcttgtttgaaatttggttaggcctcagtggaatggctcaaagggcaacttcagaatggtcttactactttcccaatatactatctaaaattgcttacgttgctgtcttctttaaatcccatgaatagctcactgtgacctctggttaaatagcgactcattgtcatgacgcacaaggttgtcattttgtttatatttttgttaaaggcaaacaattggttttcaagaagagcggaaaccaaactggagaggcatccatagcttcatttcagtgctctgccactttgcttttctccacgtcacctgtcttgtgttcacctctgttctgcctcacagctctagcttattcatggtttttgctcgccatggagttggctttacatgttatcttcaatgcctacatgctaccttgtgactgtcttagttgtactgaaaatcagttcattcttttgatagttttctgtttaaaattctagagaataaaattctgattttttttccatgccatcttataggttgctatctggcttatgagttggctattctaggwaaaggtgatcaccctaagtttccagcagaagtgatggttaagggtagtgataaagttggtagagtcatattgtataagacttggcagatgctttaagcgaggccatgaaggacaaagaattcaacttgatacaaagattatttaccatctggcttaaatctacccttttgtcattacttgcacttactaaccaagatgctatgcatacctgcaatacagccacactgtaagtatttattatttattattccccgaacaagccattttctagctgactttaaatcactgtttatgctactctctcttattggaatagtcttcctttagtttttatctggtgaaatcttctataagatgtatctaaaacattataatcttcataaacattttctagggattttggtgacttcctcataagcacttttataaaccatttatatatgccatataaatgcatagtattaaattgtttatttgcccttttccccatagaatattctttaaattcagggattgtggtgtttcattcatctctgaattctacttttaacagataatggatactcaatatatgtgtgttgaaaagaaaacattaagatgatgcagaagtagctactcctaatggctatatcattatcataattatggttctctgggaatacctgtagttgattcacaaatctgttacccaagatgtgataagtgcaagcggaaagtatgtactaagcatgaaactcactcaaaatttgggccaattaaccagagtactggtgtatttttcaccatttggtctctatttgactaacaagtgttgcagatggatttttattgctctcttatttgcttccaatctgagtaattggttggaggaaatttcctgttctgaaggaaatttcatttgtgtccgaaggtagtgatttatttatttatttatttattttgagatggagttttggtcttgttgcccaggctggagtgtaatggtgcaatcttggctyaccacaacctccacctctgggttcaagcaattctcctgcatcaacctcctgagtagatgggattacaggcatgtgccaccatgccctgctaatttttgtatttttagtagagatggggtttctctgtgttggctggtctcgaactcccagcctcaggtgatccatctgccttggcctcctaaattgcagggaatacaggaatgagccaccgcgcccggctggtagtgatcttgtatttactcctgatttggggtgtttgtcaacatgtacaggggcaatttggggacaattccttatttggagctgtttactcttcctgtttcttacctctagtattatcgcaagtggctcctagcttaagtgggctttcaatgaggaccttactggaaatacctgtagcctaaataaataaataaaaacttgccaacaataccgtgtcaagaaggctggctttaaaatccagcttgaagaagcctcatttaaatgactgtttgtaatctggtcctcatatgtctaccatgtgctacttcccattctaggtgctgaagaattaagagaaaagatacatttccacacttgtggcgtttacaatctaatctggcatatcataaacacttgttacaatgtgtgtagggagtgctagcatgaaaaaagcacagggtgctttgtgactccataaaaatggcactatccagactcaacttacaggggaaaaacctgaattaagtgccagcaaagcaaaactactataataaaaatgaatttttttaaaaaaaaacaatgattaatctagccatagcagcagctagaatactcttattcattttataagttctcagtttatgctcgatagagatggttgacacaagttaggaaacttaacctaagtagtattcagcatgaccaggacttcttagagaacatccataacatattggacgatgaaaaaccacttcatagtgtctttggtagtctgcaccagcctttcattctaaacattcggtaaagcaggtgaaatgcaatggtgacagctttgatgagatccttgtccacaaataccctaacttgactgaaagaaatgtgagcctgttgtcagaaataattgtgtctggcagcctgtatgctacaagaaactggcatggagtcacattgtcatcccagaggcttgaggtagaagtgaaagacttgatgtcactgtgagaagcagtatactaaagggcaaagttttcatctcataacaagatcaatgtgaagtcctggtccaactcttttggtcttttcccactggaaaattaggtgtcttactcagttatgccaagtagcctggcatgtggcatgtactaacttcctttagacttttcaatatcagaattaatttgaggccatcaaatagaacttctagccaagactttcaagtagacaattcccagatgtgctatgtgtagtgaagccaagataatgtcttctgaaatcataatgtaacttctctacaaaatacatccctcatgttaagaaaattcatatggatgttttgagattggctttaatttttttggtcagttcctatgatagccttcaccatatttgctttatgacaagggacagtctgggtttcttttaatttaattaccttatttcatcagcttgaaaataagaatcaaggaagccttcacttatctaatcttccagtggtagtggcacatatgttttgatatctgttggggtagatattcccaactacttgatattgatgatgttctctgaactataattgatggtagagtgaatagaaaacttaaatcattgcgcaaactcatcaggtatataaatctgaaagttcctaacatgggatattgagagctagaagtctggcaggaacataatacaagtttttctttgctttaagatggaaatcctctcaaaataaggatttcaggaagcaactgaaaggatatcaaccctttcaatacagttgtcagcacatatttttcaaagagaggagaaaaagaagtatttatttgtagattatggattgtctacctgaaatatctaagaggctcaagtgaaaagttattagtaccagaaaaagagtataacaactaggaaaattacaaagtaagtatacaaaagcaattgcttcatatttgttttcaaactgcttattgttactaaaacacaaaaagacttacaaattagtgaaattgaaaaaaatctcacaaattataacttacctctgagtaagcttaagaaatgtgcacagtttatacctagaaaatagaaatgaaagtggcaatgctaatgacaagagaaatgttattgagggacagaatgaacagagatacatttttgaattgaaagaatcaatagcttaaattaatcagtgtataaattcaatgcagcctgatcaaaacctcagtaggatttttttgtatctaattctatattttaatgttttttattgtttagcattatgttatgtaaatttccaaacatacacaaaagtcaagagaataattaatggacttccctgtatgtgtcgctcaggctcagtgtcagcagttactagcataaagccagagtttatttacttatactcccagttataccccaccctcatggatcatcttgaagcaaatctcaaacatcatataattcatctcagtgtaactctaaaagagacgcactaaaaaaaaatgctataatgctatcattctactttaaaaagttagcaaaaatttgatgacttcgaatcaaataccagtcaacaccaaattcaatatgcacacacaaacacaaacacacacacacactgtcaatttttgaaacaggatcaaaagtagttcctcatattgtatcgaaaaattaattgtagattaatataagtctacaattcctttaaacttgaaagactggtgcagactaccaaaagacactctgaagtggacctttgaagatacttttgaagatagactttctcttctattttccacttgtattctatttgttaaagaaactgggttatttgtcctgtagaatttcccacttttggatgttgttgaatgcatctccatgatatggcttaaaattttcctctgatcctttgcttcctgtaagctatttctaggcatagagttttgatcagatccaggtttgatgttttggcaagaatacttcattcaagatgctgagttccttctactgcattctatcaggaagcccataatatctaatatctcttcgttatggtgttaagattgatccttagatttaagtgtggttggcctgattcacccattatcaagttccctgtcaactattcatctaatgctttagtagtcactgatgattattacatagatctatttgttcaacagagattgtaaaatagtaatattctgttattcctttttcatttattagctggaattctaaagtttttattaaaatatttttattatggtaagaacccttaacatgagatctacttcttaacaaaattttaagtgcacaaaacagtattattaactataggcacaatgttgtacacagatctgtaggatttatttatcttttataaatgaatctttatagctattaaaaagcaattttctctttcctcctcacccaatgcctggcaaccaccatttactctctgtgaatttgactattttagatacctcatgtaagtgaaattatgtatttgtccttccatgactggcttatttcacttagcgtaatgcatgtagcaaaatttccttctgtttttaggccaaacactactccaccattatgtgtatataccatgtttttctttatctagtcatgatcaatgggcaattaggtgcttgttatrtcttgactattacgaatattgctgcaattaacatgggagggcagatatctcttcaagatcttgatttcaattttttaaaaattatgctttaagttctagggcacatgtgtacaacatgtaggtttgttacattggcatacatgtggcatgttggcttgctgcacccatcaactcgtcatttacattcggtatttcgcctaatgctatcccttccccagtcctccaacccccaacaggccccagagtgtgatgttccctgccctgtgtccatgtgttcttattgttcaattcccacctatgagtgagaacatgtggtgtttggttttctgtccttgtgatagttkgctgagaatgatggtttccagcatcatcgatgtccctgcaaaggacatgcactcatctttcttatggcgtcatagtattccatggtgtatatgtgccacgttttcttaatccaatctattattgatggacatttgggttggttccargtctttgctattgagaatagtgtcacaataaacacacgtgtgcatgtgtctttatagtagcatgatttataatcctttgggtatatacccagtaatgggatggctgggtcaaatggcatttctacttctagatccttgaggaattgccacactgtcgtccataatggttgaaataacttacactcccatcaacggtgtaaaagcgttcctatttctccacatcctctccagcatctgttgtttcctgactttttaatgatcaccattctaattggcatgagatggtatctcattgtggttttratttgcatttatctgatgaccagtgatgatgagcatcttttcaagtgtgtgttggctgctgcataaatgtcttcttttgagaagtgtctgttcatatcctttgcccactttttgatggggttgtttgtttttttcttgtaaatttgtttgagctctttgtagattctggatataagccctttgtcagatgggtagattgtaaaatttttctcccattctgtagcttgtctgttcgctctgatgatggtttcttttgctgtgcagaaggtcattagtttaacttgatcccatttgtctattttggcttttgttgccattgcttttggtgttttagtcatgaagtctttgcccatgcctatgtcctgaatggtattgcctgggttttcttctagggtttttggggttttaggtcttacatttaagtctttaatccatcttgaattaatttttgtataagatgtaaggaagggatccagtttcagctttctacatatggctagccagttttcccagcaccattaattaaatagggaatcctttccccatttcttgtttttgttaggtttgtcaaagatcagatggctgtggatgtgttatttctcaggcctctgttctgttccattggtctatatatctgttttggtaccagtaccatgctgttttggttactgttgccttgtagtatagtttgaagtcaggtagtgtgataccttgttctttttgcttaggattatcttggctatgcaggctcctttttggttctatatgaactttacagtagttttttccaattctgtgaagaaagtcattggtagcttggtgaggacgactttgaatctataaattaccttgggcagtayggccattttcatgatgtaaattcttcctatccatgagcatggaatgttcttccatttgtttgtgtcctgttttatttaattgagcagtggtttgtagttctccttgaagaggtccttcacatcccttgtaagttggattcctaggtattttattctctttgtagcaattgtgaatgagagttcactcatgatttggctctctgttggtctgttattggtgtatgggaatgcttgtgatttttgcacattgattttgtatcctgagactttgctgaagttgcttatcagcttaaggatattttgggctgagacaagggggttttctaaatatataatcatgtcatctgcaaacagggacaatttgacttcctcttttcctaactgaataccctttatttcgttctcttgcctaattgtcctggccagaacttccaacactatgttgaataggagtggtgagagagggcatccttttcttatgccggttttcaaagggaatgcttccagtttttgtccattcggtatgatattggctgtgggtttgtcataaatagctcctattattctgagatacattccatcaatacctagtttattgagagtttttagcaggaagggctattgaattttgtcgaaggccttttctgcatctattcagataattgtatgttttttgtcgttggttctgtttatgtgatggattatgtttactgatttgtgtatgttgaaccagccttgaatctcagggatgaagctgacttgatcatggtggataagctttttgatgtgctgctggattcggtttgccagtattttattgaggatttttgcatcggtgttcttcagggatattggtctaaaattctctttttttgttgtgtgtctgccaggctttggtatcagtatgatgctggcctcataaaatgggttagggaggattccctctttttctattgattggaatagtttcagaaggaatggtatcagctcctctttgtacttcgggtagaattcatctgtgaatctgtctggtcctggacttttttcgttggtatgctattaattattgccacaatttcagaacctcttattggtctattcagagatttaacttcttcctagtttagtcttgggagggtgtatgtgtccaggaatttatccatttcttctagattttctagtttatttgcatagaggtgttatagtattctctggtagtttgtatttctgtgggatcggtggtgatatccattttatcgttttgtattgcatctatttgattcttctctcttttcttctttatttgtcttgctagtggtctatcaattttgttgatcttttcaaaaaaccagctcctggattcattgattttttgaagtgtttttttgtgtctctatctccttcagttctgctctgatcttagttatttttagccttctgctagcttttgaatttgtttgctcttgcttctctggttcttttaattgtgatgttagggtgtcgattttgtatctttcttgctttctcttgtgggcatttagtgctataaatttccatctacatactgctttaaatgtgtcccaaaattctggtacattgtgtctttgttctcactggttttaaagaacatctttatttctgccttcatttcgttatttacccagtagtcattcaggagcaggttgctcagtttccatgtagctgtgtggttttgagtgagtttcttaaccctgagttctaatttgattgcactgtggtctgagagacagtttgttgtgatttctgttcttttayatttgctgaggagtgttttacttccaatcatgtggtcagttttataataagtgcaatgtggtgctgagaagaatgtatattgtgttgatttggggtggagagttctgtagatgtctaataggtccgcttgggggtacagagctgagttcaaaccatgaatatccttgttagccttctgtctcattgatctgtctaatattgacagtggtgtgttaaagtctcccattattattgtgtgggagtctaagtctctttgtaggtctctacagacttgctttatgaatctgggtgctcctgtattgggtgcatacatatttagcatagttagctcttcttgttgaattgatccctttaccattatgtaatggccttctttgtctcttttgatctttgttggtttaaagtctgttttatcagagactaggattgcaacccctgcttttttttggctttccatttgcttggtagatcttcctccatccctttattttgagcctatgtgtgtctctgcacatgaggtgggtctcctgaatacagcacactgatgggtcttgactctttatccaatttgccagtctgtgtcttttaattagggcatttaacccatttacatttaaggttaattttgttatgtgtgaatttgatcctgtcattatgatgttagctggttattttacctgttaattgatgtggtttcttcatagcatctatggtctttagaatttggcatgtttttgcagtggctggtaccagttgttcctttccatgtttagtgcttccttcaggagctcttgtaaggcagacctggtggtgacaaaatctctcagcatttgcttatctgtaaacgattttatttccccttcacttatgaatggtagtttgtcttgatatgaaattctgtgttgaaaattcttttctttaaatgttgaatattggcccccactctcttctggcttgtagagtttctgctgagagatccgctgttagtttgatgggcttccttttgtgggtaacccgacctttctctctggctgcccttaacattttttcttttatttcaaccttggtgaatctgacaagtatgtgtcttgcagttgctcttctcgaggagtatctttgtggtgttctctgtatttcctgaatgtgaatgttggcctgctttgctagactggggaagttctcctgcataatatcctgaagagtgttttctaatttggttccattctccgtgtcactttcaggtacaccaatcagatgtagatttggtcttttcacatagtcccatatttcttggagactttgttcatttctttttactcttttttctctaatcttgtcttcttgctttatttcattaatttgatcttcaatcactgatatcccttcttccacttgatcgaattggctactgaagcttgtgcctgtgtcatgaagttctcatgccatggttttcagctccatcaggccattgaaggtcttctctacactgtttattctagttagccattcatctaaccttttttcaaggttttttttctaatccttcccatgggttagaacatgctcttttagctcagagaagtttgttattaccgactttctgaagcctacttctgtcaacttgtcaaagtcattctccgtccagctttcttccattgctggcgaggagctgtgatcctctgggggagaagaggcactctgtttttttgaaattttctgcttttctgttctggtttctccccatctttgtggttttatctacctttggtctttgacattggtgacctgcagatggggttttaytrgggatgtcctttttgttgatgttgatgctattcctttctgtttgttagttttccttgtaacagtcaggcccctcagctgcaggtctgttggagtttgctggaggtccactccagccccttttgcctgggtttcaccagtggaggctgcagaacagcaagtattgcagaacagaaaatattactgcctgatccttcctctggaagctttgtcccagaggggcagccacttgcatgagttgtctgtcggcccctactgggaggtgcctcccagtcaggctacacagagtcagggatccacttgagggggccgtctgtttgttctcagagctcaaacactgtgctgggagaacccctgctctcttcagagctgtcacacaggggcctttaagtctgaagttgtctgctgccttttgttgagctatgccctgcccacaaaggtggagtctatagaggcagtaggccttgttgagctgcggtgggctccgctcagtttgagcttcctggctgctttgtttacctactcaagcctcagcagtggcagatgcttctccccctgccaggctgcagcctggcaggttgatctcagactgctgtgctagcagtgagcaaggctctatgggcgtggtacctgctgagccagacatgggagggaatcgcctggtctgccggttgctaagaccattgaaaagcacagtatttggggggaagtgtaccgtttttcccggtacagtctgtcatggcttcccttgtctagaaaagggaaatcctccgaacccttgcacttcctgggtgaggcaatgccccgccctactttggctcaccctccgtgggctgcacccactgtccaaccagtcccaatgagatgaactaggtacctcagttggaaatgcaggtctgcgtcgatcttgctaggagcttccgaccggagctgttcctatttggccatcttggaaacgaccatcttgatttcagttcttttgaatatattcccagaagtgggattgcttggtcatgtggtaattctgtttttattttttgaggaaactccatactgttttccacaaaagctgtgtcattttacattctcattaacagtggacaaaggttccaggttctccrtatctttgctgacatttgagttgttgttgtatttttctataatagccatcctagcaggtgtgtggcgataactcataattttgatttgcatttcccttatagttagtgaagttactgtttgatataacctgtttgccatgtttatgtgttctttgaagaaatgtctattgaagtcctttgcccatttttaattggataatttagttttctgctgttgaattgtaggggttcctcatatattttggatattaatctcttatcagatatgtgatttgtaaatattttctctcattccatagattaccttttcattctgtttattgttttctttgcagtgcagaagcttttaagcytgatgtagtcccagtcatctaattttgcttttgttgcatgagcttctggtatcatatccaagagatcattgccccattgccaagctcagtgtcatgaaactttcccattatattttcttctaggagttttacattgccagattttacatgtaaatctgtaatctattttgagttgatttttgtgtctagtgtgtggtaagttagtgtgaggtaaggatccagttttgttctttgcatgtggatatccagtttcctcaacattatttgttgaagatgctatctttcctcattgtgtattttttggcactcatgttaagtatatgtgtgtggtattatttctggatgctctattctgttccattggtctgtctgttttttgtttgtttgcttgtttgttgccagcaccatactgttttgactattgtagctttgtagtatattttgaagtcaggaaatatgatgcctcaatctttgttcttctctctcaaaattgctttagctttacagatactttgtagttccatatgaattttaggatttttattctgaaatccctgattctacaaagaacaaccttactatattatgtgtgtatttatattgagtcacattttgtacagagaaggcagaaataatgcaagctactctctctaatgataagtgattggttctctaaaattccgtagatatgaccattgagttgtttttaaatgtcattatgactgcatagattttgtgatatttggtatttttcaatccattgcagttattgttccttatgatgttcagtttatctcatttgccaataggaattctttcacttttgctcctgagtccttttgatatgattccactagtcattagcacattttcactttctggtaggacaaattagcctcttctcttatattttctgacctgaccaggacataaccatatcaataaggcaccttggttccttttgtatccacagtccaggtactggaaatgttcatttctcacttagtcactgtttctaggtcttttctgaagagaagttttgaaagagaaatattttgcatgtttatgttgatatttttatacttctaatttaagtttgagtttataggtttttgttttcaattttaattcatatgtttatctcttttctcttaaactaaaagtgttagttttatatgattctatatatgcaacaatttaatagtattctaagagtaactcatattattaacaatttgatgaataaaaatgatttaagatttccttgcatttttcattgtccttagaaaatacccaccaggagtatacaatcaagttattggtttttgccttttaaaataatttgttgttggttaaactaccaatccatacacagttatattccctttttaaattttcttttaatttttatgaattactgttttactttgaattaattttgtttaataattatttgaaacattttcatgtttccaaagtcaaaacctcaaagtaaagcacatttggagaagtgtaacttatcttgtttgctttactttgtcccttttcttcccatggatatcaccacttttattaatttttggtttaaaatatatatatgtacacacatacacacacacatctttatattttcctatatatataaaaggtagcatactgtatatgcttaaacactttgcttattttcataggaataatatattataacaatatttagtaatatttctcatttttttcacacaaagcagacattttaagcatgagacctatcaggattcaggatgggtaatctcattcattcattcaataaacttttgctgagaactcaataaaagtaggggtgaagttcttggatactaagattaatacaccacagcttctgtcagaatggagcttcagatgcagtagcagagaattcacttaaagcaaggattgctcctcaatggtaaggactaatggaggtgagcatggggtgctactgcaggagcgcaacaaggaacacaaaactcaagactgagaggccttgrgccgactcctacagaatggtcagaagttaaccaggttaaaggtagaaacaggaaggttcaggaagagggaaaggcatacaagaagtcccatggatgatgaaatgagagcatggacgctakcaagaggaggctagagaaacagatgaggaaggcsrtgactggtgaagtccttgtactatgggtgtggcctggaagattctcactggcccagaaagggaaaaaaaggaaccttttaggcaggagttaggttttataaaaaccactcttcattcagttatttaccagcattatttaagaaatgatctgtagtccatgttactgtcagtcaggttcttaaatatcagaacacagcctgttggatacaccataaaatttgcagcctttaataaaatatcattattagtgtaaataaacaaaaacaaacaaagctgtggcccaattatccatcatctggctaaccacaccccctaaacttgttatgtaatctagaaatatgaaagaaacaaaatatgaattctgttttatagagtccattagcctacttaaataacagagttatagctatttaggcctagaaggaaggatatattcagttgtaaggcacaagaaagtcatggcactctttgtggagcaccatgcagtatttacctttgaattttagaataaatatcagatcttgtgctaaacttgttcctattgtatgcattgtttatggcaactattttattttattttattttatatttttttgagatgaagtttaactcttgttgcccaggctggagtgcaatggcgcaatctcrgctcaccacaacctccacctcctgggttcaagcaattctcctgccttagcctcccaagtagcttggattacaggcatgtgccaccatgcccagctaattctgtgtgttctttttttttttttttttttttgtagagacaggttttctccatgttggtcaggctggtctcgaacttctgacctcaggttatcctcccaccttggcctcccaaagtgctgggattataggcgtgagccaccatgcctggcccaactattgtttatgtgatgcttaggtctgtactgttctagtgctttatgtgtattacttccattaatcctcctggcttctttataaagaagcacttgtattatcctcattttataaacgaggaaaactgaggcataaagaaatggactgtatcaattataggtggtgaatggtagggattcacatgtaggcagtctgactccagggtgggtgctgttaattgtaatagcataccatgtctctctcctggaatataaaagaaagaaagaagctgaaagataataaaggtgaagataatatgtgaaagaacattttatattaagaaatttttaatattaacattttcccgcttaatgaacaaatctttcttgattttactgataatccatttttgatctacttcataaaagtttgagtactcttaaaggcattggttgaagatccattgatacccaatgtttgacrgatgaggtacctgcagtcttgcaagatatagtgacacagctggtttgtaacaaaaagactgcaattcatgcctcctgtctcacacaataaagtgtgagaattggggcatagcttttgggactttgagacccaatgtaaccagaggtcactccgaaaggattatatttagttctagacccttctatgctctagagaagtgaaagatggaattgaggatgcatcttcttcaggggctacatttccaagtaggacactttcttttttttttttttttttgtttatttgtttcactttttctctatagctctcgccaatggcacaattatrtataaatatatataatttattgtgaatttcttcatttttcaatattgaaaatgctctgatcattttctaaacttcttgcaaatgaaacgcctactatatatacacataaattacagtattagtatctacaaagacttgcttcaagggaaacaagattttttgatttggtgccacagctaattggttttaattatgcataaataaagcccaaactgcatagttctatgtctttcctttctttgttgagcttgttgtgctttgaaaaaatctacaatgtaatcagtgatacgtattatcagaaatataattgcaaatgtcttaattaaaatatacattcacacaaatatgaggaataagaaaattaatttttcagtaagtatatagactcctatactaaaatgttttattatttttttaacatccggttacaaaaatattttgtttatactatattaagttgcccttattttatatctttaagttctttcttttgtcttttagataacttttaaaatcttctcaatgaagaaacaagcttgagtcagatattttgtaacattttgacatatttaagagaaaggaagagagagggaagcttgtaaaataaaggcttatataagaagacataagaacaagcaacttaaagaaacagaaaatcagagttctggatagactttagagtgataaagtggatagaatatggtttccggtattgttccctgtcatgagttctgttcaaactcctttacctgtaaaactctgctcaagttattaaccatctctgcaactcagctttcttttttttaattataaaaattaacgtgtataaattacttctgaagttgttttgagaacatgtgacaccatctaataaattcatggataaacacctaattaatatttttgttttatttgtatatattttgttagacacatgatttaaggtaacatgcaataacttttttctttctgttatgatttattctccaaaaataaatttgtagatgataccagttgattcagaaaattttaaaaatacatatattaaacacctattgcttttcttacagcattagatacaaaaaacataaggatgagaaaaattgtgctgctattgcaaagaacttgtaaactttttctgctgacctctggcagaaggacttccttggactcagtcttgattatctgtgttcttttaggtagtatccacgacaaatcaaaaggacttagtatgtagccagaataatttgagtatttcattcagtactgaaaagattcatcttgcattgaatttgagtacattaggtttccctcatattttccccccattgatttgctggacagagtaaacaattctctaatcttatcttgtaaatcttacttttcttagtctttgtcatcaacactcataagtagctagtaagtgcaagtcactgtaattaaatgggtttttttttttttgaaattctgttgtttacaatattctcttggcctgtctcccctagaaagtttgtaccttaatctatgctttagactgagtttattgaatttcttttattggcaattctctggttgttagagacattacacataattatttagatccttctagaagaactcagagggccaaaattaaacattcttgttaagacagcttctctctggggatcacttgttagtttatttagttattcttttatgtaagcggttaatcagtgcaagcaatgaaaaggtatagggcatcttggctgctttctgcatttcaaaatatttttgatgtcttttcagatctccctatagagagctttgtaatgcttttctgcaacagagaactgcatgcacggacccaagggtcaaaccttttctaatgtaaatttaatgccatggcttcgtgagctaagatcatttataaatataaaactcacagaagagcagattcatctgttaccatgtatagtaacatctcaaagagacaactaaacatgacagttgaggggatttgcaagtgaaagagaaaaacatgagcagagttgagagccatataattatgctcattcacactgtgactagttttaaagtgatttattcaaaatggttaccagtgtactcttagtcaccttctttcttgactatgtgctaattctgattttggcatttgtctatagaatatacttgttcttcctcttgaaagggaattgtgctacattttcgtagtgtttaaatcagttgatcatatttcacaattattccataacgttagttatttgaatttcaagttgcagtgttcttagagaaagcttaatatcttcattatacatacagtcatggctagctaattagcatcatgaatgctgaagtttaaccctggatgccactatttctgacttcaagaatatattggattttttcactttaaaaagtttagaaggaaaaatatcaytgttgaattctacttcttggttatttcaaattatttcaaatrggaagccccctgtaaaagtgtccagacttactataaatgcattatagttctcatctattggtttataaataaaagcatccttgaacgttttccaaaagagtaatgcgatttacaatatagttaatgaaaattaagctatattggttttccgggagggaaattgcactacataattaattttaaaaatcactgtttatttattcagtttattgggaaacaagaaacagattcaaaataatgaagctaaaggaacacattgcattttgacatcgtccgtaattaaaagttcagtgttttggaggcaatttcgttttgtttgtgccgccattttagttgccattgtacttaaagctttccttctcctttcttatataggggttctcagcttttaaataaaagatgtaaaggaattatggttatttctgttttcagaataagtgtctaaaattttaataattttaacatttttgttttggttttttatttagtgattattatacaataggcaaaaccatagatcagtataaataagacaggtaaagtgatttgcacaaggttacatgtttggcaatggcagactaaaatgcggcttctagatatccagtctagtgttttttcccttatctgaacttatggtgccttgtgattccttgatttgttaaatttcagaaaataggcattaagagatttctagcccagacaggaatggtacaggaatggtaacttctttatttgagtggtgacttaggctaagctttatatacatacaatcacactctacatttgtaaaacattccgtagttttaaaaagtctctctcattctctcgtttccaacttatctttccctctctttctttcttgctttcactgtttcagaaagtgagaactttctctgaaatctacatacaagaaaataaaatgaaatcatggaaaaggtacagaagcagcttatgacatctacaagggaaatggctagtttttttaggataaaacaaattgactgattatccttacagtgaagacaaagtttgaagtttttcagaatgtgattaaaaatgatgaatgatataatcaaaatatccttcaaaattctgttttagaaatttgtgtaaaagtttgactttctttgaatgaggccttccatagtgagagttgctttatgagagctatcagaccctcatcatgaacttaaattgacttagactgatttctacggaaatgcctaacctgcatttctttcaatttcccttcatcttttcaatgtcttccaagctgtatgattcaccttaatatgtaaaaataaagtaaaatatatttgtttctacataatggtctctatattaacatctttgatgcacaattgaaataaaagctcaaatagaaatactgattacagtggggtaaatagcttaccagaattattcttatctggtcctaagatttggattggagatatggtaatacttccactcacaagtccatgaggaaaagatgggaggggaagggttggaattttaatatgaactataccttaggttggagatgagcctggggactggccagaggtctcttctagaattgaggtgggtggggcacacaaatggctcttatcctgcccctgctccttctctctgtgctctgaatttcacaccttgactccttcaaagggctttacttcagtccttcagtggtggcatcgtccctgcatcaccattctctctctccctactaaatcattcctaatagttcaccaagatttttcaaaatctttcttcttaaaaagagaataatctaaagccttctcttggaccttccttaaaccacaactgctcatctccgttctttctatactaacctttttgatgttttgtcggtatccatcaatgctaattcctcatacaccattcactcttcaacccacttcaatctcttttcacccccattgcacccttcaaattgttcttgttgaagatctccatgctaccaaatctactgtcctgctttgccttaatcttaccccatctctcaccagtatcaatacaattgcctactttctctgttgaaccactctcctttcttgccctcctagccatcatgcacttaaaagaaatgttttcatgttctcctccttctttgctactatttttttttttttgattctgaaatctttgaatgcctcagagcctctcctcttttcctacgttcacttgcatacttctctacttaggtaatattattccgttccatgagcctgaaaccacctgtaggttgatgattctcaagtttatattaactgccaagccttcaaccctgagctccagatttattcatttatctatctattctgcatctccactgagatgtctaaaggttgtttcaaaccttacatgtccaaaatggaaattttgctttccaaattatcacttaaatctgtggttccggccgggtgcggtggctcatgcctgtaatcccagcactttgggaagccaaggcgggtggatcacttgaggtcaggagttcaagaccagcctagccaacatggtgaaaccccatttctactaaaaatacaaaaattagctgggcgtggtggcgtgagcctgtaatcccaactacttgggaggctgaggcaggagaatcgctggaaccccggaggcaggggctgcagtgagccaatattgcaccactgcactccagccttggggacagagcaagactctgtctcaaaaaaaaaaaaaaaaaaggtctgtggttcccctgatcttccccatctctctcagcttttcttcttctcaagccaaaaacacaaaagccctttttgatttctccctctcgttcacttatttcataccttatgcatcataaaatcttatagttctgcctctaaaattcagctccaatcttgctgtttcttattcttgcaagtacctgctaccctacacatacaatccacttaggagccacggtcatctttttttctttttttaatagactttattttttagattaattataagttcacagcaaaatcgaatggaagatagatttaccacatacacactgcactcacataggcacagcctcccccattgccaacatccctaccagagtggtacacttgttacaattgctgaacctatattgacatatcacccagagcccacagtttacattagtagtaactcctggtgttgtacactctgtgggtttggacaaatttacaatgacatgtatctaccattacagtatcataccgagtagtgttactgctctaagaatcttctgtgtcccacctattcatccctctctcctacccaagctctggcatctgctggatgtatttatagttttactgccttcataattttgtatttccaagaacgttatagttggaatcatacagtatgaagccttttcaggttgccttctttcacttagtaatatgcatttaagtttcttccatgtcttttcatggctggatagctcatttcatttagcactgaataatattccattgtctggatataccccagtttatttatctgtttgctaagtgaaggacagcttggttgcttccagattttggcaagtataaatgaagttgctatacacatccgtgtgtaggttttagtgtagacataagttttcaactcctttggggcaaataccaaggatcgcagtagctggattgtatggtgagagtatgtataatttcgttaaagtgtcaaactgttctccaaagtggctgtaccattttgtatccccagcagcaatgaatgagagttcctgttgtttcatatccttgccagcatttggtgttatagtgttttggattttaaccattctaataggtgtgtagtggtatcttgttttaatttgcatttctctatgaggttgtgaagcatcttttccacagtaatcttttaggaaaatcattttcctccttaatatttgttattttttccccattgcttaaaaaaaaaaaatgaaaaactaccatgacctgaaaggcctgcatgatctggtacctgtatagcttagtcatctaggtgtatcttgttgctataacaaattaccacaacctagtggcttaaaacaacacacatttattttctcatagttcggtatgtcagaagttcagcatggacatcactaggctagaatcaatgtgtcaggagggctggcttcctttctggaggttccaggggagaatctgtttccttactcttaaagtgtttacagaattcagttccaagtggttgtgggactgatgtctttatttccttgctgggtgacatccaggccactctcagcttcttgaggcctttatctagtccttgcacatgggccactacagctcagaaccagcaataagccatcttatacacttcaggctgttgcctctctgaccactcttctatagtcacatctttctctgaccacagcctgggaagcgtctccacttttaagaactcccatgatcaaaatgggccctctatataacccagggtaattttctctctttgtgtctataccattagtcacatctgcacagtccttttggtatgaatttaaagattcctgcagacatgagcatctctggagggctgttattctgcctagcacacatctcacgtaaccttgaactccagcctccagggagagtaacctccttcctgtcctcaaatctgcaaagcactccactacctcagagaatttgcatttcctgggccttcctcctaggatcttttcctctggttctgtgcatgacagctgacttagttagggatggttctaaaagtaagtcagattaaacccatagggattcagggagttgaagttacaaagatttggggatgacagaagctatagacaaaagattcagtctgacaagtatgatagtaataactttactcactcctatctgtttgggctgttggtctctagttctcgggtacattggccctgatgaattgttaaggttggagaaagttttggacacattttttttttcctgcaactgacattcactcttgctttgcagataagaaaataattacgtaagagtttaacaaaagtaatcatgaaacttcattttttcattgtttttcttctctwatactagactttttcttttagcataaagagttagtaggctagtgatattttgaaactgaatcacatactcaaagaaagagggcattactactgagaaagagtgagagcatcattcatcttttggataccagtttgttttaaagtgtatattgctgagttgctaaggattttttcccaaataataatgagctcctaattgttagtctttatctgtttgcatggagagtgagcaaatatatattgtataactgttaactagcaaaccagtagagcatatagaatgaagcaagtggtgtgacagctctcctggtgtgatgaaactccacagacatccatcacctcatgtttgaagatacagcacagttcttagaaatgccattgctatttacaactcaacattagtttgagactggtaaatcaatcagtcaatcaaaatctctccctttaaaacagtaccatttttctaataaagacaaacaaattggcctcaggattgatttggagtttgatggactgaagaaaaaaaagcttttctccatttatattctgagaaatgtaagccttgcatttaattctgttgcttcacactgagtaaggaaaatggtgtatctcaggacatgttctgacgtaataacaatgaaatgggccagtctgaaatggggtaagaactggaattcaggaaacgggatgcaggtatggaatgggattagacatgagacagaattccagcctttctggaaaaatctagctcctgtcaactagcacttgttaaggctattgattggctgaggatgttggcagaacagtgaattagatggtcctggaggtagaattcataacatgtcgatggaaaatctatgagcagataacagtgaaaagcagaactttatgagtccttggaggtaagcatgtaggcagaatgagggagtaccctgtttctgagggtctaaagcatgcagttcaacataagggtcccagtatcagggatgtgatgaaggcagacattgggattggagacagagtgaagatacctgaatacaaaaccacaggaccattaggttgatttcatgctcagtcacagatcatggagccagagcttctttagtctatcctgcctgaggtcacaaatgggtttctcgcaataagagaccaggtctgttgagcttataagtgggctcaggaccccagtcacagggttattgaaaaatgattccagagcattctccaaaatttatggcactcctatttatttattttactaatttttctctcatttgccactctaatcctacttttaaacccatttttatccctttctcttctctcctttggttcttggcaaaaggacttagaggctatgaggttatggcggcagtaaggaaaatattgcaacaaagggaaccattttgggaagtcctgacatagacatttctatacatttttgaaaggggatattttacaaataattatcaaatgaagaaagttggttggkcagttatccagttgggcagagattggattatcagtaactggtgtgataaattcattttcttaaagaaacaaaggccttttatagcattaactgcaatgccagaggtgtgttacaaagaattttctcaaattattttcttatttttctttctattatcctttattcagcaggagtttattttatttttcatctttcttatgatttttaagatatgtactgaatgcacaagagggctaaaatacaaccttrtcttggtctagagacttgccacccagctggtagttttattgtaagaacagttacctggggaggtgatttactggtaagaataaaggtagtatatcctattatcttcccagtgtttctctaacagactcattagagcatggtatatggaattcagtggggacttgagttctgaatctggacattccctaactgaaaccctaaataaggaagagcgaataatggaatctcaaagatctatatctgcaggaggatatggttgctcattaagatataaataccattttgatgtaagataaataggcaaagggatattacatataactcttagcctcacattaatacagtccatattaataacatcatactctcacaaaaaaccttattgaactatgtaaaatagcaaaaggactttaaaagtcctgctgaatatcatatgtccaaataagactacttctgaatccacaactattacagaaacaagctttgctgcaaatgattttgactttcctgacttatctttccacacgatgagggatgtcttttgattctctctgatacagtagtctcatcttgccagtgagtaaattgtaaattacttgactttggatgatgcattattgcttcaggttcttgggtgccctttgatacatcacatacagtgctgtcaagctatgtaataacctgggaaaatgaatttaccctcaaatcagtatttctttcctttgcaaaagagctattgtaaataacttatgaccctccttgctcttactttaccccaaccccttctcatatcttatgacttgcctactaccacacgggtatcccctgggtgttcaggattgcccaaactctaatgcatcattgaatcacataatcttgaccttttgttatcttcctccctctgtttcttgcccctctgtattggttatctattgcaatgtaacagattgcactgaaacttagtaacttcaaataacatatttattatctcacagtttctgtgagataggaattctgaagcaacttagctctggttctgggtcaggatctctcaggaagttgctgtcaagacattgactggggctgtgtttatgtgaagtgttgactgggactggaagatctgcttccaagatggctcattcacatggttgttggcaggaggccccagtcctttgtcacatgggtctccccatggggtttgtgaaatatccttttgataggccagctggcttttcccagagtgagtgataccttttatcacctaggcttgaaaatcatacaattcctccatattctcttcattggtagcaagtgactaaatacagctcacacacacacggaagaaaattaagctccactcttgaagggaggtgcatcaaataattgatgtgcatattttaaaaccacctgctatggtttcggtgttttttcccctttaaacttcatatgaaatttgatccttagtgttggaggtgggacctaataggaagtatttggatcatggaggcagatctctcatgaatagattaatgcccttcctcactctattagtttccattagagctagttgttaaaaagagcctggcacctccccctctctcatgcttcctctttcaccatgtgatttctgcctatgcaagctccccttcaccttctgccataagtggaagcaacctgaggccttcaccagatgcagatgcccagtcttgaactttcaagccttcagaatcatgagtcaaataaacttttttaaaaaaaataaattactcagcctcagatactcctttttagcaacacataatgaactaagacaccaccgtatcttacatactccacccttgccttcaattcatctctctcacatcttctgacctcagctgatgatataactgctaactaaactaaaataattaggagtagttgtgttaaaatatttaactcctttgggcaacatagtataaaaatgaaaaaagagcaggcagccattttatatcctagctctgccatttaataattaaggactttgggaaaattatttaacttttataacactcactttaatcaaccataatatgggcattttggtatctaccttgcaggatgtaatgcagagcagaggtcatacatgtaaggcactgaagacagcattttaggtgcaacaggtgtgtgataatttgtagttgtaataacaataacacttaattattactgtaggctttgcattatatctgggacttctggtgaccttggcataactttctaaatggtaggaatcactgtggcagatggatgtgaagtgacatttttatcagagctctcctcagtccaaagacttgctttcttcccccactcagcctgtccttccatgatctctgccctgaggcttcagtacatcttagtgaaaatgtcagtccacgtaaggtcctggatctgagcactcgctgtaccacctatgagctggtggccttaggcaaactttccaagctttgtaagtcatcttttctcatacatatatttaggaatacttatttctttcttgcagtacagtgaatcaacattgtctctacaactgatacttcattcttttgttcaaggcagtagttctaaaacatggctgtacgttgcaatctccaggagctcttaaaaaattcctgaggcctggtcccaccccagagattctgatttaattgatctaggggccagatggtgcccacacatctggggtttttaaaaacctcctaggtattcctaatatgttaagaactgcttattagattaataattttatctcctataacagttgtgaaagcaattaggccaaagttaaaatagtctaaatacaattatttacatcctatgtttccatgcttttgtgctttcatctttttccccttgataaattatttcacttctctcaatatatatttgactcatttgttctgtagcttctaattttattattcttgctttgctcaaaccccaaactctcctttgtgctgttatatattctactttttgaagcaataagaaaggaataagcaagtacagattcacagtgttgcttttaagtagaatattcttccagtaggagaaatgataccatgttgctttggtggaagtatgtaagcatctttcatgctctgtaagaaccgtcaatgcatggtgccattggcacactggactgtgtattggcaatggtgcacatagcagatggggttgagtgtaggcagtcaagtgttcaagctctgtctctgaattgactaatggttttgatggccgaaattcaaggccaaaagcactgggatgccagtctttgtgttgtattgagtgtctgcaattaaagctatgggactgttccctttctgctctaactcaaatttaattaattttgaattaaaacaaatagtttccatgaccacatgaggtacattttgggtttgcctgatcaggattagtgtaatgaagtctccaccctttcgttatcccccaccaaagacccctaagaacctgatttaaaatgctatccaaagtggcatgttgctgctaaatattttgatatgtatagggcattttcatgtccatgtcctatgtagagaatctgtaggtgtcctcttggmaaatgccagtgacctaatgtagcatagaatcagcatgtgtatttggcactcctccacaactcgagaaggtcatttgttaaggctttctgaactatttcaggctaggtcctggtctaaaataaagatatagtataaaatttagtttgcagtttgaagtttgtcatcgtacattacctggttattgttctcagaattagctctattagttaaagaaaagctcagtcctagtgtatcatgaatttagtttccaagattatgaatttagtttccatgtgagttatttagctttattctattgcattatcacagattgctcttttaatcctgctggaggctttgtgagcatcttctcttttgaaaaagagagttgctgatcagtgtcattgcagccaccttactagaatattgtaaagcctatacccaagggcccacacccaagaatgacaacagcacattagatgacaagcaccacaaatctaaagttattatttatttgaatatgtttctgggtacagatgaagtgctcttggcttctagtagaatcatgttatatggtgtgagtcctcaattgatcactgaagccaaggcctttgtaggctgaatttttgtgaggttgtccactgtgataagaataatccagcacacagggtattcagctacatcatgacagaggacacagctctgctagcttttgcctaaataaattgcactcaattactcatagactttatagattgtatataattgcttgtttgttctgcattttctatgttggaagaccatttaactcagattatttggctttgtgtgtgaacaccagtgcattatcttgagtaatgttggaactgagttcatataaactgtytcttatgttgttttcatcctgtttccttccttttagagactccaagagtagaaacatccatgggtactggaattgggtaattagaatgatttggaaaaacctgccagtaggtcacccaggatgctgcctgatagtgtctgacagctgacgtagagtgtgaactgagtggcaggatgaaactctgcttgcttaattcaacattctccatggctagccctgtgctgacacatgcagatgaatgtcttatagcattttccttcttatctactttaattctattattatatagttagaaaactgaaagaacttcctaagagttgtaaggctgtaacttcagggttacgtgtagttctacttagcttccaatttagcattttaggaaaactgctattatgcaaacggctgccatttgctatgagcaaaagaaattctgaattttgtcaaagacttaattaatattatgattaaaaaacccacagttaatctaatgaaacacaaatggagaaaaaaagtgtcattgctttcattgcctagcaggtattctctaaatgtgatgtgttagtgccattttttaagtcactggcaaattctagctgctgtctatttttagttttatttccaagactagggtcatcaaagtccctgagcacagctataaattctgacacagttatctttgtattagtaggaagagattaggctatgtttgagtaacagaccctgaaacattaatagctgaacatacacaagtctagtttttgctcgtgcaaagtcagctgcctgtccatcagctctccagggtagctctctttatgcagtgacttggggaatacactctgataccatcttgtggctctttactcttaaatgtggcttttagttccctatgacatggaaaagaaagagacctaaagagcttgtacctacttttttcttatagctcatagtccagagctaactagggaatgtgtgtccaggtagatgaggatgaaaggggacctgataaacacagagcattatcacaaccatactttcagttcattctcttcactttccttccctggacttcatcacttcatgttcaattacctgcagttgtctccatactgtcttcctggttttgttctctgacatctatagtacattctgaacgttgctgccagaacaatcttctttaaacactggtttatatcagttctttgctgcaacatcttcaaccttccttcctccagcattgattatgtatactctctacatttcccagtatgtgtcaggtaagactttattgtttggctccaggctacatttctaagcttatccctatgcatctatctccaacatgaacactcaacttcaattcccaattccagcattaaactcatgcttttctaaacatgcgttgcccaggtctacctctgcatcataattttcactctgccttctgtctctatctattcctgagtgttcccagtacargagtccaagataattgctctatctctgttgtatgctcattctatctattatttgtgtcattcagctggcattcctgactcttatcattacttaactcttcatgggtatttgtcttatctcttctactaggtcacttgcagaacaggtgctatatatactcttgtacatcccaaagatctctggaagatgctaaatacacagtagtgtgtggtaagatttattgagaatagatgcctgaatgattgactaggtattcttaatttgctttatacgatccatagactttggttccttataaagttaatgttaacattatgatgggatttatacttttatttcgagtgtgaggtctgtggcttagaagtcttaagatgaatattgtgattcctagtgatactatctttgcttggtttttataagcagagttttaaagtctttwcattaatggcccaggcaagttcatggttcatagtagtaaatgttggtgctgtattatgctttaaatcaatgtcttaataccatgattaggaaggggctacacaggtaacagcacaagcctttggagccagacagttgtgggttcaaatcctagaacctgcaactagtggctctgtggctttggggacttggctgtcttgaatgtgtttctgtaaaatggtaagaataactacctctatcacagaattgttgagatgatgaaatgacaaagtctacaagacactaatcacagtgcctgacagttattgctcaaaaatagttaatttaccactcacattatttaagaaaatataaatatcactttattggtttgtacaaagtcacatttatctttctgtagtttctttgcaaaacaggcaggtggatgaatctattcacaaagggggctctatccaaaataattttggcagtaggtgtcccaccaaaactcacatgctagggccactgtacaggtatgaaaaagccacctctactggtccagtagggtgttggacctgttccctgtggtgactgcagggccagcctgaattatgagagagatggtttattgtgggaggagactgtgatgtgacgaccttgaccacagttgctcctagaatcaggtagggttataatggctatggacaggcagagggcagctccatttagaacatcaaaataaatggtaagaaaaagtaataaaaggaagacactttggttcatgcccactcttgtttgttatgcttcctagcagatcagctgaatgagaatttaatttgttgtgaatactggcagcgtgctggggaaaaatggaatttacaaacgttttgaattaccgtgaagcttgtgaaattgtatgcactgctctgtttcatatgttttcatgggtgtgatgcctcgtttcaatagtgggagttgaggctgcaaatagtgggggttgaggctgccgtgagccggatttagaactctattgtattctaaaacatttaacagatttatctgagttttaacggacaaaaaacttcaacaagtatacagagaaaaatgtggaagataggatttgatatcaagtccaaaatgcccattcatggaaaaaaatgaagggacaatggaagtggtgagtggtgatactttcttcctttaatgtatccaagctattgctttcctttcctgacttccgaaaaccragtgcctggcaagaactgccaacgatttattgaaactacattttccttacccaccatagaaacaaatcatttctgtagtgggtaaattatacaaagcactagtgccttagcgactttaacggtttagactttcaaacttaatatttctaagttttgaacattataaatctctataaatctggattataaacaaactttccttgtctctgggttagatctgggtacaaaaatagaatccattttcttgcattttgcataggatctaaaattactctcctaaggttggagtttcctatttttctaaatcaagacaagaatagaggatatggaataaaaaggggtgattctaaactgagttcaaaagtcagtaattgagaatggtcatgaggcccgaagcaggaaagctggatttattttcttagaaagacttcctcattgcttccctaggagcaatgtaaatggccatctcacagataaatggtgagagaatcttatcaggcttctaacttgtcacttttcctggctccagtgcaagcattgataggtgacagttcatgagatagtaataaaaggcagcaggcattggtgaaagagacgctggagccagcatcagagctggagttaatccctggccccagtccacttcaagaaaatataattcaggtgagaagcaatgtgcctgctgtgcaaaagaacagtttcaagagatgcttcctaggtcttccctattaaaccctcgccataccctgatccatctatttagaaactctgaggttggcattacgttttggggcttggccaatctattggttaggaattgctaagaatagaccagaacacagtgcccaaacccttaccatactgaggtccaggatggggtcacaaaaggaacacaggcaggatttcttatcaaaacragctggccaaccatgaagtaggagtgagaggagggaaagacaggtgccaggtgatgcagaggtaagaaagtcaggcagctcagtccatttctctgtcctgagcgtcttcagagaaaggcagagagcaatactgctttttgaattatgtgactcagggcttcccaggtaactcactctagtctttaaaagaacaaaataaacaaaactgttcttgaggaaagcaaaggtttatgcagagaacctaataagaatctccagagtttgcatgtcacagaacaactgtttataagttacctttttcctccttatctgtgcctggggacttytctttcttgtctttttcctcttgttcctatttctgttcccttgctcctgcttgcttgcccatctttgcatttctttacacctggcagcaaccatactctttcttgatcctgcwaaggttaaacattgttagggccgaatttagaatttctctaatttaaaaaaaaattctaataaggcccagatttcaatcatggctgcaggtgagttgaagactataacatattctaaaatttgatttgcatggatataaatgtgtataaggatatatccacattacattcttgacaaaagtcattctaatgaattattgaaagaattaggtcaaataaggattgcatattgtgtaggcagatgcattttaaaatgaaatagtgacttttagaagtatctggtgactcttcaacaatacctggttttccaaacaaaattaawacaaaggctttctttcaaatgttctttatctcaatttcatttaatttcctaggagagttagtgatttgcctagcactttctgtttcgttgtttatcctaatatatgctcagttttctgtttaactagtttgttgttgttgcttttcttttccgacaagttttcagagyggaattcttagaaatgcttagtgaagctaccctatggcccattttaccaactatcagatctttccctgaagaaataacagtaaggaaaataggaaaatatttcctgtttcttctggaagaaggcagatatttattatgtattctgcttagtaatatcactcccttaagagactgagggcatggtctcaatttttcttaaacaagtcttgggcctgcttgatgtaacctttggggatttaacacgtcagccaatgagccacacaccacaaatctgtaggcacctgacactgaaaaacagctaagcatttatactgtacataaaactctgaatgtgctcttatgctttaaggactcttttaatccatagggtgtcttagctatgatagtggtctctgagccagtggatgattgcttctttttactactctttctccacaataattgcatgaatcggattgtcatgccataagcacaggaataggatacttaactgagaataatatctcaaatgacatttaaatgttttgctctgtgagattggattagcagatttactatttttttattttaaagctttttattatgttgtcrtattattgaataactaccttccatatggtccaataataattaagatgttggattgatagattgaatcagcaagaggcttaaagcaagtgaggcttaacctgttttggtagttttgatcacttttcttatgccatttaaatactattgaatgatttggaactggttgactgatattttccctgttttctgctatttactttcttctatttttttttttttttaaataacagtgattaaaagcaaaagtgacaaaatggacactggtaattcattcagtgtgatgagaatccatgaataggacccaagtttatttttcagctgtagccttttgggacagttatataaccactatgttcctggcccttcctcatgtctgcagcttctcaacctgctcctctcctatttgttctccacatgaaacttctcccacatctttcttcccaccactggactttgtgtaatttgtttcttctgctttggacattctttcctatccttattaccttccaaattcgtcatcagcaccacttgtctagcaatcgattgctgatctccctggctgcatctaatccacctatgataggatctcattacagactgcacttgtccttcatagcactgtggcagctgcagtttcaggtttgtttgcgtgaaccttggctaaagtatttcttcctactagactgtaagccaaatgraggcagaagtaggaatagtgtctgtttctggttccctagcatggattccagcacagagttttacatatttgttgaatgaataacataaatgaaygaataaacacagcaggtaaagaaatgtgtaatttttgtttgtttttaagagacagaaccttgtcagtctagtacttcacttggtcaaatacctcttttggtagaaaagaaaattatatagattggtatataccaggatgaattcagtttaaagagaaaacatgaaattcagtagaaatattctttaaattctaaacagagaaattgaaaygaagttatattcatactgcatgtgggtatagttttttcttacgtatatttatgtatacatgtttaaatataatacctttacttaaccacctactgtacacaggcaatcaactggatgttagagggaaaacaaatagctaatatctttgcataggtactgcagtaggtactgtcacatattttattacatttatttctataacagttcttttctttcaatatgactcagagagattaataatattccaaatatgacaaaacttgtaagaggttcaattgggaattgttcctttttgcagccctgtgaatacacctaatggtcctccaattatggaggcggtagttggccagagtttccagctgctgagctctgatattcatcactatgtttgtaccctggccatgctctctgagggctgttcacagacaatgactgagcacagcaggagttctaaggtacayttgttcctgagactcatggacccctctcattgahcsctgtgacttgaggactcccaaatggctttattaaccttctttagaatgtgaattctaggaggctcccacccaaacgtccctcactgtctctgcatcagacttgcatctggtagctctgatacctttcctaccctgctcaaaatgcttacatgtttaatcctgtgttggcatctgattcttggagaatccagactaactcatcctttcatcaagaagcccctgagaagagaaggaaataaataacaacttagacataagttctttgctaagatccatgtcaagaaagatatttcctaggttttcttctagatttttaatagcctgaagtcttacgtttaactctttaatccatcttgagttaatttttgtgtgtggtgaaaagtaggggtccagtttcattatactgcctatggctagccagttatcccagcaccatttgttgaatgggggcgtcctttctcctttgcttatttttgttgaatttgttgaggatcagatggttgtagttatgtggctttatttctgggttctttgaaacaagcaaaaaccaaattactccattaaaaaatggacagagggcaagaacagacacttctcaaaagaggacttacaagatgccaacaaacatgaaaaaaaaagttcattgtcactaaacatcagagaaatgcaaatcaaaaccacaatgagacaccatctcacaccagtcagaatggctattattaaaaagtaaaaaaaaaacaaaaaacaaacaaacaaaaaaaccagatgctgttgaggctgcagagaaaaggaaatgcttatacactgttggtggcaatataaattagttcagccactgtggaaagcagtttggagatttcttaaagaacttaaagcagaactaccatttgaaccagcaatttcatgactgggtatatatacccaaaggtatcattctaccaaaaacatacgtgcactcctctgttcatcacagcactattcacaatagcaaaaacatgaaatcaacctaggtgtgcatccatggtgaattgggataaagaaaatgtggtaatatacatcgtgaaatactatgtagctataagaaacaatgaaattatgccctttgcagcattacggatgcagctggaggccattatcttaagtgaattaacacaggaacagaaaaccaaatatcagatgttctcacttacaagtgggagctaaacactgagtgtacatggacataaagatggcaacagtagacactgaggactgctagacagggaagggaaggaggggagtatgggctgaaaaactacctatggggactatgctcactgcctcagtgacaggaatatccacaccctagatgtcagcatcacacaatctacccatgtaacaaaccttcacgtgtaccacctgaatcaaaaataaaagttgaaattattattattattattattwtttttgagacggggtctcgttctgtcacccaggctagagtgcagtggcacaatctcggctcactgtaacctccacctttggggtttaagtgattctcctgcctcagcctcctgagtagctgggattacaggcacccgccaccatgcccagctaatttttgtatttttagtagagatggggtttcaccatgatggccaggctggttttgaactcctgagctcagacaatccacctgcctcggcctcccaaaatactagtattacaggtgtgagccactgaacccagcgaaaattatttttttgaaaaataacataaactctagaatcagaaaaatctcaatttgtgtcctgatgtttataattaatagctgtgtgaaattaagaaagtttttaacctctgtgagtcttgcttcctcatacataaaatgtggttaacaacacctgcagcatggataaaataagattatttatgcaaagagcaaaaacaaaaaataaattgcttctccaaataagcaaagatcatgaagattaggatttgggcattttaatggatgtttagttcccaggtggatagacattttaaaagtatgttacggagggttttgttataaaatcacctattttcattgggctataaaatgaatttggctgatagtgtttcaatagagaatatagtctcagaatttataccttgtgcagtgctaatatagataatactatagttgtgtgcaaaatttattggtcagaatatttttgtccagtaaagatgaagattgatttgactgagtcagaaatacttgcatgaaatttatcgtataaaattatgagatagtmacatagtcaaagaaaattatccttttaaactctggcatttatgattatttcaaaatccctaatagatgccagttattgatgagttctcytctctgacatttatctttctgtggttgttcaatgtaaagattccagaacagtacatgtacttcaacagcacttcattttgtaagtttgtcgcttttatctccaaattttgatgggaattctttgtccatatgtacttaatattagaaaaacatattgttgagtactttttttttttttttttttttttgagacagagtttcgctcttgttgcccaggctggagtgcagtggtgcgatctcagctcaccgcaacctccgcctcccaggtgcaagagattctcctgcgtcagcctcccgagtagctgggattacaggcacccaccaccatgcccatctaattttttgtgtgtttttagtagagacagggtttctccaggttggtcaggctggtctcgaactcccaacctcaggtgatcctccagccttagcctcccaaagtgctgggattacaggcatgagccaccgcgcccagcctaaatttctttgtataaagcagagtgatagcttaaatcagagaatacaaattacctgatgatgctctcctggtgtttatatgattttcttcaacataagatggtcagctttattcgccctctgctttctgccaatgagttttacagaagtaatttagctctctaaacaagcaatcaagcaaacaaacaaacaaacacatgaacaaaaccagcagagcaaaacaaaccagcaacaaagccctttttctaaaatgcaattcataatagttttattgaaatgtagaagtcagcagcttctgccttcagtccacagtgcatcaactggtttcccttgaacttttgcatagtggttttttagctctgtgtagactcctcaggacaatggtgagggtgttccaaacaaaagcacttctgactttgttgttgaatttaggtatgagaatctatggtcaaagggccctacaaagaaaaycataaacaaatgtgcagcaaaggaaaaaatttgaactgcwcatttacaataatggcttctgatacacttagtacctcttgagtgggagttaggcatcagtgtgtggagtaacaataggaataatcaatgaacagaggagagatggtgaaattagattaagcagaaaaacatggctaaagcttagaatgttcaccaatattatgaagtccaaaaattcttcaatttcccattgaagaatatgaaatttgttcacagcatttggggtgatactgaatttgactgaatagttaataagatggtaaagttagcacacaagtgagtatgtttgcaatatattttgcctttatttgtttttctcataggacaaaggaaattgaattatattagattgtgtaggataatgtatgctattgtaaattcccaagttttgcagtaaatttaacattacaataaaatattgtccattaatagccgtagcaaaacrtccgttggtatagtttactgcatcattgcgtttttgcaaatctgaagtggagaataggatagtaatgactagcatcagaaattgttgctaatttcctaatttgcawaatgtatctctaacaaactggattgtcagtttataggagacaccaaatgttcatataatgaagtttaaaaaaaaattctcagctgaaacatggcctaggtgcttggccaagctgggtggtacgatgtttccttgggatactgccatggtaaatcctataaaaattktaaacccttttaattggaattatcaaatgttaacctgacagtagtatgttagaagtgaatatagtgttgtgaaatattagtagtcttggtttttaaatcaatattttatgattacaggtaagttaaagaaaaaagactaatatagcaacattgctttgaggtctatgtgtggtacatggttcctgacacttctaacatttctaaaatgccttgggttacactcagctattatacttggcagacaggatgaatgccaacacaaagagaagtttgactttattcaagatgatacacttagcctctcacacctctgtatgtacttgttctctaatctgcctccagaatcaatataaatgcttttattcatgccccarataatctccaacctgaccccagtttgtctcctctactacttwcctcctgcaccagccttctgattgttcttttattttatttattaatttaatttaatgtattgagacaaagtctcactctattacccaggctgcagtgcagtggcatgatcttggctcactgcaacctccrcctcccrggttcaagtgattctcatgtctcagcctcctgagtagctgggattacaggtgtgcaccaccacactgggctaatttttgtattttaatacagatgaggtttcaccatgttgttcaggctggtcttgaaaaacaagagcctcggcctcccaaagtgctgagttgcaggtgtgaccaccacacccagccctgattgttcttttaaattaactatatccggtctcatcacagccatgtagctcatgcagtttctcttgccatctcatccctgttctaatatttgaggacatgacaaaaaatataaatcaggcagaccataattatatagtgtttttattggcttatacagcacttaattgtttgagttaattgacactatttaaaaagtcagtatttgttacatgtcaaactagaattctagattctcttgaaaaatttggtaacactgtaggtaccttcctacccagcaatattcagctgactttgataggcatttgagtttgcaacctgtgaatttacattttgtctcttatttaaggcccatggtgtttcattttctccagaaaagtttttctgtttcttctagcattttaaaactcctatgagctcatcatctctaacttttatttagcttttagcactaatgcttcatagtgtcaagtgcattttgtgtgccattttgtctcctctatgctcayagtaagttttttgaaggtaggcactttgtctgattttttttttttttttgagacggagtctcattctgttgcccaagctggagtgcaatggtttgataytggctcactgcaacctctgccttctggrttcaggcgattctcctgcctcagcctcctgagtagctgggattacaggcacccacccctatgcctggctaatttttgtatttttagtagagatggggtttcaccatgttggccatgctggtctcgaactcaacctcaagtgatccacctgcctcggactcccaaagtgctgggattacaggcgtgaccaactgtgcctggccttgtttgactctttatgtcaacacacagagcccaggacagtgcagctctgctctgccagtgtttgtctattaattacagttttttttattttttttttaatttttgcgacagagttttgctcttgttgcacaggctggagtgcaatggcgcgatctcggttcactgcaacctctgcctcctgggtttcagcaattctccagcctcagcctccggagtaactgggattataggtgctagctaccacacccccatgcccggctatgttttgtatttttagtagagatggggttttaccatgttggtcagggtggtcttgaactcctgacctcaggtgatccacctgtctcagcctcccaaagtgctgggattacaggcatgagccaccatgcctggctaattatagttttatatagcaatcattattattatcataaatactcaaataccttcagtgtatctagtaggcccactccttaatgaaagtacatgctaatattaaaaacattcaaatttaaagcagaaaaatatttggcattttgcaattcttcctactaagttaatttttttttttttggtagtgccttggcttaatctgtaatggtaaaaagtttttgtgtggcagacacgtgaagagaatgacaattggaactattctttttaaatgtaaatgtgtatttgtacattgaaaaatattgattttaagagatatagtagactcatattgcatgttcagagtattttatttattttgttcattgatacttgctttttgttcccaataacgacatggtgaggcttgaacttagacgtgagagctattttttatttcagtctyggctagaagagcaatctacctcagaaaatagaggcgaggagtcaggtgctttatgttcttcctctctgtaccctcatcctctgaagccaaagttacactccataaaaataacacagaatrtgagagctaatagagcctcagtttatccttctttrtatctccccctggaatgtcctgggcagtgccttatttcccatttgcaaatgtgaggacaatatgcaattaagagcttcaaccttgtcattggtttggtgttagtcaattaataactttctgtgaattattcaatagaaacaaaataaaagcatgtccaccctgtggaacctcaggacagaaacccagaggagcatttacttaataacaaaatgctaatacacatggagtttttgagttgtttcagagagaaaacttgcatgctgaagataatgraaatgtatatagttattgtattattctgttttcacactgctgatgaagacatacctgagactgggtaatttataaagaaaaagatgtttaatggacccacagttccacgtggccagggaggcttcacaatcatgtgagaaggtgaaaggcacatcttacatggcagcagacaagagagaaaatgagagccaagggaaaggagaaaccccttataaaaccatcagatctcatgagacttattcaccaccatgagagcagtatgggggaaaccacctctatgattcarttatctctcatcaggttcctcccacaatatctgggaattatgggagctacratttaagatgagtatgggagaggacacagccaaaccatatcagtcatgttagttttcygtctatcagctattctttttctttttttatttttccttttcactagtgtttgagttaggataattttgctataaatgaaatttcatcatttaaacagttctgccatgggagtgccagaaaatttataatacctcgtggctcctacccaataccctacaattaccattcagtgtgagttcttggtagatrtgtacataacacattttatattttgtagagtcaaataaaatacgtgtttcaaatattaagtctcaattttgcaataaggtattcaaccagttgtcattaggtcaacattcattgtgtatccacaaaatagatgaggagacaattacttatttttgtaaaatggtcacaaaagttgcacaaaataaaagcctccaaaaagctagatgttgagcaattatgatgatgcgtaggcaacattctaagctctagtggaggatgcaaaggtgaagacctaatctctttcttcagagatctcacaatcaagggaagaagataaaaaacaaaagcagatcattgaaaacacagtcctataagtgctgaactgagtatcctcttggtatagaaggacaaggccctgtactgacaggcaggagtcctgaggttaggctgtgtcctgctgttaactagctttgtgactatgtgaagtaactgaactagctttgtgactatgtgaagtcagtcaaattcccaggacatcattttctcaaggtgtagtgttaggtggatatgacctagataacctttatatttattttaatttctttgatttttttgcatttctgtgattccatatttaggtataggcaattaagagtatagataagaatgtataaagctataaataaaattaacacattacaaatcaataatattaagggtaaaagcaaaacgtaaattttatttttcctaaaaccacctgaaaaaatgcatattacatattacttttattcaaatgttcaacttatggtgtattttaataatataccatctctatgcagaatcactgtcaaattttccccttaagaatataatcttctctttgatatctagtgatttgagctaaaaataaatattgttaaaatcaatactaaataatgtggatagctgaaaatgaaaaaggaaatatcttgtgtgaatacatcttctgtgattttttccattacgtttacatattttatataatataattgcatatggcaattatttgattacataaattgtgccaagagcataattaagtataattatgaaaatatgaaaattatatgcataaagtggctaattaaaatttatttcaaggaatcgagaatattcagcaagaaaaaacacattaatgaaacattgtggttgtgataaaagcacacatactcgaatttactgttcaggactgattctctgattatttactgacaaaatgctggcacctttatatttatgtctttttaacatgatgatagaaatacgtactctgaccgtatttctactatgtagcttgcataaaatatggtcaatgaaaatttgcctggagtaaaatgatacttccttttggaactgcatttacacacacacacacacacacacacacacgcacacacacacaccccatgcctgttaaatgatagcattcataaatgttagactcataaagaacattaacaatctacttcaatatctgtattttataagtatggaaaaatgatgtcttaagaggttaaatgatttttttggtgtcatcccaacagttgcataattgggaccctcaatccttttctctttccaatattttatggtttttctctaaaatatgccactctaactgctgaggagaaaaagcaaaacaatttcattatcctataaaatatctaaatgtatacaattccgtattttaatataacaatcatttttataacagacattttatattgcattttcatgggcataaaaagaatatatatgtattttaggttttctatgtatattgggaagctatttaatttatctaagtctacataaaatatctaaaagctacatctatgttaatgagcactctataacagaatttgagtatgagacgttctattgcagtgtttgcaatgttgcaaaatagaaactttttttttatagataatgaaaccaaaataaattatttcagatcaagatagaaaatagggatgactagctagagtcaaatttcaagttaaggttagcctacaaaatataattatcagaataatttctttagtgtatgttaatatgatgtcctagctcattttgttttgctataacagaagcccacagaccaggtaatttatacagaaaagaaatttacttctgatagttctggaggatgggagaactaatatcaaggtgctgtcctctgatgagggccttcttactatgtcattacatgggaaggtggaaggggaggagagtacaagagaaggtgagcaagagggggcaaaatttacattgataacaaactcactctcatgataactaactaattcccatggtaactaaccaactcctgtgataacaacattaatcctttgttcagagctctcctgacctaatcccattttattaggccccacctcccaacactgttgcattggacattaagtttccaacacatgatctttgggaaacatattccaaccatagcatatgagctatctgcctattagatctatataatctaaaaacaataatggcatagaaaatcatacacattaatcacatacttgaataaccttaatatgactcatgaaataagtaaagcagcttatgatttggtaggattttggtagaaattgacacaaaataaacagaaaagctgttaattacctcaatgccatttctacatatgactgaattctgtgataaactatattttgttaggtgctatatgaattatgaaatatttcttaccaactatgtgagatgacccccgtttctgaagaaatcttctatgtccacaccagatcactaggaggtctcctcctagtgacacaattagacaccctrttgctaaatttcactctcaacttctgactaacatgcctgattgcttattcaacctccctacttgcttttccagtacatttctcaaaataaaatgctctaaagctgaacttcaaattagccctgcaaatcagctcaagccattcccatctcagaaactgaaaactctattcctccagttttggcccaaggacaaaargcctgtgagataattttcaacttatttcatcttctccagctcctcatcagcaaatcctgttggctcaatcttcaaatatatatggactttcactaattttcactacatctaccactacctccctagtaaaagccacaaatttgtctcttgcctggattattgcaaagcttcttagctactctccctgattttatccctgtcccatcccactgcagtctgaccatgccatatagcggatgattttttaaatagtaagtagaacatactactcctaagcttctgtattagtcagggttcttcagagaaacagaactaataggatgaatacatatattatatattgtattatatatatatatgtgtgtgcgtgtgtgtgtgtgtgtgtgtgtgtgtaaagaattggctcatgtgattatggaggctaatttacaagaactgcaggtgagtcagcaagatggagtcccaagaaagtcaatgatgtccttccagtctgagtccaaaggtttaagaacaagaaaaatggatgtgtcattgcagtctcaaggatggctggcttgcagctcaggcagagctgatgtttcagtttgagttcaaaggcaggagaaagctactgtctcaattcacaggtagtcaggaggcaaaagttttccttactttgggaaagggcagacttttgttatttaagccttcaactgattggatatggcccacccaccttagggaagtcaatctgctttatgcaatctaccaattcaaatattaatctcggccagtaacccaccttcacagaaatgctcagaatgatatttgatcaaacagctkggaaccattgttctartcacattaacacgtaaaattaaccatgtcagctccaaacttctcgaatttcatcttttactactgtcctccactccttttctgctccagtaattctgtctttcttgcttctcattttttcccagcacactttggtcttcaaactttgttagcttttttctctctctagaatagtcttctctttgataatgaccttcttgctaccttcaagtctctgttccatatcccctccacaaacaggcctttgttgaccatcattctagagtagtatcccctgccctagtcactctctgtatctattaatgtatgttatttttattcatacctcatatttttatctgacatacagtaaatcctcacttaacatyrctgataagttcttagaaactgtaactttaggcagcatacatataatgaaagccaattttatcacaaagctaattgatataaacaggagttaagattttaagcatatttctggtcacaaaaacatcaccaaacttctttttgtttttttctttttgagacagtgtctcgctctgttgcccaggttggagtgcagtggcgtgatctcagctcactgcaacctccacatcctggcttcaagtgattctcctgcctcagcctcccgagcagctgggactacagcatgtgccaccacacctggctaatttttgtatttttaatagtgacggtttttcaccatatcagtctggctgatcttgaactcctgacctcaggtcataagccttccttggcctcccaaagtgctgggattacaggtgtgacccacagtggctggctaacatcaccaaacttctaaagaaataacccacaccacttctaatattaaacattgaaatgaatgtgagatatacatacatttaagaaatattaaagaaacaagtaagataattatttacccaaattttggtgaatcagtgagtgatggtggtcatagtggtgggttaaatcaaggaataattgtctgaaaagtgaaaattgtaagaagcacctcctaccaccacacagctcaaaaacaaacaacaaatatgatgggctcagtaagcacttttgtgccacatcatttattattgtagggttgtatgattatcacataatttatgaatttttacaatatgtatccatctatccattcattcatttactcatttttcaacctgcttattctagttcagggtctgagatggctggagtgtcacccagcagctcaggcacaaggcaggaagcagcccaggacaggaccccattccattacatgcagggctcactcacacacacccatgctcattcatacggggacagttttaatatgtcagtgaaccgaatgtgcacagctttgggatgtgggggaaactggtgtacccagagaaaacacatgcagacatgggcagaacgtgcaaactccacacagacagtggccccagtgggaagttccttatcaatgttgtaacaaaacaatgttgaccaagaacaatattattcaaggatctactgtaattcctatttgtttattgttgtttttaatgcaagttcttttagggcagtgactgcctttattcatcatagcaccctcagtattcatcatagtatcctaacacagtgtctaggacattttattgtatgaataactttaaaggaatcatttgtatatgaatgtttaagaagacatgactgcaatgaattccctgagaccacatttkcagggtatccctggcctcccccatgagagaggagaaggctattaagtgaaccaagaaagataattagaatctgatcattgagttcttccctgggctatgaggtgggccatttatccagcttgaatggtttctgtgaaagcaacagatagggtttacartgtggttacattgaggcatatatgagtttgaatatttacaraaaatttattggagaggaaagctggatagatgcaatcctagattgtgcctataaaaatttcatgtactctcagtgtaaacaaataatttatataaccacaacaggaaaggattagagacagtttaatggttgtgattgtcttatgtatagcaaatactgcaatggcatagatactcataaaaaggtgagggccgcttatacacaggaacagagaaacattgcttagaaaacacaagcacctgagtagacacctgtcaaaacaagagccatgagggagactgctgctagcattttaatacccccattacttctgcygactgtagaatttgccatctgtttgttatatttttgaatgaggttggtccttacaagtgctgtcaatatattaagatttaataaggaagtcccaaaatccaggcctccatgttggaaataaactttgatatttttgtaggtttttcgatgtttttacaaagaagcaagtaatttttcttcttcgctattagatttcaagagaaatggcatttcttgattttggcaagaaattctgccagattatttctaaagtccattcaaattgtaagaagtcaattcttttagattatctctaaagtgccttcaaattctttttattttattttattattattatacttaaagttttagggtacatgtgcacaatgtgcaggttagttacatatgtatacatgtgcaatgctggtgtgctgcacccattaactcatcatttagcattaggtatatctcctaatgctatccctcccccctccccccaccccacaacagtccccagagtgtgatgttccctttcctgtgtccatgtgttctcattgttcaattcccacctatgagtgagaacatgtggtgtttggttttttgtccttgcgatagtttactgagaatgatgatttccaatttcatccatgtccctacaaaggacatgaactcatcattttttatggctgcatagtattccatggtgtatatgtgccacattttcttaatccagtctatcgttgttggacatttgggttggttccaagtctttgctattgtgaatagtgccgcartaaacatacgtgtgcatgtgtctttatagcagcatgatttatagtcgtttgggtatatacccagtaatgggatggctgggtcamatggtatttccagttctagatccctgaggaatctccacactgacttccacaatggttgaactagtttacagtcccaccaacagtgtaaaagtgttcctatttctccacatcctctccagcacctgttgtttcctgacattttaatgattgccattctaactggtatgagatgatatctcattgtggttttgatttgcatttytctgatggccagtgatggtragcattttttcatgtgttttttggctgcataartgtcttcttttgagaagtgtctgttcatgtccttcgcccactttttgatggggttgtttgtttttttcttgtaaatttgtttgagttcattgtagattctcgatattagccttttgtcagatgagtaggttgtgaaaattttctcctaktttgtaggttgccttttcgaaagtgccttcaaattctaagaagctatgggtcctttgggattttcttaatacacactcctcagtctccatattcctcagcatacttcaacattccctattatacatttgaatacaaaagtgtttttctgtaaaattattattaaatttaacatcataacaatgattgatgcatcaccccacaaaatgttattgtaggactattgaaacatgaaataactttttaaaagatctctatatatggggtctagataaaatacaatctggaatgcagtttttcaaaatggttgaactcaaagcagagcataagaaataagcaaaatcagagctgaactgaaagaaattgaggcgtgaaaaaccatacaaaagatcaacaaatccaggagtttattactcgaaagaatagataacataggccactagctatactaataaagaaaaaagaraggatatccaactaaacacaagcagaactgacaaagggacattaccgctgaccccacagaartacaaaarctgcaaatacctctatgaacacaagctagaaaacctagaagaaacggataaatttttggaaacatagaaactcctaagattgaaccagggagaaactgaatccctgaacagatcaataatgacctccaaaattgaatcattaacaaaaagcctaccaaccagaaaaagcccaggaccagatgaattcacagckgaattgtacccactgtatgtataaaaaagcgggtactattcctactaaaactgttccaaaatattgaggagaggagaatcctctctaattcattctatgagaccagcctcatcctggtaccaaaacctggcagagacacaacaacaaaaaaacttaaagccaatatccttgatgaacatagatgcaaaaatcttcaacaaaatactaggaaaccaaacccaacaacaaatcaaaaagctattcgaccatgatcaagcaggcattatccctgggatgcaaggttggttcaacatatgcaaatcaataaatgtgattcatcacataaacagagataaagacaaataccacaaaatcatctcagtagatgcagaaaaggcttttgatacaatttaacatcttttcatgttaaaaatcctcaataaactaggcattggaggaacatacttcaaaataataacagcccaaaaaaaatctacagccaacgtcatactgaatgggcaaaagctagaagcatttcccttgaaaactggaacaagacaaggatgccctgtctcaccactcatactcaacatagtactgaaagttctagccagaccagtcaggcaagagcaagaaattaaagacattcaaatagaaagagaggaagtccaactatccctgtttgcagacaatatgattctatatctagaaaatcccacagtgtcttctcagaagcttcttgatctgataaacaacttcagcagtttcaggatacaaartcaacgtacaaaaatcactaacattactatacgccaacaagagccaagctgagaggcaaatcaagaatgaaattttgaattagtagccacaaaacaataaaatacctaggaatacagaaaaccacagaggcgaaagatatctacaataagaattaaaaaacacttattaaagaaatcaaagatgacataagcaaatggaaaaacatcctatgctcatgaataggaagaatcaatattgttaaaatggtcatacttcccaaagcaatttacggatttaatgctattcctatcaaactaccaaaaacattcttcacagaattacaaaaaactattttaaagttcatgtggaacaaaaaaaaaaaattagtccaaatagccaaggcagtactaagcataaagaacaaagctggaggcatcacattacctgatttcaaattataccacaaggctgcagtaacctaaacagcatggtactggtacaaaaacggtcacatagactaatgaaacagaatagagagcccagaaataaggctgcacacctacaaccatttgatctttgacaaaatgaacaaaaacaagcaatgaggtaaggactcccttaataaattgtgctagaataactggctagccatatgcagaagattgaaactggaccctttccttataccatttacaaaaagcaactcaagacggattaagacttaaatggaaaacttaaaactacaaaaaccctggctgattacctaggaaatgccattctgaacatagtccctggcaaaaattttcatgacaaaaatgccaaaagcaattgcaacaaaataaaaaattgacaaatgggacctaattaaactaaagagcttctgcacagcaaaagaaactattgaaagagtaaacagacaacctgcaggataggagaaaatattttcaggctttgcatctgacaaaagtctaatattcagaatctataaggaacttaaacaaatttataagcagaaaacaaccccataaaacatgggcaaaggacatgaacagacacttttcaaaagaagacatacatgcagccaacaagcatatgaagaaatgctcgacattactaatcattagagaattgcaaatcaaaaccacaatgtcttaccatctcataccagtcagaatggctattatttaaaaagtaaaaaaataacagttactggtgaggctgtagggaaaagggaatacttatacactgctgatgagaatttagttgagtcactgtgggaagtagtttggtgatttctcaagaaactaaaaacagaattaccatttaatccaacaatctcattattggttatatacccaagggaatataaattgttctaccataaagacacatgcacacattgcagcactattcacaatagcaaagacgtggaatcaacctaaacgcccatcagtggcagactggataaagaaaatgtggtacatatacaacatggaatactatgcagtcataaaagaaaatatcatgtcctttgccacaacatggttggagctagagaccattattctaaacaaactaacacaggaacagaaaaccaaataccacacgttctcacttacaggtgggaactaaacattacagacatacggacagaatgaaggagacaacagacaccagggtgtactctagggtggagggtgaggatttagaacctacctatctggtactatgcttattatctgggtgacaaaatgatctgtacaccaaacycctgaarcatgcaatttattcacataacaaacctgcatgtgtaccactgaactcaaaataaaagttaaaaaaatgaaaacaggtggttgaccactactttgatattattgataatattattgataaggctraagacatgtgttactagtcttgcacttacccttgcatgtgttggttcatgatgttaatttttaggcatagctgattacttactataacccttaagaacatgatgtgaacctttagctcttttaatgcaagatagcttttgaaaaagaaaacaaggatcaaaatataaatattttaattattgctacatggtacctatcttatattgtttttcatcttgtcactttgatctaatggggaatggtaataatatgagtcagtgatattattcaccattcaataaacatkgatttggccttgattgtgttgggtcctgtttggtgctaaatgggtctttggacaaacaggagactakgacagagaaaggccatctagaaaagtgacattcactagtgtagcagagtgaaaataactcaagttatgatcataaaatatattttgctggacttattacacttatcatattaattgtaacaacttgtatctagagcaatagtagctctcagctttgggtatgcttgagaaatccttgggaatcttttataaagtactatgcccaggctccacggatagagatcttgatttaattgttctgtggtaaagcctagttatgccacgatttacaaagatcgctagataattttaatgggcagtcccagttgaaaacactagctaactctccaactgctttagtttccaaatagttcctagtttcagaaactgctaaccttgtggtactttccatagtgagtgtgataacttcttacagcactatctaaaacttttagcctrttattcaatataatattgacacaataatagctattatttattagacatctataatgtgccagacattgtgttwtaaaatgtgcatatatatattttttatctttacaaggaccttgcaagttatgtaatatttctagacattagaagagacttagaggttawgtaaagtactctrgtatactcagccagtatccagggccataattctaacttatatctgtctgagtccaatgcttccttccagaccgcactatcttcgtgttctcatgctatgtctctagatttaactataacttgctccactttacacatccaagcctatggacaaaaaaaaaaaatgacattttcttctttacccacacacatctaccacattcttacctgtcatttgcatacctgtcagtttgtgaaatgcccttgtcagtcaatttaatttactcttcttaaccattttttaaggtacagctcaaatgcagcctcaccaataaattcctcctggatcttcccagttggaggtaatggcttctccctctgaccttccaaaatatcttatctgcacctctcttaggtgcactcagcattttttacctcaccgttatttgtacatatatatatatgattaatacttttacttgtttgtcgaatcctagagatcatagttatgtctgattcatctttttattctgtataacacttcacatagtacctagttcattatcaaggcagaaacatatttgccaaaggaatagtatgcagtgaatgaagaaagcataaacaatttgattaagatcacctaacaaatctgtacctgggacaggaaaagaactcarttgcacatgtaatgtgagatattcttcaaaacatgcctatttttggaaatatctcaattttgtgtgaaataatttgatccctaaatgtgtcaactttttaaagggattttatggatggtttgattttatatgcaagccaaggaagtaagtgaccaataaataagaaatgagggcatttctctgttcctggtcatttactttagcaactggaaagagartagaaaagtgcatttacatgcgatggtgtgggatgatagcataatcrcaaatggttaaatagcggctttttatttagaatctctgcttttcacgtttatgcaaaacaattgcacattcagtgcattcaggatgcacttagcagatctacarcttgtaatcattaagggaacactaatgcaygtagcatacttagtagaaattatgtacttttctcaatatctagaagaaacaatgctcagatagcctctaatagcaaagcagagagaaaaataaaatgattgcttgggatgtccttggtggttcggcagaatttttttgtcttaacatttgtttagaaagtcattctgattaccacaaagagtgattttattctgtttgctttagatatcaccacttcgtacttattagagattacacagtccagtgagttttttctgaccaatgggttgttactttcaggtcacatctggcatgtagtatcttgctcattggtttgtgttaaaattataacactaaatattgtggtggaaaatttgttttaagttagtgttattgaatttatgacttttaagttgagtatgtgcttgcatgttctgggaatatatataacttgaacgtagaatgttccaattgactaattgcacataaaagagagttatctggaattaatttttcattttgcaaagcttaattaatttgtatttccttctcagaaattatagataagaactttctttttctctaacgggccrgataataaatattttagcctttgtgagccatayaytctctgctgcaagtactgcatggcatgaaaccagccatagacaatagataaatgaaagagcatggccatggttcaataaaactttatttatggacaataaaatttgcgttgcatayagtgctcctgtatcataaaatagtatatttttaagttttattcaactctttaaaaatgtgaaaaccatttctagctcatgaaccatacaaaaacaggtggcaggccagatttggccatatggtcagccagacatggtcaaacataattggctgacctctgtcttaawctctaactatagctctcaaagctgctttttattttcttaagagaattatgactagtggtgaatttttgaaatgttacaagggatgaggagttaaattaacaaaaacattactgctaatgcaatgcttcaaaaacccagtgtgaagttttttttaattcataaaaacaaattttaccaatagcaggagtgtcttttattttaaaaatgagatttttatgtaaacttatgttttacagtactactacaagtattggtaaattgaaatgatcaatttcactattgagtatatgtgttagaaaatatgccacagtatattctgcaagattaatacattttaacattcttcatgcrtctccccagtgtttagcttatattatgtcactgcaaaggagatgataccattyaaatattgctatcagttcatgaataacaatatttatccttttgagaatattcaaatttttgttcctgtacctattgccttttgaaagactagttcttggcatttatgttttattcttgaatatatttctgaacacaagtatatattgctttcttttagatttgtacttcacaaagacctaatagtctagcactaacctaataacaaatatttgtataatcacagattgtaccatattgagaaatatgaggggtgtcagagaaatgtccttccatcagattgtttatattcaagttgatatccatgtcagccattgaatttcagtaataacatatgatatcaagaaatagtagaaggtacctgtaccataaaataaaatattatcaagtaccatactttttgcatgaccatttgaattgagcttttttatcataatgttcaattgaaccatttaaaatgtaaatgagtaagtttgcaaggaatcatttgacctttatcgtgacactgtattcctgggctccaccttggcttggaacctcatcctcattcctcagccagttgtcaagccatacttcatcccattgttgtctttgattcagatttcaactgcccagttgatcaagcatggggtgatggtcaagcacggagtgagacttgagcagtcagtaaatgtatctattgyactcattaattggtgtattagtacgttcttgcactgctataaaaaataacggagactgggtaatttataaagaaaagaggtttaactggctcatagttctgcaggctgtacaggaaacatggcactggacatctgctcggcttctgataaggccatgggaagattacaatcatgacagaaggcaaaggggaagctggcatatcacatggcgtgtgtgtgtgtgtgtgtgtgtgtatgtgagagaaagagagagagaggtgggtggggatgccacacacttaaacagccagatctcatgagaactcactatcatgagtagagcaccacgcggatggtgctaaaccattcaggagaaaccatccccctgatccaaccacatcccaccaggccccacctccgatactggagattataattcgacatgagatttgggaggggacaaatatccaaatatctatctatatcacttgacaattttaaaaaacagcgtttttcaagtttgtgagtcctatgtggttgaatgccaaattactgggccaagtagtaacagctgtgatttcaaaggaagcagaaggaaggcttcaaggtaggtggatatggatgcattcaaagagtgatgggcatttctggtgagatgagtgaagaaaatctcagaagaaaggatgctcataaagtgtttggggaacagtgaatggatgagcctaacttcacagagaggagggctcagataggcaataatagtaggagaggaaatcagaaaggatcttccaagccaggttatcagtgaaggttgtctttgccagggtgagaggagtctgggctttctttcacggggcattaaatgtcatgcaaagtttttggtagagagggtgatgatgaaaacagggtataatagtttagaaaaataatttaaaacccctgaaatggccttagaaagtgtgatttaactgattgattgttgctacaatggcaatgtatttctgttcattaatctgaaggaaatatcatgctacatttggaggcagaagatagaactgttggattcagagacttggtcacctgaaactaaatgagaaagcaagatttatttttgcaatggtctgagctccttaaaataaggcaagcttgataagattttaattttcagcttttattttaattaagtgtgctttcttatatttcacatactctacccagcttgaaaaaaaatggttgtcttattatttaagaatagtagtcaaaatacaatggtattaagaaactgatcaartaaaaaaatcatataggatacactaccacacacaagcayactcctaaatctgaggccacacaacactatgcattggttaacaaaacacatcctagcatgattaaggcatatagaatagcaaagctttttgccctataaaagggttcattaaaatttagattttttaaaaaagaaaaactctccaactcttaaatttgaagagtaaaatgaaagctgttaattctatacgtgtctctccccaccttcacaatcttatgtgtcccataggcacgtagcagttaggaatgcaagtataaacatgctatcagatattgcttatcttcattaaatttcagattcaaaactgatactctgtgaaataagataaaaatttaaaacaacagggaaacaggagaggatcttaccagatttttcatttttatttattcttttaaaaataactttggacaacatttcttcccctatattgttgtttttcttctttatttcttgattaactctttagttagaatagtagctaaatgcattttgcatagtttaggaatgcggaycatgtgtaaatttttacattgactttccccatgtgtctggtttgatttatattactcagtgcaaaaaaacatgctctcatatcttcaaatttccatacacagcttttactcatggctatgtaagaatgttgaaagtaaaaaaatttaagctttcaaaagatttcaaaatctacattcaataaatcttagcagtcatattagtttcctagggctgtagtaacaaagtactacaagcttggtggcttaagacaacagctatcttttcctctgagtttggaggccggaagtctgaaattaaggtatctgtaggaccatgcttcttctgacagttctaggaaagaattcttccttgaccctcyctagcttctggtggcttccggctctgcctccgactttacatggccttmttctctgtttctgtatgtctctctgtttcctctcctctgcttatgagtaaactagtcactggatttaggacccactccaatccagtatgacctcatctagattcttactttgattgattaaagctacaacacactatttctgaataaagtcacattctaatgttccaggttgacatgaattttggggcacactattcaatctactataccagcttgaaaatttttgacaccttattcaaatttaccaaaaaggaaacaaacataagggaacaacaagaaaaaatttaaaagcacattaacgatttgactaccatattataggatttgctacaattttattgcttttcctaatttactatttcctgatggcttgtcagcctgattatttctcagttactggaaaaatttgcatatcttgaacaaacaactagactccaccaaagcattacaaaagaaattacggtttttgaccttttctccccttaaatgaggtgttccattacaaatgcgtctgctttttgacttcttcacttgaaggtatgtaaatgtgtaatgctaaaataaataaaaagaacagatggcaggaccttaaagatgaaattagttttgtatccatctggaatctggggatggcttcattatttccttctaattcgttcattctttcctcaattttctggcaggggattttatgcacagttgtgcaatctaagtatcttagggtaataataaaatatgattcarttatgaaagaaaacctgaaaataattctgtggaactctaacagcactgttgtcattatagttacatttggtggttttccagaattaatattgcagcatagatactcctcaaggacacacgaaaatatctatttggtgtccaaggtgtttcaacctacctactgttctgatatgttaaatttcaaatgtatcttcagcaagtactaaattactgtacattaactttaacaatgtcaacatgttctattttattagcctgatgtgaattctgtataagctcataaggtgaaatatattttatctgcaagaatttggtgtttgttttcacagcagcatttttaaaacaatatttaagggccactgggagagtttgggwtatttccattggtaataatgcaaagtggactttaaattaggtcatgtctctgattctgtatttctcatttttcacragtgaacataagaaacaatgggaatgtgcccttcactgtcagacaagtgggaggatccagcgccctctgtctcatatcactaaaaccrtgtacagagcctgactagatcattcctgtttcaaattaaaagatgcttataggcaaacttgaacttgcctgggcataaaattaggtttktggctcattaaattatgtgtaactatctcaaaaaatcttgcctatatatgatttccattttgttattaccccaaagaagaaccacagttccctattgaaaatcattcacctaagtctaaactctttcatttggcttttaaatatatctaccctaatctcatccatgataatccgctgctgtttctctcatttttaccatccagatcctctgccatgttcttctccacatatagcatgttcatcctacacatcactctcgtttcctaccctaatctcagcttgtgttgcctccttacctgggttttctctccatctatctcatctattataacatasctcaagtctctctctaagacatttattctcagctatctcagttttcaataaattacattatctattaattcctaatacattttagaattgataaaatagtatgtggaaaagtgtgacataatggctttattattctctaattgttttacatttatacccttaccaactcaaaataaaatttatacatgcaggacatatgtactgagcactttttrtatctcctacagaatctggtaccattttgcactaaggtaaataaataagaaaattttaaatatatttgttattagacccagcattactataaggatttcacatatcctaatatattcttcacagccaacttctgagatgagyattattttaatgatgaggaattgaagcacttgggtaaagcaattcaaaggaactcaaaagatcaaacaacaaaactaccattcaaatgcaaacggtttggctacaaaggctatacttttagcatttatatacctcaagatagtagatggtcattgagtatttagttgactgacataaattaagatattctctctatatattcaaaatatagttggtcaccatgttttctgtataattttatttctggcttcctgtcaatttggaatgatagatatagccctgaaaagacttccagrcaatgtggcagagtaagttcacaccatgacaagaatgctgtgtttcaaatatagaaaatagagtcatataaaaagaaaacacaaaaactcatygctgctttcaaaaatgaaataacatctctatggacttgaaatagaacataaacataaaatgtyaggcaagaccaaagtcatcaactagtggggcacacttctgcaagcagcctagaaactggctcccttgtggatgtagggaattaaaatatttcatgcaagatggaccactagattcaagctcactattcaaagtcaaaagctgctgtaagaatctgttgtttgtgaatgggggaaaacatgattttgaaagctgagtggggactactgcttattgtaaactgctagctctgagagaagaaaacttaccaatagggatttcagaccaggactacaacaaagccactccctggctctgtaactggatttataatattcctggtatcacctcaggacagatactacaaatggctatgacctgatttgagactgacaggctactgaaggttggattggaggaagctacaaggtaaaattccagaaatccattcctaaaaagagagtcacagtattaacacttgaaaacaaatttatttcttttttttcatagctatactgaggtataactgacaaatgaaatttgtgtatatatatatacacacacacacacacatatggtatataatgtgatgttttgatatatgtatatattgtgaaatgattgtacaatcaaacatatctatcccctcattttgtgtgtgtgtgtgtgtgtgtgtgtgtgtggtgagaacatttacaatctgttctcttagcaaatttcaagtatacaatatgttattattaactatagtcaccacgctatacattagatctccaaaacttatttatcttgcttaattgaaactttatgcccattgataagcaactgtacatttatttcccccatcccttagcccctggcaaccatcactatactctgcttctatgagtttgactttttagattttacgtataagtgagatcatgcaatatttgtgtttctgggtctggtttatttcatttagcataatgtccgccaggttcatctctgttgcaaaaggcaggatttccctttttttttgagacagagtctcgctctgtcacccaggctggagtgcagtggcacaatctcggctccctgcaacctccgcctcccgggttcaagcgattctcttgccttgacctcccgagtagctgggactataggcacatgccaccatgcccggctaaatttgtgtatttttagtagagacagggtttcaccatgttggccaggctggtcacaaacttctgagctcaagtaatctgccagcttcggcctcccaaagtgctgggattactgacgtgagccaccgcttacagccaggatttcctttcctaaggttgaataatattttattgtgtgtgtacacctatatacatacatatatgtgtgtgtgtgtgtgtgtgtgtgtgtgtatgtatatatatatcacctttttaggtttttatttatttatttatttatttatttatttatttatttatttatttttttgagacagagttttgctgttgttacccaggctggagtgcaatggcgcgatctcggctcaccgcaacctctccctcccgggttcaagcgattctcctgcctcagcctcctgagtagctgggattacaggcgcctgtcaccacgccaggctaattttgtatttttagtagagatggggtttctccatgttcgtcaggctggtctcgaactcscgacctcaggtgatccacctgcctcggcctcccaaagtgctgggattacgggcgtgagccaccgcacccagcctatatatcacatttttatktatcagttttagtccattaccatatctttgccaacacttggtatcttttgcctttttgacaatagccattctaacaggtgtgaggtgatatctgctgtgcatttccctgatgactagtgatgttcagcccctttcatgtacctgttggkcacgtttatgtcttctgtggagaaatgtcgattcaggttatattcagtgcatacctttgttctttctttcttctcattgcctagtatgccatcctttatttctccatgtcagtgcaaagtctacccatttctcaaagcctctttcatgtcttatttcctaaagaaagtgtgttctctattgttggtataatttgtattcttccttacaaattgtttgtgatctttagacttgcatggtttgtggtcctacaaaataaatgtaaatattatcttatacctttacttgttctcattccacccctttctataccacccaacatgttcttcctatttgaaaccaggtttattataaatgaaatatatcaattagaaggaaggacacttaaccattcaaaaagttagggccatagtagagggttatctttaaacaaatattgcaaacaagtgtttgtgagagaatatcaatttagtccctgttctactaccagagagggggctattgcattgtaaatcatcaactctgtcatgtaatgtaatgaaaagaaacagcatgaaaatattctcactgacacacatggtttgattcatgaaactattttttcataactcttagattactgactgactccttaatataaatctttctgaagattccacaaaggactagctaatcactgagtgaagaagagcctttacatgagccaaattcccaagatttaaacaagaaatattacatgtatgtaaaaaccagtgacataaagacagtaatttgcaagcaaggtccaaggaactctggggatttcatagaatgccatgaggttaagttgttttcccagccattaattttacaagtctcaccaatcaataggctactctgttagcaaataatgactaatgctaaacagaaacatgaaaaggatacactactttcactcaggtattgactaagaataaccaaggaatagamcataccctgtaattgaactgcctaatgaatattatttggaaaaaccataaactactcaaaaagaacaagagtagtcattcggatttaagaaagtgcctaattcttttaaacagtgcaatctaagggtacacagtaaattcttatttagaagaaatctaatctaattagaagaatttatgcctaaattcaaacagtagtacttggaaatattactagccagctatacaagcttggtattttccgacaagaggcaaaacagggctctctggatccagacatttatagctataatagagatattattgttctccaataaatgccctattgggcatcaattatttgtcaaacaaagaaataaaagaaactggttactcttcatcttccgttagtgaatatagaatattttaggttctgtttctgaatgaaaatgctgataaatactgcactccctttctcaccaaatcaacgttccaaaarcaattcatgaaatgagaaaggaatgaaaaaaattgcctgaagacccggatggttgaaaagaatgagaaataaaagggtcatgtccttctctgttagtaagtaatttctgattctgaagttaggcatttgaaaaacatgcccaaattctcttctcctttggtttttgtgattctgcctcatcaagatgctttccctactctgtcaagttcctctgttgtctctttcctagatgactttctattcccttatggtcacattctttctgcacatcctcagaagtctgctctttcccatcaaagaaatccatttcatagcttaatctcatcatctgtttgagtgatgattcacaaagtacagtgcacccctggtgtttatcaggcacatctcacattttctgtcccatcttttgctcctgattcttatacctggatgcctttacacatatgcaaatgctttccagttgttcatctcaaactttgcctgcttgttaaagaaatatgcagtttgcctttggagtgacaggggtctgggwttgaatcctaagaactactgatcccctgtgatcgtgagcccgtaaacccccctgagcttggttttctcatttataaagtgaagatgtcaggttttggaccctctttcaatcccttcatgagctactgtattgtattccttgctttctgtttctctgccaatctacatccacgtccttttgcttacacagggtattgattttccracctctgtctctgtctagrggagagagttctggaaaatccttttggtctgtttagtctgggagagaagtacctgtacactaagtgactctttgctctggatttgactagcccctctttcatgaggtcttgttttggtgcaccttattttagccaagcgcttcctggtttgagtcagccatatcaaaatctcttagggcaggcagtgctcagggagccataattcagtctcttcaacctcagtgttttcatccctttcatggaagggtcatcttctctttcccttctaggtttctgaagagttaaccctgaatataacaatttcccaaatttctgatgcccttagctataatgcaaaaattatacttagaataaaatcacaacagtgatcctactacatttcaaactgccagttaggcctacaaaccaccccttcctcattaatcacacatcacttcatatatttatgtatcaccatgcccacctgcagcccttagtcagcaaaaccaattaagttcttctctacttgctttgtggctacataaccacactgaccagtttagatttcagcgaattttaattttccccatcttactttcctcttgggttactggcattgattcatcatgtgattctgttctcttctacttctcaatacgaggcagttaatctttcagattggtttcttcctgattcttcatgcctatttcttattcctgcctttcgttgtttttcctttttgtagtaattcttttcatctgattgtgtctatatmttccattacaatactaatatattatttgaaaggttgatgtgtagattaagaaagtagcagctgggcatgatgtcttacacctgtaatcccagcactttgggaggctgaggcaggaggattgcttgagccctgaggttcaagaccagcctgggcaacatagagagactgcatctctccaaaaaaaaagaaaaaaagaaaaacgaatttagccaggtttggtgtgcgtgctgtggtcccaactacttgggaaactgagttgggaggattgcttgagccaagaagttgaggctgcagtgagcagcctctgcactccagccttagtgacagagtgagaccctgtatcaggaaaaaagaaaaaaagtagcacatgggaaattctttcctgccacagaggtatagtctttcctacctttgaccctcataaatcattttttcatatccattttatggcagttgttagtatactttatatttgtttgtgtaagtgcttaattgtgttttcaaaaaatgtattacccatacattatactagcccatttatgaacctagcacttgttagcccttagtgcatgattattgatttgaaatgctttattcactcattacatagagaatgctttgattcaacaaaatacttctatgaatggttgcatagacagacttaattcataagtccccctgttttgctgagccatccctctactctgggaaataagggttgactacctaatgctatttttattgtaatcttgacatttgaaaccaatgaccaatatatcaacattcttataatttatttaatgcagctactttttccaaaataagttcatttaacataagcattgtcartcatccatttgaatgaattggaaggaaagctaattaaattgatgaatacttgttttagttttaatccctttaagaatatataaaaactgcaactattrtaactcctcagacactgtgtagtggagttttaattaatagataaggatgatctctaattagctcatcaaaatactttaaacagtatcaaccctacatatactgcagttacaccgtttgtaagtaaatagacacttctaaagcacttaaagaccagtttgcattcttaggagagtagaggtgccctcaacctttttcattatgtggttaatttatttattcatgcttctcttcttttaatagggaaaacaaggaaaaaaagcaatctaacataagtttgattatctcagtcaacattctgacccattccaaatcagtatagttcaaattaatgtggtttcctgaatatatatcatagaacaggtaacatacatgattgtagaatgacaaaattagaaagaaaccttcctttcagatcagttattctaatcatctcattttacagatgaggaagaaattgatttactctatagttcctatggttagtcacgggctaagccatgcttctctttggctattcataagtcttaattctgtgctttgtggaaacaaacaagcaacaaaataggacagagagagagagagaacaaatatgaaattgaagatgtatcttaakttttaaaaaagagaacagccttgactattattttgatatacagaccttgggaaattctacattgaaagcaaataaattagaatttcgaattcatgtattgaatgaaaatagggtactgttattctgcaaaagatatgacacatcactttcaagacttctttcactcatccaaccttgactaggtttcattttgtttctctgattttacaaagtttcaggtacatcaggtgctgagaatacaaagcaaataaaatataggtgatatgatacaggtttrcaaagggtgtaaatgcagtactgaggaaggacttccaacctataccgaggggtgtgtgtgtgtgtgtgtgtgtgtgtgtgtgtgtgtgwgagagagagagagagagagagagagagagagagagagatggcttcttggaagaagaaatrcaggatctaagtccttaagttaagggtaagccagagtctgcctgacattatccataatgtgaaggaaataacagttgaaaaaatattccatctaattcagtcagtctactctgatctgggatcatttgccccttgttgggcagtgagggcttcttgcatttcagcatgaacaataatattgcagccagaatgtgttttaagtaattctccttagcttctcaagtgggcatcacctggcctattcgggattagtttttgaagccacataaaatctttcaaattcagataacttgagggattttcattaccagagctaattaatgggtgaagacctaccaccccaaatcagatacttcaaacatctaaatttcacagacaactatgaatgggcagtgtagattcctggttagagctgatatcatcaaaagtcctggatttcactaaggagtaaagtgtataaattattaagacagaaaaacatgatcttgtgtttatttatatgtggattatatctgcctgttataatttgttctctttttctgtccatatgtctctttattttgattttccagtttgtgtttttccgaatgttcttttctgagatgtttgaggatattaggagattgacatctgaatattcatcctaagtgctttcacatttcacactttttgctgtgtgaatatcatggaagagttgtctatgtataattttctggggacattaagtactattttggattccagactagatagaacagataaaaatttttattattatgaagtttttgtgtctwtttgctttgataagagatttattggattgtatttcactaggttgcatggttagtaattctgtatacttttatgccttctctgtaaggtactcatattcatgtcatatgtcagctaagaactagaatttttgccatcctgtttttcattttctaggttatgatctttctttggtcacatttctgacagctaccccttctctcctttccaatcaccagtataaacccatagctcaaacatcatcaagtaggtaatcagcagtggtcactgacaaatgtcacagaataaagagaatcagatttgaaaggctcagctctaaaaagcaaaccaaggttcagcyactcatttaaaaccttctgtggccctttggcattatcacagaccattctatttgatactttcacaactttcaactattttaaatatcaaacttctctgttctttcagaacttactcttgattctgttttttttttataagtatgaatgtattggcatacatcgataacatagggtacaaaagtcttcgccaaagagaaacagaagggagaatgaaatagtgataggctttggggctacccaaggacttagagatcatcctgtccaacttcttataagcaccagcctgaaatagttcagtgattagtctgaggtaatagattagttactttttcctgctggttccagaatacagacttgcattttgctcagtgtttattcagcgaagtcttagtgcttctacatcaatgcattcaatgtaacaaaaatgtattaagtaggttctatgcaccaggaattgataatacagcagtgtaaaacacagcagctcagcacatttcctctcctagagaaccgtaaaggctagtcctgggggcaggtgggcaaatgtattatacatatgctgtccaagcctatgatagttatctctaactgatgaaggcattttatttatttatttatttgctgaatttagacktggcttcaccatcttccccaacatagctcttcaggcatccactatttatctttcagaattgtcaagtacattaaaacctatttatcatcaaagcactaatagttttcttaaagaattagcttctagaagacaaaataatgtaacagtagtactaataatagataacatttattattgttgtaggttctaaacacataattactgaagcaaaattgtttatacatgaatcatctaacattacctcagtgtgttctgaactgtggaaaacatggctttctatgatatccactgttgtgagtgctcctctgtaattgattaatggtctcactccctctccctagtctgtggttcttggcctgcttcctattctattaaatcatgcatcacaaaagactgcaacttttgagttttatcctagaatcataaacaaaccactcaggccttatttgcttgatagtttcttttgaaaaatgccttattgccctaggtgatgcagtgaatgagggagaagacgaataatgaagactcttcagatttagacctgtaccgtcactggggtttgaaatgagagaaaggaggaactcaggtgggtttgaaagctatgaatatggaagaatctgtagacagagacatggacaagtggcggcagagaattagggatatttatagtccttgatgactgtgcaatggtatgtacatggcatataataatatatatcttggaattcggttactatatgtcctcagtgggaccaccaaaaaagctaagttcttgggacataccttttcctaaatctttggaaaaggagagaaagagagaggcagaacaaatggaagcttaatgtgggctgctgacaggaaacccattttgcaaaactgcttcttcttgaatggcaattgaatcaactcactgttatcaagctttaagtgagtgrgtccttgcagttgccaaaattgaataggaaatgctttaattttgttctggctgtggtccaacaacaagagagacttctcaagtgtggaattacggagctgtgctgaatgactccaagtgaactctctgtaggttaagctcttcaggaaggggtcactgcttggtgatggcaagttggtgaaagggctggctgaaagcttgggaaatctggtgctggtaaacgatacatggacatgttatctttgtcccctagtaccagatgaaaatgtgggtcaacagtaactactttaattagtatgtagagaaaattgttgttcaaatggagtgtcacattatcttttgccaaaaggcttgtgatggttattctgttgttcgtagtggtgaaactttctgatgttgcttattcgataataatactggctgggattcaaggtaaggagactctcttgataagtaaatttaaggcaagagaatgtcttaaaggcaactgttttgctgatccactttttttttctctgcacattgatcaggaatttttttaccttcacaaagcaagtaagacctgaagcagatttcacttttacagtcaccttttgattattcaaaggctagttatccagtgtatgagtaaggattctgaccagaatttctgacaagactggatgattggccagttgtggcagcattaattgcattaaaaaaatgatacgtgggggtaaggaagatgtcatgatttcaccgaggcaacacagaagtttttacagaatacatagaattttatgcagaatagtttagtagaggttcaaatggaaaggaaagaggaatctgtttttttcctttcatcttttcttattggaacttatttaaaatttctgagtgtttcactctaagagcatgcattccatatttaaaaaggaactgggttattygctacatgccacatagtgggtttgtcacatttgatatctgaactcttcctcagatggaatcacttatattttactttaggagccccactgcaggactcgcctggtaatacagcttttatattttgccatttacttttatggtatcccgttttctagtggacagtctgctgccgaaaccattcycaaatcaagttctgagtgttggatactcaggataatggagctccatttggggaaatttactatgagttttattgtgagaaatggatcttcacatgactctcctgctaaagagtcagtgactcaccaaacaaggaagcagaattaagatggggcatctgtttgactcagcaaattcctactttcaggggactgtggaatttaaacagtgtgatgctgcaggttttgcacgtatcaagtccagagaaatgtggagtggctacagagctgcactggagctggctagcaaacatggactgtgtacacctctacctaactctcagctcagtgacatcatgttgtagcttaatatagatcatggttgaaatatttgctacagaattggcaaatgctacaaatcattgactactttttgttttcttcctggaaagccagttattaaacattyaccagcacaccagtggtccagtacctaaaaaattaatttaattgttttttttttctctagtacaggtgttgtcaaaatgtggtccttagatcagcagtatcagcatcacctaggagcttgttagaaatgcaaattatctggccccacccsctagcctactaaatcaccctcttggggtgggtctcaggattcccctttaacaagccctccctcctaggtgaatttgatgtatgctaaaatatgataatcactgctctaagaaagagctaggwgattgagggaggagaaactatgtttaattaactgtatcatgaccataattgaatgattaattacctcatacctgtcccattgtacttattaagctttcagagatacttcctccacagattgctaattatagcacccacagygggtggtggtgggggtgtgtcaaaagtatcacttccagggttcatagcagatggaaacacaccattcatcatccagtattaactttcttcatctgaaggcactgccaaagggcaagtgatatcagtaaatatgataacaggactactatatttttagctggcctaagagtcagaatcccctagagggtttgctaaactattgattgctgggcccsaggcctaaagtttcccattccttgggtctgactggggcctgagaatttgcatttctaaacaagttcccaggtgatgatcatgctgctggtccaggcgccacccttgaagacattgctctagaacatcttttgaattatctgctttggtgtgaattcagcttctcagctttttgttctctcttattacatttatcttgactgtaatttttctttaaggagggtacaggtcacatcatatagggcatgatttttaatgtgcaggaacctgctgagccctccatttactgtcaagaaattattcagagtcatactgcactttgtcatttgtcttccttgtcttactaagtttttacaggcttagtactttgctattgtgtcagatgaaactcagatgcttcctcactgcagtgtctatggccttatgattcatacctttaactgccatcagataattcaccaggttgaacagggtgtttccccttttctttgaatagaatttacttattttctttgaataggataacttaatgcacctgagttgcatctttgtcttattgtactctccacaacagaataagagctctttctagtgcatgaaaagcacagtttaaagtgtttagtggtttgaactgtggtctagggtgaaaagatttaaaagattttcacgagagctctagcaggccttgcatgccttgttgagctcaatcgggaaatctacaacttttttcatgaacgcttagaatgcagcatttgaatatgagtggttcatgctgttgactgtttcatttcttaaagtcatatcttcaaataacttgtgttctccgctaaattggattgcagagattttagattaagaccactcagtgactcaatagttgtgtaaccttgggtaggtcactgaatttgctgtatctcacttttctcatctataaaatggaaatgatggcatctgtactgtttatttcatataactattgtgaggatcacaatgatatctatgaaagtattttgtcaattctaaaatcctgtgtaactgtgaagtgttattgttaatgccccttgtaatactcagcacagtcaggatacacagtggacccttaggacgtaatatcttgcacatgtatgtgtgtagcagggtgtcttttatagatctgtgaaagccaacactcaaaacagcatctrattatctacttaatagctaacctgacaattgtatgtgagtacacataataggtacaaaagctggctattagctcgactgtagaaggcaggaaaagtgggggattggctgcagcccttaaaacctgtattggcattctctatctaggaaccagggagacataccaaggagctgagtgtgtcattgaaagaacatgggaacaatacaccctattgttggtctttgataaggtaccttcccaataacattttggcaagacaactaggctctttttcttgacagtaaaggcctacttactgggacaaagggcaggatgggtaaaagcttcttaggtattcaaaatagaaaaatagcaagctggtgtgtgtgtgtgtttacaatacttgaaacaggattcgtgaaatcctattagtccatcttgagaaaacacatggaagaggagcctttctctccctgttgggctctcttggtgttcagaaaattggatatgtagttcacttgagattttgtagtacagtactgaaactcatctcagtcatgtatttgacagctacctacactatccagatgaaataacataaaagtgttggagcaagtgtctaggaacacactacttcaatacgtattagcttgttgatggtgagtaagtcaatgarcttctctgaaacttagtttcctaatctacaaaacagaaataataaaccctgacttgtttactttctctgagtttcagatgaaataatgtgcataaaatactttgtcaactaaaaaacctcctagaaatgtaatattttgtttttaaatgcttattctataaggatttgcacgtagtcagtgcaattatgcttattatagagatataaacaagatagaaaaatgtggattggatgaaaaaatctttaggtggattcaatgcctactgaacagtcaatgaagtaggtcttgattcatgcattaagcctcctggcagactggctagcagcagctctgctctccctattcagtgtcctcactgtgacctgaatgaagacacacaagtcatgctctttagattcttcaatgattcagacctcagaggactacctagcaacatgaatggcagatccaaaattcaatttgatcttaaaaggcagaaacaatgatctgaaagcaccaagataaaatataacatggatataaataaaattcttcttttagagtaaaaataatctatcgcacaaattcaggaagggggtgaactgccttggaggaagttgatatgagaccatctggggtttttaggtgtctacaagctcaaatagaatgtgatgcatttgctttgaagaaaaaaaatttctgaatagaaaaatatggctgcttcctccagtgatctagtgctcagaaatctagctactgagttaggggattagagctctggtcctcactctgccaatgtctcackgtgtcaccttgctagggtcatttaatgtctcttagcttcagtttttctgacctttaaaatgagaagtttaggctgagttatttctggattgctactagctagaagaatctgtgactttgagttgggtcataaaaaaaccttttcttyttccttttttttttttgaaaattgatatatccacaactagtaggaagacaaactgattacaggagaataattgagaactaaaattataacgtgtatatctttttattttctcagtgattgtggcattaatttaattttgttggcttagtaaatggcctcctcaaaaacaatatatttttcaacttatttttcttaactggtgtgccttaagaactttttccggaacttcaaattttcccgtaactttcaggtacaaatcccagcagggtccatctggctcactttccttctaagacagataaattgagctgtgtgtgcttttacagtgcgtgatcttagatatctacatgagactttcaaaaattaaggccctgtctactgcttatagatatatacagggtctcagacctctctttgtaagaataacaatttatcatcaaaactatagagtcattttttctgcmaaaatgagtgtagtttcttcccaacttatagaaatattatgtctttgatatgaactttaattgagcagtgaattacttagtggtttgcagtgcttctgggtgttagaatgtgctgggtttttcaggatgagtggctgtgtacgtaggtattttgttcagtgtttcagagcacctgaccaaattcattcctttccttatgctatttgttgataaaggatttgctctatattccatacaattgaattccttgtcttctttaatctgcttgccttatcctcattagtttttgaaagcttgaactatgtcttaaattgaatgaattaatcagaatatctcatccctgaagatatcagataaaagagaattcatcatattaaagacattgtgctggaaaaatagtggattgttttcatgcttctctcccttcttccctctttccctttcctctctcctctgctttcctgcatctcatgctccttccccttttttttgtttcttctctgcacaactctttattgaattgctactgtgtgctaggtaggctgaggatttactgtctagtaaaatatccgctgctttcatggtgcttatagtctaggagaggaatcaaaccagtaaacaattgaagtgccaactggtagagagacagctcagtaatgaaagccagagaaagcatcccagaaaagatttcaaacctgagaggtaagggtggattaaaagttagtggagtgaaagcttggattgggcataggaaatgttctagacagagagcaagcgtatggtaaagtcttgagatgggaaaaagcatagcacaattaagaaatttgaaaagtcagaacgagtgaagcctggcacacaagggaagatgggccagaaatgggattgaaggatcacaagcttacaaaggccttactgcttatggatccaaagagcatcagagaatcactggggagtttaaagaaataaaataacatgatcaggttttcattttaaaaagaccattgtttttcctgcagattagagacttatttggaaggacataagattgattattgtagtagtccaggtgaaagaggatgatggtgatgcattggatcaggggagtattgaagaggctatttcatgggagtaaagctttggaatcattctttgtttcattttcaggtaactgtctttaaagctgtcatttaaaaacatataaaacaaaaattcttttttttcccttttttatgactttttgaggacataaaggttgcttaaagaagaaattagtaggccaggcgcggtggctcacgcctgtaatcccagcactttgggaggccgaggcaggcggatcacgaggtcaggagatagagaccatcctggctaacacggtgaaaccctgtctctactaaaaatacaaaaaattagccgggcgtgatggcgggcgcctgtagtcccagctactcgggaggctgaggcaggagaatggcgggaacccaggaggcggagcttgcggtgagccgagatcgcaccactgcactccagcctgggcaacagagctagactccgtctcaaaaaggaaaaacaaaaaaaaaaagagaaattagtagttgtgaggggttgaggtgtttagaatagaattctccatgctgcattggtttatgctgaagaaggagcacgagtagaagcagagtgggagctctgaatttaaaccccagttttgctagtaatgagctctgggactacaggtaaataacttaacctctgtcggtacttctttcaattctaatcttctaagattctatgagtgctcctgtaagaaaactctaggaaagaaaaaccttcaggtatttgtttgcattttaaatatcttaatactgttttaatccttattggtacacatatttaaattctagattcaacaagtgagaagctttgctaacagtatcgtaaatcagaaactacaaaagtattaatctggtattagaaatcaggctgtttttctatcttgcatacctgcttatagacatgagagattttgaggtctgtgaaatataagccagagaaacttaacctttgagaatggaaatctttagtggtgagacatgaggttaacacatagagtggtttccaaacttgggtccactagtagtgcccatttggtcacataaaaatcccctgtgggagggcgcctgtggtcccagctactctggaggctgaggcaggagaatggcgtgaacccgggaggcggagcttgcagggagccgagatcgcaccactgcactccagcctgggggacagagctagactccgtctcaacaacaacaacaacaacaacaacaacaaatcccctggggagcttgttaaaaatacacctccctggcctatcctcatagtttctgatcagtaggtggtggtgtaaggctaataggaatgggtgctgtagtctaaggcagtgtttcccaaagtgtggttcatgaaattgcactagtccttttttttttttttccaaaatgttaattgaaaaagtgtttagaggtaaaatatatttgagaaacactgtataatataatgtcttttttttttttgagacagagtctcactccatcacccaggctgaagtgcagtggtgtgaccttggctccctgcaacctctgcctcccgggtttaagcaattcttgtgcctcagcctccacagtagctgggattacaggtgtgtgccaccatggccggctaatttttgtacttttagtaaagagagatggggttttgccatgttggtcaggctggtctcactcctgacctaaagtgatctgcccacctcagcctcccaaagtgctggcattacaggtatgagccaccgcacccagcctataatgtcttttatagattaatgtattcgcatattacaaattctaagatatcctacatgaaagaaagagttaaactttattcctgtgttcctctgactcatttggccctgaaccacttttactggagtatctattaacagcccttagaacttgctttccataaagggagtttacaaggtgttgtaccagagacattttttctagctattgacatggagtggcccaaggatatccttcctttattgtttaagcaaagacacacctttgtggaattactgagggaacacagataaatactttggatgcaaaataggcaggtttattttgtcaacaagctacctggctgtcatgtgggttgtgtgtattgcattacatgcctcttcacatttactctacgtgaatggcacctccatacagctgtgcagtcatagtatgcaatctggcaagccctctgtggctgctctgtctgacctgtatgggggctgaccctgtaactctggtttcactagaatcagaaatcaatcttgtgaattatcttgggcagaytatgactctccaagtggtaggtccctaataatttgtctggaatagtgcagtaaaaaatagttgggttttaataaaatgatgaagctgtttccataagcaatacactaacacttaagcgttttaaaataagtgtatctttatttgctgtcctcagaagaagctgatattcatcattagatataccattggccaaaatgtggttccttcatcatttaccaacaatttcttaataaccacgtggcaagcaacatactgggcactggggaagcaaaggaaaaaagaatggtttctgcttttcaagtagaacagtttaagggaaattgccacgtacacagatggttataatacattgtggtaatagttaccatggaggtaagtgcaaggggcaattggagcataaagaataaagtacttaagttggcctaggggaattaggaaagatttcacagaaaaaactagtttggtttagtctggcttctgatttttcttctgaaaccctatgctgagtctgctattcagttaccaggagatagtctagattttgctgccttgcatatgctcacgtgcttttccaaaataaattgtgtttatgtaataatttttaccttttctcctcactcatcatttccatcttgatattcctttgaattatacccctcacaatagtgttagtttcagctgagtgttcacatttctggtacaagctaatagaatttttcatttgcttttgctttgcagatgttgaacacatggctcttaagcatggcattattcttataaggatgacaggcttcaaacattttgattagtacctcaattttacccacttctccattttgaagtcagcctgtgttttatatcatctcggtttcatctcttacaaagctctagtattcagaaaggcaatttctttctccacttttatgtctaccaagttactgtgagacttttagaaaggttttatagcttttactttcagaartggaatactttacttaatttttcaaagagctcaaagacatacacctgtattgggaataaatacacattgcctgtttgcaatatcttgcatccatgtagcattttgtagtttgtattttacctgmatcatttttrtgtaactctcacaatgccatttgaaatatgaggaaactggatcttagtgaggtttagtgagttattccagataatataactagtcatggttgagtcagtgacagaaccatgactcaaacagactctggtttccaattacgagactttttccactatattgcatagcaggacaatattactatgtgctgggtataaagggaagctgaatatgaagaagtagagtgtttggtaaggcaaaatcagaaattgaaagtatcattgttaatgatttgagtggaagagattgtgcagggcatgagagaaagcaagcaaattaataaacatgtctaatatgggaggtaagtatggtaaaggagggcaagaaggtggagctgatttggtgtttgatgaagcagcatcatagccagcaggacaagttaaaacaaaaggagtaaaaattgcaaaagaacacaagtcagcagtggaggaaaagaaagggggcttctgaatgcgggatggacgtggatagaaagctggccaaggagactgagactagtagatagcctgcagctggagcctgtgccaccttcattctgaggttgtggtctcttatgcaccagttctccatagccaaggttgatgctgcaggtgctggtcaaggagaaatgttcagtaaagatatagtcaatttttggaaaatcataagtaacttggtacagtacagccacacaagtcatgtcactgtctccagatgaaagagccaggctggaggctgggagtgggacagtaattggaaagtggttgaagggtttaggttaagtttatttaggtttctgtgaaaagccagataaaatgactactccatgacatataattggcattataccgtaagcagtgatctaatgtgttcattttctaaaactgcaatcactttgaagttaccaggatacaatcacagtgagagacagtttttcagtttttagtagattaatgagctaaaatatatatctcaaactacttaaaatcagagaatactcatactatttctcaagtactcatgtaatagttcaaacattaaatttgtttggagcttacttttggcttaaacctcagaaaataacacaaatctctattatcttacagtaattataataaataaatgtgtaaataaataataaattagaaaacaaacattctaggctgggcaacatggcaaacccccatccctattaaaatacacaaattagccagacgtgatggtgtgagcctgtagtcccagctactcaggaggctgaagtgaaaggatcacttgagcttgggaggttgaggctgcagtgaactgtgatcctaccactgcactctagcctgggcgacagggcaagaccatgtcgtaaacaaataaaaaaacacaaacaaaccraacattcaattacatagacatgtttagcaggtttattgctctaccattgacacagggtaaattgcacatactaaatgggtacaattttcgtaagattgacatatgtctrtcaaaaagaactgacaacaccatcaagaaacatactgaacacccctaaattttcctagtgcccttttgtaaccccttccttttgaaggagcaaatgaaagttcctttcactcctcccctaaaaatccattctaaatgacacttggataagaaggaattaggttgaccactataagcaattttatatatacatgttgaactaaaaaagtagacagtaggaattcagagaaggaagatttcaggagaatacaggagtgttttgaaacaattcttagggcctggggagcttgaattcaatctggaacaggcagaatgatttgggagagcattttggctttggggtaagggatgacaaagcgaagccagaaatgagggctccacaatcctgggacagtgagatgacttctttgacccraacagaggcagtgttctgatgacctgtagaaaaaaaagtttggctagcttgtggaagatcttaaatgaggctgagtgtaggtttaagataaaaaggaacaattgaagacttttgtttttaactacggaaagtgatttaattcattcatttattcattcattcaaaaggctaggtgcggtggttcatgcctatagtctcagcactttgggaggctgaggcgggtagatcacttgaggtcaggagttcgagaccagcctggccaacataaagcaaaactccatctctactaaaaataccaaaattagccgggtgtggtggcrcacagctataatcccagctacttgggaggctgaggcaggagaattgcttgaacccggaaggaggaggttgcagtgagctgagattgcaccaccacactccagcctgggcgacagagcacgactccatctcaaaaaaaawawatatatatatatgtatatatacatttttatttatataatatatattgtcatttatataaatatatatatcttaaaatatatatgtatttttaaaaaatatatgctattttacactatatgtcaagcattgttctaagtgcttatgaatgtgcttttaatatgtggccatttgtaagggcacactctggcctgtgtgtgagtgtgtgtgtaatttgtttttctaaataattttttttttttgaaaatttagatttacagaaaagttgcaggaatcttacaaagagttcttgtatacatttcacccagtttcccctattgttaacatctgatataactatggtaaatttgtcaaaattaagaaactggcattagcacattaatgttaaccaaactccacacttcatttggattttcttagtctttacctaatgccccttttctgtcccaggatcccgttatgggatttagtcaccacgtctccttaggttctttagacggcgatgacttctcaggctgtccttgtttttgatgaccttgatggttttgaagagtactggttaggtattttatagaacgtctttcaatttgggtttgtctgatgtttcccacatactgtctgcttttgaagaaacaaatggaagttccatccacaatttaaaagaaaaggtcattttattaattttatgcttggattatatagatctttaatcttttctgaacagtaagcctcatattcccctcaaatcatgttcaaggtacctatttccttacctattcattttgggtatcatacttaaccatttcagcctaccagggtttcctgtaaagaagtgctttcttttaaatgagtagagatttgaatgaccaattccaggaaatccttctgagatagccatcattcagtcacctgtgtacttattgcttcaataacagaggctaaaatgcttagctgtatcctagtccgtgacttgaatcagcacatggctttgcttgaatgttttataagtttctagctgctatatcacagattagtgcactggaatgacaaagtacagtcttagccgacacaggccactgtgccattttcttatatactctcaaaccctctcatgaattraaacacctaaagttgagcaaagacatgctgaatagaaccccatacatagtttctttaacatgacatttcttaaccattaagaaatggactctggcccactctctaggaaaaaaaaaaaaagagtatggcatatttatagggttcttctttctttgagacaaatgaaagaacattcacattttttcctttcttttccctttctatctgttacataaatttgaattcaatctgagctttaagacccttggagggaatatggtaactctccaatattttacccgtggatggtgtatgcttaggtttgattctggcccctctggttattagcagtgtgtcattgagtctgtcagttagcctgtcctaagccttgctattttgatccataaatttaggtaataatatctacttcctaaattcaatttgagaatcaattgggataaagcatataaagtgtccagcgcagtgtctagcacaaaactcactcaataaacattaactattgttattattgttatttttaatacttagtatgataaactaattaagaaaaaactggatgcattggccatgattctaataacagcagctgatgtttccgactctcctcactgccttgcatcctgctcagacattcctatgctcagtgtctccctgctccagcctccagctgcctgaccactagcccatcacaactctacattcatcctccttgtagaagaagaatggctgcttccacagttagtaaataggaaataattgtttaagaaatttttttttaattcacataaaacatctgtttgagttaggaaattaataacaaaaggattttgcattcagaattttgtcttggtgatgacatggaatttatgaacaaataaaattttaaagaatttcaggttttgttttactttctaaagaaaccagcttgagttaatgtctaccattggcattctctcagagtcactgctcagttctcaccaccagctaggaatgtggacaagytgttaatatatggattttccagactcctaaacacagttctgcattagttggaggctctgagagactggtctgggactgtgctactaccagaattgttgcaggccccctgccaggactcacaaatcccagctttgcagggtggtaattgtagttgtcttctcagtatgccgtaccatagagcctttcttgttctgtctgttacttcctcaattaaaaaacatagctttctttgtgctggcctgtggatcagatgtttcagagcagcaggaagaagataatcttacacctaaaaaaatgtaaaggttccttacttactgaatcaatcagcagcacctgctctgcccagycaaagtagcagtttcattcctggcaggtcttactagcagagggatagttcaagaatccttatccacaagtatttgtttgttctcttyccctttctctccataagaagtaaaagcagtaactttctttaataggatctgtgccctttcgttaaaaatagtgaagactgataatagtctactattgaaagtgtttaattacaggttactggaagtgtcgccagaactttatttcacatggcattgcagaattctaggacacataagtggtataacagagttttagaaagctgataatatgtataggagaatgggtgtrcttcattaattgtacttgtaaatattgaaaattaatgggtttccaaagaaaatattcctctgaaagtatccagaaaatcaggaatagtggttagtcacaactcttgtgccaatcctgattgatcagtagcggctccctgggacactgtgatgaggattctgaaggcccgttctaactccagttaagaatgccatgatcgattaacaatgcttgccgtggtcatggaacaaggaaatgacatcttatatattaaatatttgtcatccgtagaatcaccatttatgctaggccaaagcatgatgctataattatttatattgctaaaatatataatataaacatattacatactttatatattatatattgacataaatataaacktaatatttatgcataaattttacatataatatatgtaattttatataacataattatatactttatataatgtaaacartaatatattaataatgatgttgttaattacatagtatggaaaatttaaacagtgtgcttcaaaaaatattcaggacaaaatttaaattacagaaacaaatactctgctcatttatttgttcagccacaacttgtttagcaacttctgtgtgctccagtgctgtggatctagagctaaataaattcttgtgtctgtcttgaaggtgctttggttgactagagcaaatggtgtggaaaccgttgcaaagacttaataaatacgatgataaaagcgcatactagcagactgagtgttcacagaaaagaagaagcaattaaccctgtataagttcatgaggwatcttcaaagaggtgacaacatggtgtcattcctgtctctagaaataatgctaaacatttaggaatcatttgctcttatgactcaaaacaaccctgttgaaaatggatagtrctcttttgtatgtaataaagatcagtgggttaggttgctgctggttttctattattgcaaattgattcccctgtgaattttcagctgtggtgaattcttgaatacctggattcctcagtttatatctttcctaccacttttttcacatcaactcctattaaattccactgcttgttttatattgatctccgttgtccaaactgttatactcactgagatatttatagccagaatatgcccataaagacaagggacctgctggcaaagcattatacatttggaaataatttgacataccataccttgtatgggcttctgggttttcaaattggttaaactgtcaaatctatatctttctttgctttaaaatgtcaagcatatctaattacaatttttttcaaatacgtcataatcacaaaatttacaaggaaactatgtgcatgaatagacttagatgtttgtgtattgttgtctatggatatgagtacacatatgtacacaggtttaaatttgcttcaggtatatccataattaaatctctctaagaaatcacgtatgctgataatattttaaaacatgttgtagtggatggagactgactaataagttaatgatgatggaactgaggcaaaatataaaggggtgttttgtaaggaagactaacacttttgtatataccagagggagcttttgtccaatatttgaatttttatttttaagacttattatttctagaagactttttgtatataaattaaccttattttggtcataatcagaagttataaactagttttataaattttaaccacagattatgattttttctgattgtagaagtaatttaaaaatttgaaataggaaaccataccatagaaagtagaaaccactcatgatcccgtcaccaatatacaactaacatggacaattttttttttttttttttactttcacttcctttttggagtatgttaccatatacttttctctcagtcttttcagccattcagcaaatatttattaagcacctcataatgtccatgacatatgtatatatctgtgtatgtgtacatgcttgtcatttatttttacttgagctgtaattcatataccataaaattcatcacattaaattgtataattcagtagtttttaatatattcacaaaattgtgcagctatgatcattatctaatactagtatattttcgtcacctcaaaaaaaaaccctttaatcgttaccagtcacttcaatttcttaccctcacccccagcagccactaatccactttctgtactttataggtttgcctattctgggcatttctgtaaatagaaaacatagcttttgtgaccagcttctttcatttagcgtaatgttttcaargtttatccatgatgtgtagcagaaatcattatttcattccatttttatgatggaataatattatattgtatgaatatgctgtaatttttaattcactcatcaattaaagacatttgggttgtttccacttttttttttttttgctattatcactaatgctgctctgaacatttatgtacaagtttttgtgtgaactcattttcagttctctttggtacatacctaggaatagaattgctggatgagctggtaactatatgaataacattttgaggaattgccagactgttttccccagtggctgcacaattttacattcccatcagtgatgtgcaaggtttcccattttccacatcctggccaaccctttttatttctgtgttttaaattatagtcatattagtggttgtgaaatgatatgtcattgtggttttcatttgtgtttctctaatgacaattgatactgagtatctgtttgtattgaccatttgtatgtctagaaaaatgtttagtcaaatcctttgcctgtattttaattgggttattcttttaaatagttgagttgtaatattgctttatatattttgtatactagacccttatcagatatatgacatgcaaatattttttcttccattttgtgtgtttttttcaatttcttgattgggttctttgaagcacattttgaaaagtgcttcattttgatgaagtccagtatacctatttatttttcgctgctcgtacttttgatgtcatacctaagaaactattgactaatccaaagccaagaaatttatacttaatgttttcttataaatattttataatttcactagttacctttagatctttgattcgttttaagttagattttgtatatggggtaagatagagatccaacatcattcttttgcatgtggatatccagttgtcccagacccatttgttgaaaataatatttttcacatttgaattatcttggtactcttcyaaatatcaattgaccaaagatgtatgggtttatttttggactctccagtctattctattgatctatttgatccattatgccaatactactccaacctttttttttttttttttttttttaagacaagagtttccctctgttgcccaggctctggagtgcgatggtgcgatctcagctcattgcaacctctgcctccgtggctcaagagagtctcatgcctcagcctcctgagtagctgggattacaggcacgcactaccatgccctgctaatttttgtgtttttagtagagatggggtttcgccatgttggccaggctggtctcaaactcctggcctcaagtgatccgcctaccttggcctcccaaagtgctgggattacgatggtgagcctaacttttttctatgattgtcttgagtattccgagtcccttgcttttccatatgaatattatgatcaacttgccaatttctgaaaaaaacccacaaaacacagctggaattttgaaagggactgcattaaatttgtgaccaatttggatattgttgayatcatgagaatattaattcttccawtccattccccagaatgtctttccatttatttaaaacttcttcaggttatttcagtgatgttttgtaggcagtatgcaagtcttgaacttcytttgttaaatttgtttctattttactttttatgccattgtacgtggaattttaatttcatattcagactgttcaagtgtatagatatagagatgattttcacatattgatcttacatccygcaaccttgcagaatttattatcataaatagtttgtctgtattccttaggatttcctatatgcaaaattatttcattttaaagtaaagataacttcagttattttccaaagactacttttatttatttttcttgtctaattaccccagttagaattccagcacaatgttaagtcaaagtgatgagagtagacattcttgtcaggttcctgatcttagggaaagactttcagtgttcaccattaagtatgttctcagttgtgaggtttttgtagataccatttatcagattgagaaagtagtcttctattcctagactgctttttttttttttggttaataataaaagagcgttggattattttctgtgcctattatgatgatcatgtggttttggttcattattctattcatatagtttatkggatcgattgagtttcatatgttgaaacggtcttgccttcctggaatgaaatcccacttggtcatagtataagctttttgtgtgtttctggaaacagtttgctaatattttgttgatggtttttgtacttatattttaaaggatgtttatctgtagttttcttttttcatggkgtctttagttttagtgtcaatgtaatgctgrcctcaagaaataagttggaagttttttgtcctcttttcttttttggaattcttttgtgaagaattagtattaattttttgaatatttggmagaattgagcagtaaatttatctgatcctgagattttcttkgtcagtaattatttattaattcagtctcttcacttgttatagctttattcatttgcctrttgctccctgagtgtagctagtttctaggaattgtctgtttcgtataggttacctaatttgttggcatgtagttgttcatactattccttataatatttaaacattttctgttaagtcaatagtaatgtccatgctttcattcctgattttggtaatttgagaattctctcttttttgttrttggccagtctaactagaaatttgtcaattttgttatcttttcaaaggactaatttttggttttgttgacttttatctgtaggttttttatcctcttttatcatttatttctagtttaattattattatttttcttgatttgggtttagtttgctcttcttttgctaacttcttttttaaaaaatttggatgtgttttttgttttattttatttcagtagatttttgggaaacaggtggtgtttggttacatgaataagttctttcgtggtgatttctgagattttggtacatccatcacctgagcagtatacactgtaccctaagataaaatcttctgttattgatatgagatctcatttgttttctaacataagcatttacagttayggctgtccctttaagaactgctttaggtgcatcccataaattctggtatgttgtatttttgctttaatatatctcaaaatattttctaatgtctcttgatatttattcttgtccaactggcaatttacgattgttttaaatttccacatatttgtgaatttcccaatgtttcttctgttattgatttctaatttaattccatcatagatggaggacgtactttatattatttaaatccttttaagttaattgaggctttttcactgcctaacatatggtttattctggagaatgtttcatgtgaatttgggaagaatgtacaatctgcaatttttagatggagtgttctataaatatctattaggtgtagttggcttatagtgttgttcaagtcttctatttccttgtttctcttctgtttagttgttctattatttattagacatgaggtattaaagcctccaactggtattgttgaaatttctatttgttctttcaatactgtcagtttttcctcatgtgttctggggctctgtttgcatggtatttctttttctatccttttactttcattctattggtatctttgaatgtatatgtctcttttataaacagcatgttgtattattttwaaaaatccattagtcgatttttgccttttaattggagtgtttaacccatttacatttcatgtgaatactgataaggcagaatatacgtctaccaatttgatatttgttttctatgtcttacatattttgtgctcctccattcctccrttttactttgcttttttgtattaaatatgtattttctagtgtactgttataattttcttttactatattttsagagttatgtttatagtggttgccttggaaattacaattaacacattaaattatggaaatttaattcaaattaatagcaacttaattatagtagagcacaaaactttgctcctctatagattcattttcccccagtcctttgtgcatgcccgtcaacacgaattggtagttatcactttatgtacttgttttaaaacacaaaraaaattagttacaaacaaaaatatagctatactgtgtattatatttacttatgtagttaacttttactggtgctctttatttcttcatctgaattcaagttactgtcwtatgtccttttatttcagcctggaaattgccccttggtatttgctgtagggctagcaaccaattgtctcactttttcttttcctgagaatgtcatttctgcttcattttttgaaggatagttttgccacgtttcgattatgtggcagtttttaaattaattttagcagtttaaatatattatttccaaacttttatttacaagctttttggattgccttttttttgccctaacttatttaccacctcaatcaacaaagatggtatacctaggggaagacactgttcacgtgggctgacatttcaaatcatgtcaaataaggagaatatttgaatatgaaagattcgaatatttcaaatcatgtcaaataaagagaatatgaaagataagtcttcccaagaaccaccagacaagtcaaacaataatagttcttgaggaatggggctttgagggaactttagccccatccttcccctttggtggctgccaggctactgattctcaccagcgaagtgaattgtttgttttcaaggccgccacagaactggggatgaagggaggggatgggaataggaaaagttcatataccataaaatttgctgttcttactgaaattcaaccgtttttctagaacacacactccccagattttgatgcaagtctttgattaatttctagagttttgaaaaagttaattatgacgattttgctgtgttttatgagaagattcttggaggttcttattctaccattttaaagattttcatcatttcatttttgtatataaaatattaatttgggtgaaagtttaaaaaatgttggcgaatacggtgaaaccccgtctctactaaaaatacaaaaattagccaggcgtggtggcaggcgcctgtagtcccaactcctcgggaggctgaggcaagagaatcgcttgaacccaggaggtggaggttgcagtgagccaagattgtgccactgcactccagcctgggtgacagagcgagactccatctcaaaaaaaaaaaaaaaaaagaatgctaacttttatatgttacaaaagttcaaatatttgcttcagattttcatttgtctttaagctttatttatttatttatttaatttgagatagagtctctctgtcagctaggctggagtacagtggtgcgatctcagctcactgcaacctctgcctcccaggctcaagcaatactcccacctcagcccctcaaataactgggagtacgggtgcacgtgctagcacgcctggctaatttttgtatttttagtagagacaaggttttgccatattggccaggctagtctcaaactccttgacctcaagtgatctgcttgccttggcctcacaaagtgctgggattacaggtgtgatccactgcacccagctgagccactgcacccagcccgtctttttgcattttaaaatattgttaaatgaatgatatttatataaattcttcatcataggcttgacccctaaatgaaatgctaaaggaaatttctggttcttattaacttttcattctttcattctcagtctctagtttcctctgtcttgcaaatttctcaaaaattgatgtttcttttttttttttttttctttcctcctttactttaaacattcttctgggaataatgtcacccaccccagaggctttcactttccctaaattattactgcctctgacgtttctataccgggccccaatacctttcctgagcttttgccccatatatccagttgcctcaatggcaccatcatccactcagtctcttggtttagcaaccttataagtcatccttgagaattttccccatctaatttgtcttcagtcttattgaatatattttctagcagctctacaatctatactacacatctttgtctccartgtcactgccgtaatttaggcttccttcatttcacatgagagcttcttgtgtgagttttttgcctctacatttcacatttctctgtctctgtctcctttcaaacacacacacacacacacacacactcacacacacacacgcccttcccccaaatagtctttctctaaggcaaatctgattctgccccttccgactttatacttagaatcttttaaaaggtgatttttattttagaattcttttactctctctcatcagactatgatcccttcaagggcaggagccatgttttattaattttctagaaaaattcattcccagtacagtatttggaatacaatagaaacataattaacttttaattaacgaatgaccagtaatttccagaaaaattttattgaatttattaaataattacatatgaatttcttctttacagcaaagctattattttatgctgaatggaataattcattgagctgatttattaaagcagcattgtgagttaaactttcctaactctagtggaaaatcaggtggctgacaagcatgacttaaaacatagataccctatcatttcacaaattgagtagacgcctgttttcaccaaatgagacactgaaatgcttttagtgataatgaataggaggagaaaaagacacttgtatgttttattagacaagatcccaaagacgcagctgacaggataaaatgcagcaatttgagtgtggattttgcagagaaggctgtcttagattaagacataaaacatagatattacatgagcaagtctctcagaagataagcaaattgaatattccaaaactctgaacatgatgtacctgcaaacattttatcctttccccttctcattaagcaaacaaaatttgtaatagccagtctgcactttatgttctttgggtgagcagctacaaaactgaactatgaacaattataaggtgttaacagaacctactaattcaaggaacagacaaaaataactgctgcttgggtttcaacaaaatagtgagagaaaacaaaagttatgtaatattcaagaggatatgtacaactgatgattgatatccttattttgttacatcagtgagatgtatccagtgaaaaattgtggagataaaaaaattgtgataaatttgcagttatacatctagaatttctggactggcttttcatgcaaaccaktgttagtgatgaagaaagcaagccagagaaataaaaggactttcctgagatagcaagttggaaatataagctccttaataataataatacttaatatttttactgttcccaaaaatattctaagcactttttatgtactaacgtatttaattctcaccttatgaagtagatactacaattactctattttacaaggaggaaactgaggtatgtaaggttgaataacataccgaaagtcgtgaaattaataaattgtcaagctggaattcaaacttatacagcctaagccagttcataaatatttaaccattgtattatgttgcctttcactctctcttgcttaatgaattaggatttagcattattgtcatagmagaataccatgtaattgtatttgtgtcaacaaaataccagatttctatgagcactatttagcaatcaaaagtaagacatctttctaagatatgtttatatataatttatagatattttcctttcacagaactacaatctgactccctttatcctcaatgtattattgaatttagtactggcatggattttactccggtttcatttgccttattatccttggcaagttacttcatttctccacttaaactacttgttttattttagtaaggagagaattttcccatgttggtacatggtaaggctgactacagtgagataaagaaaaccaggagcacctgggacataaaactagatcatctcaataaagtaaagctgctacaagaggtaaattcatctcaggaagcaggagctcaaatgtgaatagtatggccactgaacatactcatgaatgaaaccgatagtatctcagaaacttaatacagagtcttggttatcttaatctaagataaatcttaaagtgctctgctatcagagatataaacaggcaatccgattcagaaggtctgtctgctagtagcagagtttcaatttcctcatcttaacatgggaatgacagtttctatcttgcttggttattgagagaattaaaaaatgtattaaagcgatcatgcacaattcctagcacatggtataaatttcagtggttctcaactgagagcgtttgtaaatgagtgagggcttttttggttattccaatgacctaggactagtattggatttttgtgagtgggagccagagacgctaaatgttctgctatgtccagactaattctatacagctaagaactcttccgttcaaactacctttactccatttcgaaacccactaggggaagctaaagaattatagtgattttattactatgcattctgccatatggattaaaattccttaaattcctcttgcgtagattcagaattggctcttcattccatgatctgtgattctatttcttttcctctcttccrctggcctctaagtgttgaagacaattgttctcttttgtttctcttctctaacctaaacatctaagttcctgcagctgtgttgctagtcctcccaggatctggaacatcttgaaaatcttatgtgcccttgttgtcagagccctcaccacactggttgccttatctagaatcattctaatttttcactgtttcttttaaaatgcacatcctgattttagtgcaagtatactacatggactagtgcttgcacagtatactgtgaacttactgttgactttgacctttagtttttaacttgcaaatcagcacctacattgataatttcaatttgygtttatctaaagttccactatatacactgaaacccaaytgagtctccacatggtacaatatactctgcttaatacctaggatgtagagatgaaatgaagacagggaggaagatgactaatataacagtctaagagtaactcattctatgagagtgggaatcaagagagatttcttggaaagaaggacacaagttctagtgaagaggcttgtggggagaaacacataggcaggaggctgattagctatgggatggaggtcatgggcaatgacagaggggcattgaagaccaccatgaatgtggagggcatgctaacatacttgctgttactacagcattcattggttacacagatcttacttatgagaaaacattgaagattttaagtaacaaaatattwtactcagtttctagctgaagtgttggagttattttaggggatgtgggagcaacatgggaaaccacaaacccaataagaaayctgtgggcaaagagatagagayattgagaacctaaaataagtcaatggatgggagatctgaaattgagagatgtttctgaagtggaatcagcagaatgtggggacagattggatgtggggttcacagaaaaagagtgatctaagatgacttcagtgttccagctggctggagggtgctatcttccagaaagctagggaatgtgggaaagaagtggctttagggatgtgggggaactaatgtgcttgccagaactactgctaagccagaacatcttcatactatattggtatatttagatgttggaactataactttcactcctctgcttaaaataggctatattctatggataggtaattcacaattaataatgtatcaatattattcattatactaaaagagaattttagagcaaaatcctataattgtagaaacagagacatgaaaaacatttgctaaaaatctgcaattcaatcccagcactttgagaggccgaggcrggtggatcacctggggtcaggggtttgagaccagcctggccaacatggtgaaaccccgtctctactaaaaatacaaaaattagccgggcatggtagcagttgcctgtaatcccagctactcatgaggctgagtcaggagaatctcttgaacccaggaggcggaggttgcagtgagctgagatcatgccattgtactccagcctggaggacaagggcgagactttgtctcaaaaaaaaaaaaaaaagaaatcagcaattctaggtaaaaacataaattaaatgggaatagaaaacattttcctaaatgtgccaaagaccgtctaactaatcaaaaccatcatataatattaagaaatactgaagattgatcctttaatataagacacaaatcaaggatgctttctatcagcgtgactattctatatcattcagcatttctagtgaatcacttaagtaaatggaataagctgtgcaaatattggaaaaaggaattaatcaccattacttaaaggtgattcaatggtaaatctaaacaattcaaatctgttaaaagaacaaaaatgaatattttgtgaggatcccagatacaagaaaaatacgttaaagtaaaaagttagtaatggaaaaaatccgttcatattagcaataaaaatatagaatacctaggaatacttttagtaaaaatgatgtaaaccgatattttaaaaattatttaatagataaaataaaaattaagtaactggaartaaatgctatgttcctagataagaagacttaatatcataatgatgtcatttcttgccagatagatgtatgtatttaataattccagtcaaattgcctgcttttgtttaaacacaatcacacataccacataatacaacaattttaaagttcatatagagaacaagtgtttgagaatttccaaatgatgtcagcaagctttaagaaagaagggttatgcaagttccaacaagaaaatgataacgacactgagagtcttcatataatacatagtcgtggaggtaaccaatgctgacaaccatctgctgtaacagcccaaggtataacattcatgctgcaagaaataatttggtttcaataaagcaacatcttctactaatttaaatatacacttgaagattcattttaaagttttgattatatttatcattggattttttcataattttaaatgaccagtaagcgaataagtcattccaaattttgatggccattaagtaaaataaggattattggaacacaagcactgagacactgtgataatggatctgataatcaaaatggctgctaagtaactattggattggtarcatatacagtgtggaaatgctgggcaaaggaatgactcatgtcctgagtgggacagaccagaatggcacgagatatcatcacacaatttaaaacttatgaattgttcatttttcacttgagattttcagaatactgttgaccttgagtaactgaatctttggaaagtaaaacctcagataaggggaactactgtatgtttaactttttgagtaactgccaaaccactcccgaaggtacagatgtaccattttgtatctacaccagcagtgtatcagagtctcaggtgctttacctacttgccaacactgagtatggtcagatatatctttttagcagtgtgcttttgctcactgaacacaatattccatgtgtggtctaaacaaaattgtccaattaaatttacaagacatacttgctaaatggtatgctctggtctaactactttgccagggacatatccttctttattgtaggtaatatacatctttggatgcagcttgagtaaaatggagttgacttcttagcagtcacagcacactgcttaaccacattgaacttactgtccaataaaatctctaggtctattctcttacatttttgccgatgagacctgccttttttatcctcagtttaagcgcttcatttcataaacatattatatttaatatacttcaaaagagaagttgcagtggcttatcatgagaactccaaatacaataaaataactaaattaagcatactgaggctagaaccaagcaagcaagagtggtgagatcacactaatagaaaacctagactaagggaatctcctgaaaatgagtttattgatagcccgagtcaaagtggattaaagaagttatatagctcttattaaaaaatgcaagaaagcttatcagatgatataaaaactcaagctttttttctaattcaactttctgaggaagaaacaggcctggggaagataactttttaactctgaattttgtattttaaaaatttttattttggaaaatagacccagagatctcactcatagtgagggaaaatagttttgagctaatagacactggtctaattactcaatttagttagacattagttttccaagtacaggtgttacccacacaacgggtgggttcagttgcttgtcaggtaacagtccaatgaccacaatcaaggaggatttaacaaggatattttattacttgcaacaaacgaagaggacaccagggatagttcccaaagtagtccctccttgaacaatggtggaaacagggcttttactgggttggttagctgaggttggagtaaaggccgtgctggcacagtcaccaatcatgcttcaacatacgtcacttatgtagaaaatggagaataaggtcctccctgtgcagagattttagtacagtagtgaggggagttcaccaaaattcatcatctcaggtatctctggatccaagcagttttggtatttctgaggctgaactttttttgaagcaggagctccaggtacaacagttaacaagtaggtaatttttcacagtgcgcacccaaaactcagagaaactgggttacacaggtacaaacttttggcctcatcattgataaacaccaacctaagacttccaaggtcagaatatactttgtaagtattcatgagaattatctttttgccctttctgcctacattgattagcgtttgtcattttgattagctttcatcctattctctgtgttttgcagtcacctctcatccatttacctgtgttttactggtttggtttctatcaacatagatgtctctctcaatttcctgaaatgtttatctataaactcgaagaagctatgattgtacaaaatacttgccgaatatatatatgtatgtttatrtacacataccacattgtgtatatatgtatacacacacacacacacacacacacacacacacacacacacatatatgccacattctctataaatatagatggatatatttccctctatattgatgaatatatttccatctatatttatagagaatgtggtctcaggaaagtcttagccttccattgagtatatctgcgtatggaatcctggcacagtgtttggtcctgtgagaaaagttacaatagtcaatttgggtcccttcacccactttcgttccttataaaataaaactttggtaagtaagccaaaacaatttttagcacaattttgagaaatctttctacaatatgcctcgtctttaagtgtacaacatagtacagtgattaaagcttggatttggttctgccactcaatgtgtgatctttaaagactcttatttatctctctaaacctcaatttcctcattgttatatggcactgatagaaatatcaactacctcttaggatttttgccattattaaatgagtatwcacacacacacacacacacacacacacacacacacaaacaccaatatctggcacacagtaaatactatgtgcttagacattattatttatatcatgctctaacttcagtatttaatgctttttaaatttcccttctctcttttgcttctttatttccctaaagcactcttataatcaaatagctatttatttgatagttcatcattgagcattttacgttactatattagaatgacctttttcccaactaattttccattttattgctttgaaatagttcaaattacccttatgaatagtatgagaggagtatcatctaatccattcaaattagaaaatgaaatgtaaatgtgaaagctgaaaaaacttccttggcactttgtatcacaggaacttgatcgataaatacttttctagctgctcacactgtccctgttacatttcattctctcagcctcctggtacaaaaacacagatgtgcatttcttttcctggaaaaataaatattataactctttcaaaacattatctcctgctgaggatgatgactatttaaaggaaccaactctttagaacctcagcttgtactttctgactgttatctggatctaatgattcctcttaaaatttgagcttacagatgaatctataaaagagatagcttgaattttctgagaaaaatagacatctcagaaaatccttccttatgtttttctcccccccataaattaccattattatttacttgtataatcaagaatacaattgaaggataatatatatatatatgtataaatatatatgtatatatatgtgtatatatatggaatctagagacagaaagtgaaaaaatcatgaacacataattaattcagtcttcaaacaaatgagatttttaactgaatattctttttcttttttttttaaagaataaaactgaacattagctgtgtcaggagtccctaagactgctcctaggtttgatgatttgcaaggaggactcacaggactcagcatatagttgtacacacggctatgatttattatagcaaagagacacaaagcaaactcagcaaagggaaaagatgaaagtgacaaagattagaagaatccagtctcaagcttccagaggtcatctcccagtggagtcatacaggacatgtttaattcctccagcaacaaattgtgacgacacgtgtgaaatgttatcaccagggaatcttggctgagcacagaagtccaaagtttctattgggagctaatcatgtaatcaccctctgctgagcacatacataagtcaggtaggaaaataggtattcaacataaagcatattatttgcacaaacatttaggcactgtgaactactcttatcaattggggaaaattttgtatcaatatagaaactgtttactcttcaagctcccaagttccagtcaagggccagccttgcaaacatgcctttataagaaaaggagcctcactcctgctmtgttaactcttttctaaacaggagctaaatagagccaatttctaactccataaaatctctaaaaattgagctttaatgacaactacaatgcaacgggattaggtctgaaaataactagggagagcaatatagattttatgttacaggtgtttaataaacgttcatctagtcagtacccctttagaaaaaatagtgccattatattctccaactagtattttaggaaaggaaggatcatcttttcactagtcttctcagagattgttcaaagaaaaaaggcaaaatraagtgtatattgtagacataaaaggcaaataagggacatgtggggtgcaggagagagggtttgaggtatcgttcttatcattaggaaagcagaacagagagtttttccagaagtgacactgagcaaggatacagatgcgcggatgtagggatgatgctggagttcactaatgaggcactggggcagctggagagaccagggccaatgtcacaaagccaaacgatttaataaacaaaataaaacaatatataaaacctagactaactgcttgaaacataaaaccagcaagttttgggttggtcaagtttcagtattctggaaaccagtttaagagcttgaaatatattatttctttttcagggggtgaaccacagacagataggtgtcatacacagagccaattatagtaggcagtattctggggaaaaacaataaactagacacctagtagaggtaaaaaaaatacacttttgtctgatcatattcacaaatgtcagtggcaacagatgaaaaccaaaaacaatacatgcacaccactgcttaaattaaaaaaaaaaaaaacaactggcatcttttaattgtaactgctttagtttgtatatcagtgtcataatgaaggcaaaaaattgttggcaagttaaatgcaatcattattcatgcctattttgtttttaaatggaagatttaagaggtagttaatcctacttagtgattaagagaatggattttggaatcagaaagagctgaaaattaaaagcttaaaattaactttattcagtacactagctttgtgattattgatgggcaataaacttctctatgcttcagttgctcatctgtaaaatggggattatggtgaaaattaaatgagatatttatgcaaggtgcttgtctctgcctgcaataagtgtctattcaataaatggttcatgttgttattgttgctttataggatctgtagctatggtctgtacccttaaggactatatatggtgagagacatgcaaataaactctcaaaatatacaatgtgtagtgataaatgctggtatgcagtgcagaattgaacagaggtgggaggtattaactttgcctgagagaaggaaggactttggaaaggaagtgaggtctctgcggagtctcagaaattcgaagtgagagttgtgtaggtggagaaagaggaaaaggacattccaagcaaacagaattcatgtgctaatgtaagtttggggaattgtaagtagttgatgacggcggattgtaaaatatgagagttagaggtaggaaaagagacacaaatccagaaccaaaccaaatggattaataattgccctgcctgaaaataaaaagtaaattatctattgtaagaagataaaaacgatgcaacacctttgcatttttgaaattgaaatatgtttaaattaaatgcagagatcttaaatgttacagtttgatgtgttttgaaaaatatgtacatgggtgtaactcatatttctaaaaaaaaatgaatatttccgatataccattaagttcactggggcccccttacagtcaaatcttatacaccacaacccctcagatgatcaaggttcagatttctttgaacataaatcagttttacccatttagagatttatctagatgtgtaagtcttctctcattgagaaaaagattttaaattcctccacattcgtggctatatcaatcgttggaacattttaataattggctagtattgttttgaatgaatatacagcaaatgtatccattctcatgctgaagggcatttgagggtttttttttttcggtttggggctattatgattcagatggctatgaatatttttgtacaattctttttgatatatattttaatattcttggacacatgctgggtagaattatctggctatacacatgtatttattcctgtaagaattgacaaatcttttttcaaagacgtggtaccatctaacactcccaccagcaatgtaagagagttccaaattgttccacatccttgccaacatttggtacggtcagtctttttaattttagccattctagtgggtgttgagatggtattcagttctgtaatgatatttgatgttgagtaatttttcatgtgtttattggtcatttgcatatcttctttttatggtttttatttgtcctattaatgtgttgaaagagtaagttatatattctgcttacaagtccattgttagatatatgcattgtgaataatatttctcaatttgtgtcatgcttattcatattcttatctttctataagtaatttaatttgtcatttttaagtagttctttatcatatccaaaaaatctttgccctctccaatactgtaaacatgttatgttttcttcaagaagctctttgctcctaggtgttacagttatggacagttttaaactaatttttgtttgtggtattaaaaagggactgaggttcatttaaaaaatatggttatctagtttttctagcaccacatattgaagacttattttttcctattaatttctctgaaggctttgtaaatatttattaaccatgtaaatatgaatctctttctggattatcttctctttcattgatgtacttatttatacttttgctaataggaaattttcttaattactgtagttttataggaagtcttgaaatcaggttctattattctttcactttattctcttttgagattcttttgtccatcctagattctttgcatttccacataaaattagaattggcttgtcaatttctgaaataaaagcctgctggattttaattgtgattgtaatgaatccattgagtaatcttggcagattggaaaacgtaacaatatttacattttcaatacatgcatagggcatagggatctatttatttgactgctttactttgtctcaaaaatatttcatagttttcagagtaaagttttaaactttttattacatttacctttgtgtattttataacttttgatgctgtttcaaatagcattatgtttaaattcaattatccatttgcttattggtgttgtataaaaatatamtttaatgttgaccttgcagcctatgatctggctaaacttactagttataatattttgaagattaatttcacatgattttactttgttgtctgtaaattccattatccgtttgcttatttttattatataaaaatataatttattgttgaacttgtagcctgtgatctggctaacttactagttataatactttgatgattaatttcacgtgattttattttgttgtctgtaaatcacgatgtgtgagacattttttctttgtactttatatttatttccccctaatatttttgccttgcctcattggattgactaagacctccagcttattattgaatagaggtgtggagaacaacttagtgctcctttctatattttttcagagattttgcataagattagtatgacttctttaaattttggatagaattaactagtggagccagttaagtctggaatttttttttgtatgtgaaagattatwttttgtttaggaatgtttttcatctgttttcataaataagacttacgatatcttttgttgttgtgttggtgccatttttgtcaagttttcttgaataggcttatgctagcaagtaggatgaatggggaagcttttccatttttatttgtttcagcaaataaaaatacttgtaagacaatgtataaatctacgtaggatkaaagttatgaaggacttaatgggggtaacttcaaaatctctttattcatgtctttatatagttcctatatagttgtagtttcctgattgttatctactttttaatgagaaaattgtgttatattcttgtagacatttttaaatttcaataccttcaaatttattaggaatatttgaaaatttctatattttatttatctcatcagtttcttttgccttattttgtttatgtatttttttcatagataagtgtctcaaatatttgcctgtttcattgttttttatctaaagaagtgttattgaatttttcaattctgctgccttgatttttaaagtattgctgtattttataaaacctataattccatggataaactagatcattaactgaaataccactaagaaagaaaataaaacactgccaaataagcatcttctaatcacttaggcttttgatattaatttatcaaaagagttcttttgagtaattgaacatattgtgttatcatttattagtgttgtatatataacaaagaggaaaatataagcagagtacatgggttaaattattactagaatgatttatattcaatctaaytcttctaaatgtctttttgatttgtacatgtgtttttgtatccaaattgtgctgtataccatcaaaaacactgatgattcaaccttacttaaagacctttgtttagtattttctataatgtgtgatatctagaactaattctctgaacttttatcttagaatgactttttctcttatttttgaaaggtattttctctggccattgaattcttggttggcaggattttttttttctttaagtactttaaaggtgttcaacatttatattattatttccataaaggtaattgtctttttctctggctgcttttaagattttatctttatcactgctttagaataattgcactagaatgttcttagttctgtttcctttgaatttatcctagttggggctcactgagatttttgaatctgtgtgctttttcctttcttcgggtgtggaaaattatcagccattatttcttcaaatattgctttcagtttcattttctctacactctccttttgggattcttattaaacttgtgttaaatgttttgaccgtgtcccacatttctctaatgcttktctctaccttcttccctctcctcaccacaatgcttcagtttaaatatttttcattgacttttcttcagatttactaattttktattcttctatgtccagtactgttagttctgtccaataataagttcttaacttcagatattctatttttcagttttaaaatatctatctcataaatgattaattctaattttctgtggaaatactgtatgttttcatacattttgtctctctattactcatttttattgaaatattaattacagctcttttgaagtccttgtccgttaacttcattatttagaaaatgtctgggcctatatgtattgtctattttagtttttattagtcacacttttatactcctttacatgactatttattttttattgtaagctattcacagtggatcatatattgtagaagctctggattgttttaatttcatttcaggagtgttgaggtttgttctgacagtgaattaagtcactggcagatcattttgattctgtcaaagcttgggttaggtcccatttgtaatttttaagccatgtggttttttcttttcctttttactctacatgcaaagaaagctctctcatagtttggtgtttaccaagaaacagtacatatatattactttgaattatactctctttacttgtatgctggccgaatcacccttcagttctatagatgatgacagattgatgcataaggtttatagaaaaattgtagttgtctagcaggtttttatctcatatgtcttttatctcatatatctcaataggactgaaatgttactttttacctctaccttggagacttgaacaggtaacgtacatggtgaaaagactccaatactcactatatactgatactagaatcattttttcatcacttcactaatcaaagtttacctgtatgcacctcaactcctagaattcaatgcactatttccaagttcttctcttttctacccattttttttttctgggatttggagtttccaattagatgtcgaaagaactaagattgatctgaattgagttatacagccatttacctaactaaaatagtggcattggcaataaactccagagtttcccaaacttccatcacttttacaccattttcacaatttttttccacctttaaacaccacctgtgctataatttgcctagtatctttctttacagaaactttaaatcaattaactttttttaagctatccttatcctattaatagttaataaatctaaacaggttaatagttctaaatatattaactgcaagatattgttataaatattagtaataatattgttatcaattttcaacttaaaatatgtttccatgggtattttagtaaacacttagaggagactgaataatatgtgttasctaaatgagatttggcacttctaagcttttgatcttcattgaatttcatctaaatcttcatttaattcatggagacttgagcaattttttaaagttccaacctgtaagtggatagctctgmtgagctaattgtaagacatatcatgaagaaagtagatagagtgtataatgaaaatagtctccttgtggtaagatattgtcaaaggccaatctggatgcatatatggagaaatttataataatttacaagggctttagtccctggtttattgacattatgaaattggaaggaatgttaaatgagataggaaataggaattcatcatattttacatgcccaaataattgttatgttaattttgagcttaacttgatttgtagactgaaaaaaaaattgactgaggaacaaccctgcctctgtctcttcaaatagagatgaaataagtaacctgaggtctagggcaaggacaatcacagacactttagagagagcaagctccaacctcggtttttaaaatgtagctctcctttaaaaacagcaaaatcacgtgcacagctactgacagtatcaatatgtgttactggctttgcaccaaattcgaagtcataatggcactgttcttttcaaccttcacctagggaaaaagttattaaggaggaacagaaaaagggacattgaatggttcttggttaaaccattggaaagcacttagtttcctttgttttgccatttattcatgcacaatagtgttagtatttaaatgtggggtttttttttttttttttcttacttttgaactcattgaggcagtgaactctatcttgtggggctgctagtgtggtggaaatgtaggattgccatcctgggaaccatagtttaagtaccacattggcatcaactagctgaaggtattttgcaccatgcaagtgttagttgatgtatttaaattattttccagatttaagaaatatgtactctctgtagtagacctttagttgggactgaggaattgggaataaacactgagaataaataaagaaaacataatcacttgaggcacttttgttgtcaacaaatcgacttctctttgcttttcagtaggaaaaaaaaaacaaatttacaagccctgcttattgtagttttcttcttgaaattgtgttaataggctctaaatgcaaagaataacttatgtgtttcaaggctagaaatataaactgaaagataattacgaaggataaaaataataataatgaaaaaccttcacagctcagaacatgtgtgtactaggctaaagcattgatattccgctggagtgatcactagatcatcttgctgagatcagttttagtttgttacatggcttataatttcagaagcttttgtgcttttggacacagctgaggtttatttcatatattcacttattgatttattcattatttgttaatacctacttggtctttctgactgctctcttttagatttgcattcatacaggcataatttattttgagcttatattgagtttcactttattgcactttggagatatggtggtttttacaaatcgaaggtttgtggaaatcctgcttcaggcaagtactattttttccaacagcataaactcgtttcatgcctctgtttcatattttggtaattcttttaatattttaaatttttaaattatttttatatctgttacagtggtctgtgatcagcgatcttttattttactattgttattgtcttagggggccacaaactgcacccatataagatgggtaaattaattgataagggtgtgtattctgactgctcttccaactggtgttccccaatctctgtccttctcctggaggcttgctgttccctgagacacagaaatactgaaattaggtcaattaataaccatgcagtggcctttaagtgttcaagtgaaaggaggagtaaaacatctgtttctttaaatcaaaagctagaaatgatgaagcttagtggggataacatatcaaaagccaagacaggccaaacgctaggcctttttcaccagttagccaagttgtgcatgcaaaggaaatgttcttgtaggaactcttccagttctgctccagtgaacacatgaatgatgagaaagcaaaacaaccttattgctgatatgaggacagttttagaggtctggctaaaagatcaaaccagccacaacattcccataagctaaagcctaatctactgcaaggccctaactgtctgattttatgaaagctgagaaatgtgaggatgctgcggaagaaaagttggaaggtagcaaaagttggttcatgaggtctaaggaaagaagccagcttcataacatgaaaatgccaggtgaagcagcaagtgctaatgtagaaggtgcagcaagttatccagaagataatagctaagatygttgatgaagyagttacacttaacaacatattttcaatgtagacaaaatagtctcatggaagaagacgccttctaggactttcatagctaaagaggagtagtcaatgcctggcttcaaatcttcaaaggacaagctcactctgttgttggtggctagagcagctggtgactttaagttgaaaccagtgctcgtttaccattccaaaaatcctagggccctgaagaattatgctaagcctactctgcctgtattctgtaaatggaacaacaaagcctagatgacagcaaatgtgtttatgttgccgtttactgaacattttaagctcactattgacacctgaagctcagaaaaggattccttttcaaattattactgttaacaaagcatctagtcacccaagaactctgttagagatttacaaggtgatgaatgttgttttcatgcctggtaacacaacatccattctgtaacccatggatcaaggagtaattttgaatttcaagtcttactatttaataaatatatttcataaggctataactaccatggataataactctggtcatctgggcaaagttaattgaaaactttctggaatggattcactattttagatgccattaagaacattcatgattcatgagaggaggtcaaaatatcmacattatattaggcatttggaagaagttgattccaaacctcatggatgagttcaagggcttcaagacttcaatggtgaaagtaactgaggatgtggtggaaatagcaagaaaactagaattagaagtagagcctgaagatgtgactgaattataacaatcttaggataaaactttgacagatgaggagttgcttctcatgaatgaacaaaggaagttgttttgtgagatgcaatcgagtcctggtggagatgctttgaacactgtggaaatgacaaaaaaggatttagaatgtcttacaacactgattggtaaagcagacacatggtttgagaggattgactccagttctgaaagatgttctaccgctagtaaaaaactctcaaatatctacagggaactctttcttgaaaggaagagtcaattgatgcaggagacttcctagttatcttatattcagaagctgctatggccacccaaccttcagcaaccaccaccctgatcagtcagcagccatcaacattgaggcaagaccctccatcagcaaaaaaggttttgacttgctgaaggctcatatggctgttagcattttttagcaataaatatgtttaaattaaggtatgtacattttttagatataatgctgttgcacacttaagagactatagtgtggtagagtgctgttgcatacttaagaggctaaagtattgtgtaaacttaacttttatatgcattgagaaaccaaaaaacccatgtgacttgctttattgcagtatttcttttactgtgttggtatggaactgaacccgaatatctttgaggtattcctgtacttgatttttatctatgacattttcccaacttgttaygtaaaggatggtggttgtttaaggccccacatttgaagcatcttactcgagttttgtggggcttatttacattttgaattttcttttcatgttgcctctgtgtctgtctaaaccatgccctagttctgctttaaccagccttttcaggatctatttctggccaggtaatttaatcttaaatgcttagtattaaaacgtactagtctgtaattaagtggaagcctcagcagaaggtgagkgggaaagtttgaattcagtgactcaaaattccaaatttgcttgtgtattgctatatttgtgactaatagctaatgagaaaaccaagctgatataattccagtatggagaaaggccaagggtgtgatcccagtacaaggaataaatagaattgttctttatgtagttgcagaattatgactgtactgacacaacaatgcagcagatatcataagtctatttaagagacatctcaataacagctcaagttaaaaaaaagttacaataaaatgtttaaaaatacttataaacatttcaaatacatagtgtatagtaaagtgtaatgaatgtgaactccaccacttatgaaaacattgtaatttatctgactataaaggtaaataataatawtcaatttcagagtggctactaaactagataaaatacctatacagaggaatagcatagttcctggtgtataatagatactggacaagtaggtaaatattatttagacaagtttactttaagcaaaaaaaaaatattggaagccagtttcatggtaggaatttcaggatataaagttgcagtggctcatgcctgtaatcctaacagtttgggaggccgaggtgggcagatcacttgagcccagaagttcagcatcagcctggcaacatagcacaagcccatctctataaaaaatagaaaaaaattttctgggtgtggtgatgtgcacctgtagtcccagctactcaggaggctaaggtgggaggatcacctgcacctgggaaggtcgaggctgcagtgagctgtgatcattgcactccagtctgggtgacagagtgaagactctgtcttaaaacaacaaacaagaaaatgaaacaaaaacctactccccccaaaacctcattacacctgtggattaccattggacatccaacacaaatagattacaaacctaattctcatagccctatcattacctagctatttaattttggtaagtttctgacttagtttcaacatttataaaacaaagtgatttctgtwcatatttattaagatttttttgtctcccatactttactggccaataaaaagccataattgaaaacacttcaacatctctgtaaacttctagagaagatgattacctaaatagagtggcttttaatcaaacttctgtccagacctagrtgatgaggcaatctttagaagttygttttagaatactataattactcctgataatatcatctctgattttgcctaatattacagctactactccagcatagattttgatattttaaaaacagaaagtttgtacatgttgccaagtggtaattgacttttgattcttggcattcacaacattaagtggattgtatagagttgtgtgccagaactcaaagccaaaagcaaaagaacagaaaatgctgggtatctgaacagtgttggatttagattggagtattccacttactctacatccttgctactcaaactgtggtctgtgtacctgctgtgtgagtaccacctgggagcttgtgggtgatagagaattttaggccccacctagacataaataattagaatctacattttaacaagctcttctaggagattcttatgcaaattaagatttgagaaataatactctaggacacttaaaaaatatgctttatctgaattattgatgctgaatcacaaatggaaaataatgaaatacgaggaatattagtagacatcatgacgatagttgttcttacaaataattgttaacttcaaatgtcttttctaacctcaagacaggaccaaatgtagattacccattttcagaaaaaaaatgattcttttacaaggtaaatgttaaaggaggttatatttttttagagagtaagatattttaaatcagcatgtggcatattaaagctattcatgcaaatgatgaaatattttctgtaggtaaatgtgtcatcatgacttataatttatgagtctttaaaaattattttacaaaatagttctatagaagtggtgtttttcctcatatgatgttatatcttttcagtgaaatattatacactttgcagttgtacaagttatatgtatacggattatagtgcataagtatagtatataacccaacgatatagaaatgagctttgataagacagtatctttcacaaactactgctaactctgacgagaaaaccttgattgtaaggaggcctatctaaaaatcctcagtattyttataaaaacaagtaattaattcactaactgattcagtacttaattatgaaggcttctgagtgtctggcatatgccacatgctgggggtgaggagagcagtgaataaaagcagatttattcctyttccctgctagtattttcatatctattgggggagagatgcattaatcaattaattacaaaaaatgagtttatcattacaagctgtgttaagcatttgtaagtgctgagtttgggaaggctttctggcagaagtggcattggaattgagattggaagaatgagtaggaaataaccaggataagaatataggaggtaaagaatgggaaaataattccaaattgagggatcagtatgaccagagccctgtggagaagaagggaatgacatgtttaactatctggaaagccataatggttggaacacaaagagtaaagagaagaggtggcttgagatggagctggagagatggttaggcagaggccagatcatacaggagctttaggatgtgttaaggatttgactccctgtttaaaatccttcaaagggaacccgttaaggggttttaaatggagttttaaacagaggagcatattgtaaacagagggattttaaacaaatgggtatcacacaaagagaaattctaattgtttatttgtttattttaagatcacactggctgtagagtgggggctaggacattaacttgaacactgggagggtaaaaagtaacaggtaggccaattagggaataatgagagtaatttaagcaataaagaattgaggtaatggcgatggtaaaggtaaaagtgaatggattctagaagtaaataagaggttttgatgtacaattggagggataagcaggagtttgggcaacttctagattttgggcttatggcacttcacggctgacagtgaggggatccacgttttggtgggaaggtcatgagtttggtttggacatgaagatattctttggtccaaattctgttargacgattaaaatatgtggttggaatgaccaatmctgtatcctaagatgagaataatatactcatataataagattagttatggcataccacaaaaatataattaccagtaattaatggggccattgaaagcattcagtaaaatgatgtttatagactacttagtccaggccttggcacattataagtaaaccattaacatttgatattattgttgtttatattattgatactctttagcctttgtctctcatattctctgcaacatattggctacacctttacttgttaattgagaaacggtttttttgagacagagtcttgttctgtcgcccagactggagtgcagtggtgcaatctcggctcactgttatctcggctcactgcaacctctgcctcaagcgattctccttcctcagtctcccgagtagctgggattacagatgtgcaccaccacgcctggtaatttttgtattttttagtagagacagggtttcaccatgttgaccaggctggtcttgaactcctgacctcaggygatccacccgcctgggcaccccaaagtgctggcattacaatcatgagccaccacacccagccagaaataatatttttatctgttagctttctttaacttgagtatttttagtctatagagtcatagtcctggagatagggaattttcttttcattgagacacctcttaattgaggcacaatgtttataaagagcaccccgttatgccttgcatgtcctctgtgtcatttttaatatattttcccttcactcctccatcagcaattgctcagcgagagtactgctgagctaacattcagtatcctgccctacctgaacactgatttcttaaatacatacttttctatggatgatactcaaatagatcctatcttgctgcccttagctcccaaatgccccttgtccatgcaggggagtgctggtgctcaggcacttctgcacttctgtttgttaaacattttgaatatcactatccccacgtcacattactatttaactacttcatacacaatatccgcctatactcacatggaaaatattctattaattacagtacctagaacccacaagaatcaatatcttctgttcttccacaagttattatatataaaaaaagatcttggtcaaatggagtatatgtgtacattgatttagcaggagtaacagtaatttcatgaatttggtaaattttcgtgaatttagatgtcattaatctatgcatcttggctttcatttcttttgataagaacaaaggtggccgcgcacagtggctcacacctgtaatcccagcactttgggaggctgaggcgggtggattatctgtggtcaggagttcaagaccagcctggccaacatggtgaaaccctgtctctaacaaaaatacaaaaattagccgggcgtggtgatgcatgcctgtaatcccagctactcgggaggctgtcaggagaagcacttgaacccaggaggcagaggttgcagtgagccgagatcgcaccactgcactccagcctcagcgagaagagtgagacttaaaaaacaacaacaaaacaaacaaataaacaaaaaaaagrtttagtaagcagataaatagagcaaaaatatgttttatttataaaatggcaggagaaaaatatttgttcatgtacttgtaacacttgtaacaatgcacttgttattataacaaaagatcttactaaattaaaactgtgcttattagacacgattcttcctatttaataaagtgccttaaaaaatccatcaagtacctatctcccaatctgcaattattatggatccccaaatgtcatgtctgtggttgtataatctagattctcaccaggttgactggcacccccttaaaccagatgcaagaaagtcaagtttcattttataatgtatatgagtgagtgtgaaagggccctgagtaaactatttgagcctgttccttcagtgctcgccagtatggttcttcaatgcagtacttgtatttctctgttcttttttttttaacctgtaatgttcttgctgcataatgttaaatctatattttatgtcccatgatttctagctagttcatttagctctgtttccctggggttgatggaaggaggagttaatatcctcagctttctaacaacagacattgaaaaagatcacgcttgtctcgaatgttactggctctctgagccacactgcaagaaatattacaggcaacaaatagtttcattttcaatttagacacccattatttgatgtttacaggccattcctaattctgagtccagaatttatggtttgttctggcgattatcatcacagcaatctcctgcaactgggctgtgcttcatcgggagctttgtgctgctgtatcagtcctccctggcgcctggaactgatatatagcaccctgtccaaatcaccctgctcagagaggcttagtttatggctctccaaatgcccatcttttctgatgggtatgtcagtttgcacccactcagtgagggggaacgttgacccttgggaaggagggtggtggtcattaaagaaataaaagtctaacacttaagattctgaacccctctgaatcaaactagatgatatcattgattaagtgaaatttactgagttttgttcagtgctaattaataatgaaacatagatgtttcctagtttgacttgtaaacctaagatgaagaatagcatatatatttattgaaaacatggtaaaatagtggtagtaacagctttggatacataagtgtgtttcaaatggttattttatagattctttttgcatagacagtatttagttctgtctctcagatacatgggtgttctccaggctctgttcaataacattaattacagtttactgaattactttagaaatctctgcacattgattgtagaagaatcactcactaaatctgcatttttgcaaggatgtggtgaaacatgtatctattataagtcctgtaaccagaatgatacttcattttaaatcttgctggttgaaatgaaaacaagaatatcttttgctaccaatttctaccgacttctgtgcgttagttgtggcttgtcacttgcccctcctccccttcgaactacaggaactagaactaacaaaactagacaaggggataggtcttggtcataaaggggcttgctactccttcctccctacattaaagacaacttatttagcacttcccggagaggaaggagagacagaggcagaaggagaaagagaaaagcccaatagagataaagctgtgaataagtcgtctccaacttctgtccaacctcaccccctaagtaagttgtgctacccagacagaccagcgaaccagggggtattactctaataatattttctcttatagagtaaaataaaaatgctctttcctgtagggaaataccaccgagaggcaatgaacaccaccaatagtaacatttagtacatagtgatcagatctgatcgagacatcaacacatctgtttctacacgccatcttacagaagaggaaactgagacccacagaaactgtgtratttgcttaagttcacacatctaggaagtggaaaagttaggagtaggaatcgcctctcctctgactcactaagtagaggttttaattttttctccacatcagtattttgcaggaaaaaaggaacttagaaagatgtacttggaattagtcttaggaatatcactttgaatagagaaggattttctttgaagttgcattgtgaattttaaatttgcatcatcctgtgatcagggctctgagtaagtctgagacagcgctgtagagttggactttgcccttaggttgtcctccttttcatgcccttctttccacttaactgacttgaacaccactgtcaggcctgccctctaagaatggtcaatattctacatatttcttaacaaactctcttctttctactgtattttcccccaataatgcatatttcatatgtgggatgtttccaaggtagcttttggaatttaaaactaaaataactaagatgtttaaaaaacaggtaaaatgaagttattatatttttgtttcttgtctcattgattttatacagttgggtaaattattcccttcaccctggctgaaaagtcaatcaatggccaaacttttctagttaccttcagtcttttgtgccagtccctctcttctaatcaataactagaatataactgtcaaaacttataccttgatttcaaytgggctgattttccacagcttagacctattgtaggtaggaaaccagcagttgaaagagaacttarttgctttttattattkttctccccttttctggggtagaagcaagaggaggaaggagagctgaagggaacataaaagttatttctagctctcaggtttctgaaggctgacttttcccataaacttgctgtatcagttagggtcccagcaagagaaaaaaaaacagtgccccaagctggtaatttgaggagagtatattaaagggcctatttatatagctatgaacaaggcttgagggactcaataagggatagagcaagaccctaggcctgcaactacagggagctctgcccactcccaggcctgtaggatcaaggggagggagtgggtcatagaacaagacagggtggctgtaggaagaagacttctgccaggagttgtggtcttcagtagacagacacaaccaacttacagcaactacctggaatggcaacaagaaaataaatctttcaaccctactctcctcctccctgcctatcccttgctttgcacaagctcacctgaaaacatggaacaatttttgtgatatctgggggttgggggaagagagtgtggtgaaaaaaggtgatgagtggatccaaaggggcaaatggaaaaaatctggcacagataaaatattagccaggattctacagataaacagaacgaataggatacatatataagaggagatttattatgggaattggcttatgtgattataaaggtgaggaagtatcatgatctgctgtgtgcaagctggagaacttgggaagccaatggtataattcagtccccatctgagggccagagaaccaggggagccaatggtgtaactcccagtccaaggccaaaggcttagtacaaggttaaggggtgagggagggtgctggcataagtcctgatgtctgaaagcctgcgaaccaggagagctctgagggcaggagaagatgcatgtcacagctggagaagagagagcaaaattgtccttcctctgtctttttgttctacccagcccctcaacagattagatgatgcctgttcaccttggtggaggcattttgttctttactgggtctacttatccagatgcgaattttattctgaaaacagcttcagaaatacccagaaataatgttttaccagttacctaggtatcttttaacccaatcaagttgatgtcacaggtgattttgagggttccttggaggtctgcatctgacctgcagttcacttaatgtgagtgatatcttcttctgcagctgactgcttatttatgaaatccagatgtttctataactccttgtagcttttctctattttactgatctaggcaatagccttggacaaaacaaacaaacaaaaaaacaaggtgaccccagaccagctgtctttagcataaggcccatatctggaccatgaaaaatgctcaaatgttrgaattcattcacatctttttckgcttattcatcagcaagtagccgacctcctttcactagttagatttcttgggagagagttcacaagtgtccactgaatctcagctgccagggactttgcttttaaatgttccattgaagtgtctctttctagactatggagtgagaaagtagggaggagaatgggaattccagattctttatataaatcctctccaataaaccttccctaatctccacatgttttgacctttatacctttattatggatgtgaggttttattcagagccaagtagtggtttttgattatttcttttgaaaatcattatcttggtctggcacagaaatgaggaatgccctatatgtatttagttaaagctaaarttttttaatgaaataaagaagaatggaaattttcaaatattagatggagattttcaaatattagaatctggcaatggaagaaaaaagggagagactatctttgagtagaagccactggtacctctcaagtaatgccatatagatctgtatttcttctgacagtatataagttagatcctgtttatgagatttttaaaaatttaagatgtctgcacaaatcaagtttcataacaaataatattttcaataggctaagaggactgctataaaagaatatatttatgcatcctattgtaaagaaaattattacctactaatttatcttgaaggaaaaatttttatatgccaagtttctttaaagtggaggctttaatttaactttctcacatgctttagaatatgaaactcttcacgttatgaaccttgaaagtgctaatttaggaaagaaatgatagaaaatatttatgttaatcagcaaagaatacatccattgtattcttattttatggtgttaaaaataaacatgtctkcaagacacagattacagttcactgkgaaagtgaaaacaataaccagaatcgtggaagtctatctgttctaagtttcatagactttccatagccatatgtaaaggctatggaaatactttgacagtctattattcaaacgccataaaacccactgttggctgaagtttgacatactgagtattattaaactatgaaaacctggcttgggaaacagagtaggaattagacttaagaaactggaggaatggcagacaataaaatttttacaagatcagtggttttctgattctctatctccaaaaacatggtggagacagaaaaattgccagaaaatggtgattctatttaaaagcgggaaaataatttatttggtctatgtgtgtaatgctatgtcattgcttattagactctggtagtggttctgaatattgtagacaaagtcgttgccatatgagctcacaggagctcacagtgtratcgacagcataaaatattgcatttctccacgttcgtacagacgcttttatattagcatcacagctgctttcttcaggggtaggcacttttctaaggctggctgctgggtcaggcatcacaaaaccaaaaggatttctagaatgagtcagatcttactccagatcctctgatggtgactcagtaaaaaagttttggaattaaaatatcagtaaagacataatgtgcaatttaatcattaattgatattgaaggatttatraactttggcctagatatctatatttcagatatatgattgactcttcatggaaacacctttaaaagacaaagtcatagtttatattgatacctgtgagtaacatcttcagaaaaatgatttgattttctttttgtagtgcaaacccatgaatgtttatttcatgtttggtgaatatcggttaaaattctgtattctggcgtgagtatctytggtctgagaacacaggcaacaagctggagtgtagtgttctcagtacttaattagttrtttactagactagataccaacagagaactctaatgccacacactgttagagttcagaggaaccctaaagatcatttagtgtaatggcctccttttatgcatgctaaggacatttgagacaggacaagagaggtgattcatcctagttaaggtcaaccagagagcttattttagaaaccccattttctgattcacaggttagatttttatcctcataccaagtttatattgtactacttataggtaataataacagcagtctttgaataaaaacactgatttaataaaatatttaataactaataggatagatattatttttgttaaaaatacaaacactcaatgtattaataatatagcttgaatattacttattagaagtatggttaacaattcttcatttattcattttacccacatccattaattgagtttcaggtgttrtagtagatacaaatgacagatttaagaagtgtcagtgtaraagatgaggcagagtataaataaaagataacaaaagtctcacagatatagtggaaatatatgaagagattaatgaaagaacaaatgagatgatttgtaactttaaatttttatagcaaaattgaggagggtcagaaaaggtgatacagagaatgagacaattgagctgagtctcagattatgaattaagaattttcctgttgaacaagaagagatgggggcattccaggacaaggctggtgtttgaaaaagcacagggaaatcagccagttggtttagttcaagaaacccaagtgtgacattggtaacaccaatgatatgtctaataataactgctaacatttcttgaacccttcctatttgccagctttgtataccctttatccttttattccttataacaactttgtaatatagattttatattatctccactttatgggcaaagaaactaagactttgaggattaagtcacttgttcaaagacataaagctgtcaggtgatggagctgattagaatacaatttcaactggctccacaaacttatattctgctcattatattttataaatacttttataaagcttacataacagatatattgagtttaagttacagtggcttcaagttgtcatggtatggtggcttaagtctgagatgggacacggttctacctgacacacaatttactgtgtgtcctccagaggcaggacatttaaatttactgaacctcagtgtcttcacatacaaatgtgtgtagagttattgtgaacagcagttgagacagtacgtgtaaagtacttattatatgtggtagacatttgacacaatgttgtttccctctcactgacttccagacataccccagcaggcatctacatggggatggcatcttactttcccaaacaatacaaaagttyaagacatttgtagtcttcatcctacttcctctgttagctaaatcattctattcttatatggttaatttttaaaaacctcatttcaaaactcagagttaatttttggcttgttttagttgtattttcacattatagaccttatttctgacagatcatttagcatgccccatcaggtgtcttcctgatacgccattcagtacagtggtattctagaaggagagatttcatttttctttcttatacttgtctgtttgtgtgtctttcatgcctgwaaaatgtagactagaatctgtgcctgtgctatgtgctaagcataaactatttttcaagcaatttctttagagaagaactaagtttaagggtatcatatttcatcttttaccattaaaaggaaaatgcatcattttaaaaggttgaataaaatggcacacatttacaaaacaaaaataaaacataacaataacaacaacaaaaacaacaacaaaaaacattttcctgctgtttgaattccacacagggctcctctgcactgattttcatttgactatgaattagataaatttttatttgctttaaacctcatctcttagtgtttgaggcttcataatttatagggtgagcatcatggccttcctatttcaaacgtctccttttattttcagcttcgtattacacacacatgttttgacatattttcaatggctgtttatgcaagaaattgtgcaataaaagtaacatattattctacaattcttccttttagagaacatggccctttcatagaattttaaagttaraaaggaatatagaaacaatttaggrcaaatattcattttatgggtttggaaattaaggcccagaaacgtaatgggatctgccaaaaccttatccagtcttctatttctctatttatttaacaaataactgttgagcccctactatgtgcaaagcactgtgctagatcctttgagggacaaaatatatgtaagatatttttatatttcaaggatcataccatctagtgagaaagacacattcaggtaagtaattaagcataggacaaatactaatgaaatgagctctttatgagcccttcagcagttcccaggctgaaatcatcatccttgtgttgacctggctttctccttgaaatgacaatttcagttcacaactccatcatctagccagctgtcactgctggaaaccaggacatcagtctagattgttctctttccttcacctgccagcatctgccagtcatcctcctacccaggttacccatatagagtccttaagtctgtggtttttctttatcctgactgccattgcattagtttcaacactgttcatctctctgtggactattactgtgaccatttaatgcttctatttctgcttgtcatctcctcaaatccattgtgcagactccacagccggtttgatataatggactgattgtatcattcattttcttaacttctatgactcccagttgtctatagggttaagctcatttcttggcatagcaaagacctccaggatcaggcctctcctaacacttttactaataaccaaataatctttaaggacctttacctttgctcaggctatacctgtccctgataagctttttctcttctcttcacctggctgacttttatatatcctgtaatactcaattgttacctactcaagaatgcttccttcatcattattgagagtgctgctctcatcaatccatgtgttatcctaggtacctctataaactactgtgtttatgtctatcactagatttgtgcacctgaaaggcagcgactagttcttagcatggtgtcccgcatatagtagatgataaagatttgttgactatgttgacctatttattaaaccaagtgttataaaagaagtataagaactataagaaagtatcatggaagagagtaattaattgcaaatgagaagatcaacaaaggctctatgtaaaatttagtaactgagttataccttgaaagaggtccataaccaggccaggtgcagtggcttatgcctgtaatcccagcactgggaggccaaggcaggaggatcacctgaggtcaggagttcaagaccagcctggctgacatggtgaaaacccacctctactaaaagtacaaaaaaaaaaataagccaggcatggtggtaggcacctgtaatcccagctactcaggaggctaaggcaggagaatcacttgaacccaggaggcataggttgcagtgagccgagatggcactactgcactctagcctgggcaacagaacaaaacatttggaaagaaagaaagagaaagaaaagaaagaaggaaggaaggaaggagtccataacaagaaaagtaagagacaagaaatgaaaagagaggtatttatactagcagagttcttgagttgtaatcatattgcagagaatagaaaagacccattaaggtgtcttattagtggtttagtaaatacagaagtagattatatgaggctttgaacacaatgatcaagactttgttcttaatttcatcagtagggatacagtgaagggttttagagcaaaggagggacataattagaccttatgtttctccactagggagtaagcactttgagggttgggattttttggttgtctatttcttatttactattttattttatttatttttatttaaatgttttttgatatggagtcttgctctgttgccaggctggagtgcagtggcgcaatctcggctcactgcaacttccgcctcctgggttcaagcaattctcctgccttagcctcgcaagtagttgggattacagatatgcgccaccatgcccagctaattcttgtatgtttagtaaagatggtgtttcaccatgttggccaggctggtcttgaactcctgacctcaggtgatccacctgccttggcctcacaaaatgctgggattacaggctgagccaccgcactcggcccagaatttttttttttaataaagtctttcttggcagtttgtttacagatgaagaatgtgactgctttccctatacagtgctgacctgtgccatgtgagtgtctatctgcctgacactccactgtaagtggtcccttttccattagcagggatttgctgacttaataatggcttctgtcaaggatttctttaaggagcagtctcttttctgagcactcgggatataggcaggttctgactgttatctgcagttgtgttttaatatcctgccatttccatctcttgtctcagaacacagaattcacctttagtccgagctcattgatgatttgttaaggctttgaaaaaagaaggaatgagggcctttaagcaggacggggctatttctccttgccttatttatttttatgctatgcaaaaggaataaagaggcataaaatggcttgactgaagccaaataaatctagataaatagagcaaggatccaataaaaagccggaggtgaaaaagtagaaaggtgattgtggttggggataggggatcaagggagaaaaaagcaagaagggagacctttaaacttcctgtcatgatagggactgtttattattgcctagacaatgaaatgtctttgacccagtgaaacattttaaactagggttaagctctgggtagaaattagggaataatttttatagttcctattgaatctctttgtgctgtcacctcctgtcatcctttatttaaagtttggtatgcttctgctgctagctctgagaaagctgacattttttagttgttctgatgaatcacaccacagaagctagcgggtttttacagccaacacaacaggagtctcccatattattcctgatactgtgtgtgtgtgtgtgtgtgtgtgcatgtgtgtgtgtgtgtgtgtgtgtgtgtgtgtgtgtgtaggaggtctctttgtctgtcccacttctgcctcttttttattatctctgctttcatgaagtggaaagcgatacaaccaagagcaaacactgcatgaagctagagaataagggctgggttctttaggtaaaattataaactgtctgagagctcattgtgtatctgtttatgccattgtcctgtatagtcatgagttagctcttcataattccccactgctagcatagagaatgctgagtaggagctgtgaaggtagccacaactttcatctgtgtaattgctgccattgctctgatatccagaatgttattagtgctcatagaaataacctaaccaaatctctcctatttcccttttcttacttctctcttccctagacacagtttccatggtgtacacattccacaatctctttataagaaactaaaacatggtaaagacttactggccttctactgtgtcttcctataggaggcagctgaacatatgtggtgccaatttttggctgtcacagtgcgccagatttggtattgaatttagcagacctgggtccacgaatgccagatatcttgcagtgtatcgaatgatctccaatgatggccatttttcacactttaaatatcagtaacactgctgttgggaaaatataggttgacctgagtttgaggtagataccagcaacctcagctcatagagaactttagctgtgccttgagagctaaatgctaaaatctcctccagagtctctagaatgacaccttcctggaaaacagtaggcctctaatcaaactatgttgtgttttgaattaaattgctcatttatagtctagtcaactctatttgrtaagtcctatgtaagttactatcaggaatagaaaaaaaattgagatatatttgccaatatcaggattctaacagtatcataagggggatgcacataaataaaatgattatattgraaaacactcaaaatgctgttggaaaaaggaaaagtgagactttacttttgagcagggttgttggaagaactccctgtagaaaccagtgaggagtagataggacttcagtaggtgttttagaagatgatctctgaaatcaaaggtacattacatgtaagaactggggagaagagacagaaaattataggaatattgctactgtaaaggagagtatatagcagtacataagagtaaaaaagtaggttaggacagagtatagagagtttttaaatttcttgttagggagtccactgcagggtatgggtttatgcatgagtttagtcattggggaaagtgtcagacatgcttcctcgtggtttatacttggcctcagtgtcctttttcattgagttcgtgctgtaacccccttcagttatcagctgcttaaacttgccttcctgattttcaaggtcttctctcaagatcccttttcagtttattaatttaaacagcagcaattttcctagaggtgaatcacataatgatttttccaatctcttttatgtgagatatcactgcaaaaagtatgattagatttaatcyagttgtcttgcacaaaaataatatgtagaaaataccaaccaaggtgactctctatgtgcttaatagcctaaagatttaggttaaggatataacagagagctgttctgctcaaagaataaaaaggtgttgcacaaattatcttaaagagccaaaaacagcgtccagttcttacttaaaacaatttgttcttggaatattgtcagctaaaattgtggtcaacttttgcaaattgtatgaatttgcactgcatactttatttagtgtttagcaaaattccaatatggctctgcataacttacacaatacaccatggaaatgactttagaaactcccacagaagttgacaaattgggcatctaatgcttttaagctaattgcctgcttagtgatttaagatttgacttgttaaaaatgaagatcagagtttcatgaagataatgctctgcctattgtcacactgaatacaacctaactccgtatcggaaatattacagaagcataaagatgaaaataatgtgagctttaatcaccattctacttagtcttaagtgaaatgctcatgaatcatatataatatagcagttttgaaacctattcttgaatttcaagctgttattttcaggaaatttagaaagcaaattgctaagtgataaagattaattgataccattgcttatgtcgttttttcttctttgcaggctggaaaaaaagaaaggagtaataccctgaatattgctttagacaacatgtgtaagaagacaagagaccttcgcagacaggtgagggaagagagagatatggagtcagaaacataggggctaaatgaaactgttattcattgcaggcatatttgtttcttgttttgttcctttcaaattaatttagaacaggaaaaaaaagagtaaatatatactttccacatttatatattcatacctcaaatgttttttgtggcaaatacaaagcagagaaagaatgtgtgccttatcagacagaattacattcaaattctggttctgttctcatcagttgtgagatcttgggcacatatttcagctctctgagctgctttgaacctatacaatgaaattaataatatgcaatagggctgtgaggaatcaataaaatgcatgtaagtgcctgacccatagcaagtttttagggaatgttgatcaattgattgtattacatcagagttcatcatccaaatgcttaaatccaaatgattaactagtaagtaattcagagaccctacccattcctccttccattttttttcatgatacttcaaaaattagtttttgtaaaagttaagccttctttttaaccttaagtcatcaggaacatgggattagaaagaatttcattaaacaatttataagtctagtatgatgccacaagttaaacatttttccagaaataggaagacttagctattttcaaagacatttgctcttcattcctttcctctgttcaataaccagagttctttctcatgcagaactttcacttggtcatcattaactcatcaaaagggagaaaaagcttttcaactatgaacttttaatgcaatgtattatsgtagtttaatggcaagatttagtaaaatggctaagcaatcttttaatttggacgtagatttggaaatggaataaatagagatctccagccagttaataatagctgcataaaaacataatgttgaagtctgtgaaaatctcagtttctcaactttatgcccttaatgtgaattctgtttctaccatttacacttgtaatcatggaatgtaagagtcagaaggaacttagcacaacctgtcttacgatgcaaatgagaaagcaggtcagtgtggtgaggtgacctgcctaagaggatggggcaccgagtcagaacctgtaccaggactcagaaatttatatcctcagagcgatcctcccctttcgtggaatgatccctattctccatcgtcttcaggatttctaccccatctgcttcacctaggactcagaaaagttgtctctatgagctctcaatgattgtgtctctcgttcgtgtcttttccctctatattgccttcaacaacattatgcataaagagctaatctacatttatacttctaaaggttttagaattattatttttctaaataaagtcaagaaaatgcaattacttgtgtgtggaattaccagatttagcaaataaaagcacaaggcacccagttaaatttgaatttcagattaacaacaaacatggtttagtataattatgtcccaaatattgtatggtacatacttatatttaaaaagttgttcatctgaaattcaaatgtaaccgagcatcttgtattttatattgcaatcctacttgtatttccacctcactaccatcagtgagatatagaaatagcattggggattactaatactattcttcatagtaagaagatactcccatcttgtagaaaactgctgtgctctgaaggtattaacattctgtatggtttcacaggttaacatctccattgtttcaattttctatcagtgtttaacaaaccaccacaaacagtagcaaccatatttgcatctcacgatgtcttgggttggctgggcgtcagcggggccattttctgtaccgttttcacttgtggttttccacatagtggcagtcaaatggcaactgtggctagatttgggacttgatgtttggaacctcagtgcttcttcctgttccctctctcgatacggtgcctaatgttttagggcctctccatgtggcttcaatctctagcagggtagcctagatctctttcatgctgtttcaagttgccaagaaaagggagacggaagctgacaagcattcttagtgccttagctccaaagtcagagaatgctatttcctctataatctgtaagtaaaaaacagtcaaaaaccctgtcccagttcaataggagtaggcagaagttctgtctgttgtaggagaagtggtatgtgtgtacaggaatggatggaattgttagaagctgtctttgaacacctccatgatcttccgttttgatgaagttagttgctatgattctttctcattatcctcacttaccctccccctagtactttatttttcatcctgatgtttacatttttggtagaagtcacagttaattaaaacagcaatataagttatctctacttcttgttcttaagaagtttatccaacagttgttgtaagcatctcacatatagttcttctcacaggaaagagaaagcactgcccttaaaatgtttttctttggagtatttaatgttcatcgtttgctttagaactggttttatcttttaaaactttttttagtaaaaaataagcagagcccatcttcctgcccattcatccttatcccctttcttaaccatggcctttctatcagtaatgcagaaacatttcagcttcagttcagagggtgattggatttcttccaagaggaatgacagagattgcttagaaatatctaaggagaagcaaattatagatttgaggacatcaagatggaatgttctaggaggcgagagtatttatttgtttcaatcttcttcctctgtgactttcttgcctgttttactagagaacaaagacaaatgttcttggcatggtgttctaggttctctgtgatttggccctgacttaatccccattattcttaatgttccttttccttcagctctccttcgcagtgttgtgtcctcctcatcacaccaacacattaacctgttttcttttctctctctctctttttttttttttgtttgagacagagtctcactgtaccgcccaggctggagtgcagtggtgtgatctcggctcgttgcaacctccgcctcccaggttcaggcgattctcctgcctcagcctcctaagtagctgggattacagatgcatgccaccacaccctgctacttttttatatttttagtagagatggggtttcaccatgttggccaggctggtctcgaactcctgaccttgtgatctgcccacctcggcctcccaaagtgctgggattacaggtgtgagccaccaggcctggcccacattaacctgttttctgatgaaagaatctacttgttatttaccagaatttgcatcacttcccgctcaaatacacttgcatctttgtacatatgacttgtacgcttgatgccttccccactcactctccttacacacaaccccaactcataagcaactaaattccagagtagtgtaaatgctattgcttccatgaaacctttgctgttttcaccagctggaatggacctttttcttcctggaacacttacagcatgtgcatattacagcaatgattatattcttctatttttttcttttgtaatgagttttcttcccactgaattttaagtccttataatgatagctatgacaacatctctcatttactaaatgctttgcaaagctctctaccaagcatattcattacattattaatttttattcctaaaacaataaataatgccatggtattgttatctttgtcccccaaaatgagttaacatagcaaacatcacccagctacgtgatagagacacagttctagcccaggtccatccaaccccagcccatatgtgtaatcaccacaccaggggctagggattatggcctattcactttcagaacctcccagtgcctaatacactgattttaccatcatatattattttctttattatttgttttaaatgcctttttaaagttaaattttcttctttctttagcctctttttccgtcattcatttgaaaactgtatacctattgcaactctctcagtaaaaggaggaagactttttaaacattctttactttataaaaaaatttaagcaacaaatatatcttatttctagtttactatacatactaaaatatatttgatttcactaaaggcaggctaaaatttgtatttgtgtatattaagaaaaatgtcttttatttcataaatatcaaagtaaagatgaagtatgtcaaatgggattttggtaaaaacagacaaaacaaaaacttgattaattctttagttgctgagtttctgaattgttaggtccatctctcttccatgttgcatagtaccagttcaccactcagaaaaaaatatgtaggcttttatacctcctggtcatcatcctcatcatcaaataacattatgtatccacaagagacaagtttcactaaacttgcatagtacatacacagtgaaataattattagtacatttaattccaagctttgaaaatcacattttgctatttgatttaaattaaaatggcttttaatttaaaatatttattaaaatttaaatactgtttattaaaatttaatacaatattttaacataaaatattttagtctaaatgtgtttttctgtttccctgaagatgattcctttctgaaacactttctcccctttccattccccttcccatcacaatttcattctttctgttcctttatttggtgggaatggtggggcttttttagacttttcacatagggctttcactttgggcttcaattgtagtgatatatattattttgagatcccaaaccacttacatcagtaggaaatagaaaaattgatgtctcaaagccttttattaaactgtagtgagaaaagatgaaaagcacctcagtttggttttgttctaacatctttcatgcctggccacaaacaggtatttattgaaagtatgtayctgtaattcctattggcctcccactaacttcagattttagtgctttggcttccatttctrtattggcatattgcattcttctttaaactttttgtatatcacccaactgaaaggaatgcattgtgccactgggcaggaaaataatryggaaataaataagatagaggctactttgctrttatatgtaggtatatatgactatacaatttaatgaaaacaattccatatgaatatgycagaacatataatgaaaattgcttagcataacattctagtcctttcacatcttgtccctacctacatttctagtcctgtctcataataattcctcttttacagtgagtataattcagggcatggcagaacaaaacccagtgatgtacagagccaaggtagtagagtataattagcaatgagtagtttacataagacattggagtctcttacttggtgcatgatcaaacaacattaataccagacaaaggtacctgtttagatgggttttcctgaaagcagtgactaaaactaggaccttagtgcaggtcatttatttaggaggtgattcctggaagcaagtgttatagaacatgaaaagcgaggcagggaaagaggaaatgatatgctattgagattgctgctgtaggcaatgagagcttgaggatctctgagaataacagaatgtttcccagaattgtctgactaatggatggaggctaggaattttatgcagtagtttctatccccataggttgagggtttcccccagtggtgtggatgctgaagaacttccaggcagtgtttatgctgggttgagaatttcacagagacttggaacaggccctgagatagaataacaaagagacacaaggaaggcacacaagaagcatggaatgtcttcagaggacatggaactgttccccccagcaaaagctgaaatcagagatagatccagaggatgagatataaggcaccaaaagtctataatgtagttcataatagtgaaggtaaaggatcaggaaccagcaagttagacagggactggtgagaatattgtgggttggttgaattagttacactttgttttttgcatgggttaagatgatttcagtgggagagatacctccctgcatctgaccatgtgctagctcctaaaggtttcattcacatccagctcaagtcactgatttctgggcatttccttctgtcatgggacgaaaagatgacaaaagttggcacaatgtgagacaatagttctttttcacctgttattcttgctttggcaataaatcaatatgtatttccagcaaagcaaaggggagtaataagactttttggctatagttgcagatgggaaattatagtgaagtctttatatgaaaaacagkcactctttaaacatatatctcagagtagtaaataccaagtcttgcttcttcatgtcacaatcaaattattaaaaacagaagtttatactcactgtctttactgccttatctctcattcactcttcaaaccatagcaataggactcttcagcccacttttccactgaaactgctcttaccaagtttatcaataacctcttagtattcaagcccaagggacaagtctcattccttttttttaatttaatttatctttaaaatttgactctaatttttttttgctgtcagtctctaagtttttctttattgtaatgtttaatgtattattgtaatattcactcttctactagattataagggatcatgaatttccatcttaacatttccttcaatacctttctcttggtagaaaggtgaggaaatggtttccagaaatatttactgaattgaatgaaatcatttacacagaagagaagatttmacaagtccatgatgggaatattatagttatgtttggtaggataactacatttgaagagcattaacamagagatatatttgaaagtttgtcttttagttgtgggtaatttgtctctttgtttcttggctattatctcagtctctttttaggccctactctttaatcatgactcctgtaaatgatagtgtttcctaagaggtcctctgtgggtctcctcactctatatggtctcatccacactctccgcttgagttagttcccatatgctggcccttcatggcatatctctagtgtagatttcatctgagctttccttctacatgtctcaattagaatgaaagaagaaaagaataatctacatgtcctaattatgaatgaaagaagaaaagaataaaggggaggataatcattaaaaaatgcccccactctgagaaattagaaggaatctctacttttctcttcagtatctgaaacttacacaacctgtagttcccagctcaaataaattcrtgaccttatgcctgacttccctggtgtacttcctatagacagcaaacacattattcattcagttaaggtctcccctttgccttgtaaccccttrgcactctatactttgtcctaataagtgctcagtaaatattagttgccactagtaatttgcctttctgcatactaagcagaatccttccttggggatcttcctgaagcctttcttaaattgttgatagtcagaaaatttcacaatgcttctgagcaagctcactattttgggcagagatatttttcttccagaaacctgtaattattatggatttattattctatgatcattatagaagacagtactttctatgtagctctatcattcagctctcccaaaatgtattactattcattcccaagtaatctaaaactaaactaagtgtctattcgtttaaaaaaatactctaaaatgtaactttgacagaaaaattacatttttctgtctgacagctatttatctgttttattgtacagaggttattgaactatatgaaggtcttgactcaaaaacctttgggcccatttatagtcattgacattgttaatgaaacatttcaggatattatgattttttttttttttttgtcggggggagtggatggagtctcactctgttgcctgggctagaatgcagtggtgcgatctcagctcactgcaacctcctcctcctgggttcaagtgattttcctgcctcagccacccaagtagctgggagtacaggtgcctgccactatgcccaactaatttttttatttttagtagagacggggttttaccatgttggccaggctgttctcgaactcctgacctcgtgattcgcctgccttggcctcccaaagtgctgggattacaggcatgagccactgtgcctggcccgatattatgatctttaaagactygatattatataaacacaatgaattaatttttcagtgcagttttaaatctcagaaaatatctgctgactagagtaattgcctaattgtcattaataagcttacatgtaatctaattgaaaagaactaattgtagcagaatgttatagttgtttaataatttaaagtgtgagggcaagaacaatgaatgcaaatggggaaaattggacatcaaactcatttattattcttcttgctctattaatctgttatcaactggcataatcggtgatctaacttggcttaattactatgaagtctacaatttagctaatcaaaatttatcatcagttcctccaacaaggtagaaaacattctataatttgtaattataaaaatacaagatgtacaatattatgtgtacacactcataaatattctaataacacaatttctttgagcaaaaaagaaagtattaccatttttaatctgacttccaggttaaatacaacttaagaaaaattacttttgagaggaaaggaaatattgctagatgattttttctttttgcctggatattttgttttttagtttcttaagggacattcttgtatatctttaagtattgtgattttaggaattgtgcaaaaatgaaaaatgagttgtgtaactactgagattgtaagaaaaggaaacacagtgaactatttcctggaaaaaaaaaacctgaatttttcatttcttctcagctccgcaaggctattatagatcatgtgtcagactctttcctggatacgacagtccctcttttggttctcattgaagctgctaagaatggccgggaaaaggaaataaaagaatatgctgcgatatttcatgaacacaccagcaggcttgtagaggtaagcatgctagaactgtaactcactaaagtccaggagaatgaggctcccattctccatttatggttgaattgtacctaaataaaaacttttgacaccgtgttacaaatacagcagagtctggccaaagtaatatgaaggtgtatatgtccgattgtatagatcactccacattggcttgtcttattttttaaacgcatattttattagagcttcacaaaggaactggctaaatgcagaatactttgatttatccttacaaatattttcttcccattctgacttaaaagtatcaaatactctatcacatattattttattatttctctgccatctttttgtagctgcattactctgtcagcctttcaagtcatatttaactatgtagcatgactacagaacaagaatataggaatatacagggtagagatatccaggaataagtaagtaggggtagtgaactggctcatgtccccacaggggcaaaagaagaccataaaactattattccctctgcttggaaactagagacatgggaatgcaccatgatttttggaacaggatagcatattgctgaaggagctgtgaagtgctgatagcttcccaggagagagataatagaacttactgtattatggatgtcaataacacaagtatatttaagagacagcctgaatggaggaatktctaatacaaataagatgamagtattcacaaggccacaaaccagtggcaagaagtgggaaatgttatctactagatccatagatctcagatgatattcagtatggctcatactcatcagcatggctgcaccagttgttcatkgctggtgtctactctggttgtcagtggccatgccatatgggttattaaatgttttgactgccacaccttcctataccagtcatgaattctgtggtsaaatatgtttttacggcccaaatgcttgtaaatagtctgtctaataatcagcacgtgaattagaatcacaccattcaatataacatctactgaaaaagagaactttcctaacatctttaacgtggatccayggggaggaggtttccaatgcagctagcatttgcgctataaactctctttctggatctcaatctccagaactagaagatgaaaggagtggatgaatrcatgattgctacaatttttgtagcccaaagccgttccacctccaactttgaaatcttctttgaatttcccaagaactctgttagatatggcaagtgttacaatttcaattggccttagatgtaaataaagatatataacccaaaccaagctaattagagttggagctaatttccaggttattaaactaaatgagagkttgactcaaaaacctttgggcctcttcatagtcattgacattgttaatgaaacatttcaggataatttttaattaattgaattatttattatttatctgcttttatttattccttcgtctacacattccagaaagatttattaactgtagacaccaaagaatgttaaaagtaaggcgggaagaaatgggaacaggttgtaaaagacataactaagcacagtccctgacagtcataaaagtgttatctaaaaatgtgttctctaagctgaagacacaccaaattatgaaaacaacttctttttatgaaatcctctgaaagcaaaacttggtttatgctgacaaaattgaattcctcttcctatttctcagtttagttttttgatgaagaagggtgccttggtcgaacaattctcagaaaataagtactatctatagctcctcttggaaaatttacattcttgaaaaatcctgaagcaaagagacctctttaatttagtttaaacaaattaaatcagcttatctctctttctttcatggcacattactaagacactaccttcgaggaacacttgggaatgctaccttataccaaatgatggtttactgttatgtagacacagctctaagaatttgttttaaagttcaagaattttggaaattctgcattccatgtgaattttgaaagaataaaatcttttggaattatgaactattgggagactgaaactggatctcatttaactcgacatgtttccttaacacattataatgagattatacgaggtttggggtgatatttgagttctggttttcactctggtaatgcttagaagttttggtctaagtcactttcatttctgatgagcttttagtatataacaaaccatcctgaaatttaaagcaactatttgttatctctcactaatctatgggttgactgggaagagctgggcaatttttgcttaaggtttctcgtgtgattgctgtcacatactggcagggaatggagcctgccaaaggttggcctagtccggacatgctaaatggcatattcacatgactggaagtgcgttaactgtcagttgggggcttagctgtggttgtcgactggtgcatcaatacatggcttcttcatgtagcttcagcttttcacagcatggtggttgggttctgagatgagaagtcccaaatgcaagcaagaattaggaagctgcagttgtcatttgtattctattggtcaaaccaattacagagactgcccagacacaggaaaagggagcagtgagactacatttctcaatagaaggaatagcaaagtatttgtggtcactactcttctcagggtttcatttgctttatctataaagtgaaagttagacaggataatatctaaggtcattccaagtttcttaaattctatgatgtaacaatttttttttcaactgagagacttacagacttatagattcctataacaggagaaaataaaaatgatttttaggcatactgcttgcacactaggttgtttctctctctctctttctctctttctctctctctccctctctctctctgtgtgtgtgtgtgtgtgtgtgtgtgtgtgtgtgtttatctcatgaagaagaaaaagtactgcatttatctcccagaaaaatctgtttttgaaaggatcttcctaaccaaagcaacagagaaaatcatcagtaatttactacaaacattgagacacaagtgtctatgatagactcgtggaaaataggagagcctaaatatatcagttttagaggacaatatgagttctccttgtatagactatttaccaatcccctacttccttgctccctaccaccccaccccacagacatgcacatacactcatcttattcccaagttgggcaatttgacatagcacggcagaaagtcttacattctaaatgactttgagaaaaagctattatcaacatgtctttgttttgatacctcaaccatgtttgtcagagaaatctaaaatcagtgaacatgttgaagtaagacttaaatgagaaaaaagcccatatttaaagatttctatcaagtctttgaagaaaacctccacactgttaaaggaactctttaaataatggttaacgtgtaacttttacaaaaagatagtaaaaagtaggactaaacacaaagcagaaaatgaaatattaaaaaagtatgtgggtaataatttgaaaaacaagaagttctggggaattcaaaaaaacaaacrggaatgaggaggacagtggccgaagaatttggtctgaacatgcctgttccttggtggtgacacatctgaggtgtcccgctatactaataatacaggaggagacctcagatgtgtcaccacatctattattgtagtttactataaaatgatcatgggtaatgatggttataaaaccctggatagtgccagtaactggagaatctagatctttgtggctaattttatcttagttatgctgagctgagtacctattatgcaaacttttcctactttgagcatccagttactctgtgttcttggatccacagaaccacagtggggaaggataagaagtcgtcaggagtattttaaaagtcatcttcacatagtgattagcaatgaatgacaaatgtgttcaattaatgacaaatgtgttcatatcctccccagtactttgatctcaccttgttggtgatttagggcaccgttatctctactggcttctgccaataaaatctattgaacaggaagataaaaatatgaaatttagcttaaaaataaaaatattcattagttctagagaggattattgctttgaggctcctctgatagcaaagtctatacagctcatgcccaataaatccacattgaatgaaggaaaacattcatagtaccaattaattttaatttctttttctttctaaaatattgactttgtgaatgctagtaactggacttgaaatatatgtctgagctcagttataaagcagagaagctccctactctactgcatataagtacttaaaattaattattcacagtgattttagtaaatgccattaccattaattatcaaaagcagactctatagactctgttccagagctccctcataaaaagtttctgacaattcaataacatctttcaagccctttgctatatcagagatatagtttctaaccttaaagtggtactataactattattcggaagaatgccattacattcaataaatgcattatttattattaaaaaggctattatgattaaatggctatcacttaatatttctctaaaatcaattttgaaaaatttcactctttttttgaattatatttgttttctgcaagtcaattcatgctgagcactacaatcactaccaacgaaaacagtgaaatctccagttaccctatggattttatcgtattagttattaaatatgacagtattaatgatctaggccgaaatttttctataaattaaagaattttctctatgtggaaagccaggtttgtcggtgctttgacttactcatcaaaaattcatctatctttatgtaccttattttagtaagtttcatgggagcctttcatcagaaaggaaaaagtgggtggacatttaattataatacttccctaccacctacaaagctgattgttcccactcgcaaaatggtgagccctatttagcaaagccccagtgccaagacagaaggctttagaggggactcttgcagtttgcaagaagtgctgattgctatgagctctgctaatttctttgctttttgacagaatgctgttcaagtttcacacattgctttaattggtcatctgttatcaaataaggatatgtttgattataaataaatacagcttttccagtccccttccattcttccttcttctttccctcaaaaaaatataaaagaaaaagaacaaacccatacttaacacttgtacacaaaccaacaactgttctaagtgagcatcttggcagctctcctgttttggtagggaagggatgctataggcgggaatgctttacttatgtagaacagagcacaccggtgtgactgcccactcccttggttataaactgctcagcatcttagtccttttactgttaaaaagatgtggctgaacatgacctttaaaagcctaaccaaatgcacggtgagttcctttccatgttgtagtgatttctttataaattttcyacttacggtctttggaatataagaaaagggtaatgattcatttatagaaaagtaagagccttcccacaatcaagtatagatattttcaaatggaatgttagtgtcttagaattcggagaaaagagaaaattatatgggattatagtagtttgggaatttggcaagaagtaaacaataagctgaaccttgaaaactaggcaggcattggaattgaaaaacaaacaaacaaacaaaaaactccaagtagagataacagcatgaataaaggtacagtgctcattcctgtgttccaggaatactgtagaaaggaaatctagataggtaagttggcaggagcatgagatgggatagaggcagytgaacagccttaaatatttgattatcaggctgcacgggttagacttcctcttgtatagctggcagtaacatatctggagaactgtggtagcttctcaccaggaaagggactaaagggaagtcatatttcagtagagcctgcgtgtggactattttgcatctgaatacaaaaatttctaacctttaacaattgattctaatctcacaaacatagattgcatttaaaataaactgcatttaaacctaacttattatcatacataaaagagagagaatagaactagttttaataatgaacttgaaacagaaaagcaagtgccccaggacttaacagcactaggttaaggctggccaataggaattgaaagaaattacatgtatagttttaaattttctaggatccacactaaaaagagtaaaaaactaaacaggtaaactggttttaatatgtttcatttaattcaatataccccaaacactataatttcaatataatcaatataaaagccattaatgagatattttatatttctttttatgctaagacttaaaatttgggatgtattttatatttgaagcccatcttaatctaccctggccacattttaagtgctcaatagccacatggctggtggccagatatcagacagtgcagttctaggtagataatgagcaagttgagagcagaagtgtctttattcattaatttaatacatatgtctttaaagcctattgtgaccatatactgtgctggaccctggacatactgtctagaacctttgtttttgtttcttagtctgacatttagtaagtgcagtgttcaataaatgttgaatgaattattgaataaacgaacatctattaaccccatagaaaatcttgaaatgtggacaacaacgtgatttattgagtaaagtatgaaatatggagacagacttgggtttgaatcctggctaggtgttcttaggaaaaacacttgatatctcttatatctgccttgtaaaagaagtgttccactgcaacctgaagcaagtaggatccaatgaatacgaacacattaaagtaccaaatgccacacagtgtggacatcatcgttcaggaaacatttgtcttccctttcttctctaaatgtttttttcaaaaatcttgcctgaaaagagatcacctgaatcttcagatagctctgacaagcggtgacattttccttttgaaaatttcacttcataaggtaattttcaaatgtatatgttgttggacccttgtatccaactttcaatttcagatagaattgtttttcagcaacattaacaggtcaaaagttgtcatgtgcaaaattctctgctaaaattatgtacccaaagttcttttgttgtcgtttgtttgtttgtttgtttgagacaagtctcaccctctgtcacccaggctggagtgcagtgacgtgatctaggctcayggcaacctctgcctcctggattcaagagattctcctgcctcagtctcccaagtagctgggattacaggtgcctgccaccacgcatggctaatttttgtatttttagtagagatgaggtttcactatgttggccaggctggtctcaaactcctgacttcaggtgatctgcctgcctcaacttcccaaagtgctgagattacaggcgtgagccaccatgcccggcccaaagttttgatatacaattaattggtgggtgaaacttctctgaacttgaaaacttccccagattgacctccaacatggtatttggtcaagaggtaacaagcaaacatgctaactgacaactagctgaagaataatcccagtcttgaaaccaaactttgttttaatcatcagcctgatcatgcactttggggatgatctgttctttttaatcaattcactattccactcaattaaacacaagcataatgagtccctacgacgtgctctttagggcttatatatactgaaccctgctggttaaagcctcattccatttttgtcttttgtgttttaaaatgaatgagttctactcccatgctgaagtgcttttaacaaatcactaaattttggaattcagtttcattatctataaatggaagatgtgagattaaaataattttctccattcctggcattgaaagttctaaaaaccaaaggggagagttcttttatttgtttcatrcatgtaggtaatttgatggtgaatggaagaggctagttaaccagacatactgcaggagtggttattttatggcttttataggatgaaaataactttaaaaataataaaaagaaaagaaaagggaagaaaataaaggaaaataaaatatttagtaatctgtgccaaaatcatgcaaaatactttacactcattacctcattatatcaatgctcacaatgatggagataaatactattattaccattttgctgataaggaaaccctagctgagagaaattaagcaactcacttaagatcacacagctaatatatggaaaagtagatatcagctcagttctatcaatgccagagattaaagggataaaggtagcataataaatttaaaagtagaaagtgagcccaagttttatatgtttaattatttaaatgaagagaggagaaacctttctgaacgcttttggacaagagacctgctattgagtacatcaggctgcaaaaattctgagttgattagatttcttcttattccaccttccttaattagagaagcagagagctgggaagcccacacttctgcctgtaaaatctgcatgcagtcattctttctaactcttaagtaactgcttagctattgcttagcgattagcccaggacacaagacctaagaaaatcagtcatcttcttctaatgagaaagtacaagtagtccatttgtaagttgattggaaccattttgtcttttaaccagtgctatgtatactagttagcttccttacttaatcctcaataggctattgagttcctaatagaagtatagactcgaagggcattttgttatgaatattcttcctaatctaaaatgcatttagagttgccactccctatcactcagccccctcycagccctaaggtggagacagaaaattcaaatgcttacagtaggttaccaagaagtaatgagtgaaagaaagggctcaggagcatgaggctgtgctgaaataatgagtatacactcagtctaaaggggttggcctctactcgtccccagtcaattattgctgtgcatgaatgcaggcctagtgttgacagacattcacatttctcaaaagaactaagaaatatggatttcaatgtaaaagcctgtttgttttgaaatgtagagagctgaatcaatttaaagcaaaattaaagcaaaaacacaatcccatcacttatgacaatacataatgccaagaatcactagttttgcaatttctgctctagggtcaagttttgaaaagacaaggctcaacaaggtggatttttgttaaagatgtctataagatctagaggacgttattttggtgagaatcaggtattgcaactatctagtaaaatacaggaagggaacttgatttagggaagtgggttcctcccagctttctttcctgtagtgatttatcttgaattaggaggtgaattgaagtggattagagaaacacagaggagatcagctgtttccccttatctcctctgctgcttgcaagcaatgttagggtaggggtcaggagagaggaagggggaccttgcaaaggattattcatgtgtatgttagacctagttaaatctgtagctgtgtatacccagaaagtccctttcatgagaaaattaactaggcttggtgatttctgcaagatagaaatgttagatttgatgctttttaagaaatgctcccatcactaaaaaacaaagtcaaatttactctgaattgcgttgatcgctttgtcttaagtataagcaacttgaagagatttgagttttcaaaatcactttgacatttttatgaaattatatatggcgttccaatataaaagtgaaacatccttagagagtttcactttggtgctttgaatcagcctagtgactgtgtactgcaaatgatctctcttcctgtcctcctcttttttcactctaatgtcttcctctcattattttattccagctattggtctagtcagatcattgtgtcaaaggagaattatctatgttgctttaaatttttcttagctagcaatatgatgtttaaagtttgcattatgcttgcaaaagggcaaatgttcttcaaataaatttaaaaataaaacagaagcactgctggtgctagagattcaatcacaatcagaagaaatatactctacctctttgaatcctagcatttaggaggagctaaataaaagtaaatggcaattgtgtatggttgtaattactgggtcytatgggaacttatatgcagattgaattagtttaggattaaacattccaattttgagaagtgggcttctaaactatgaactaaagagaatttgggggttaaaagttgaattaggaaaaggagatgagaatagagggaaagtttagagacagaaggactggcaacgtttagactgaggaatgagtatagatttctatctgtaaataaatatttgtttctcttgtagacacccagaagcggatttactgagtcatatggcacatgcattcccactaacaatgtataagaattccagttgctccacacccttgccaatatttcgtattgataatttttgtgtgtgttctgttttccatttttaatatgtatgtaatattatctcataatgcttcaacttgcatttccctaattacaaatgatatcaatgatcttttttgagatatctattatcgagatataagtcatgttttatacaattcactcatttcgattgtttccaatattccacagagttgtgcaactatcactacaatcaattttaaaacattttttctatctccctgaaactaggtaactattaatctactattaatctatcaaactattaatctactttcaagccctactttctatctctacacattttcttattctggacattaaatataaaggaaccatacaatatgtggtctttatgacttgtttttcacttggcataatgttttcaaggttcacctatgtgtagcatgcatcagtacttcattccggcttatgcccagttctgatgtatactgttgtgtactgcatttcattctctgttcatatgttggtgaacatctgggtcatttctgcttttttgggtgttatgaataattctgatgaacatgtatatgcaagtttgtgtgtagatatactgtttcatttctcttgggtatatatgtaggagtggcatttctgggtttcggtcatatgataactctatgtttaacagttagagaaaccattaagctgtttttcagtggtgccaggctctaccattttacattctcatctgcagtgtatgaaggcttcaattctctacatgccaacagttgttactatttgcctttgattatagccatcatcgtgggggtgaagtggcttttctctatattttcctgttggctaatgatgttgaatagcttgtcatgtgcttattgttcatctgtatacctttttaatagaaatatctatttggatcctttgcccatttttatgaattcttgatgtaacccccttatcagatatatgattcgcaaaatttttcttccatgctgtgggttctcttttcccttttttgatggtattctctgaagcatgaaggttttacattttgattaaatgcagcttatctatttttttcttttgtcatttgtgcatttggtttcatttataagaagtcattgcctaatccaagttcataaagatttatttttatattttcttccatgagttttatacttttagctctcacacttaggtgtttgatctattttcagttattttttgtacatggtgttaggtaagagtccaatttcattcttttgcatgtagattcccatttattccagctcatttcttgaaaagacaattatttttcaattacattgctataaataaatcaactataaatgtgagggtttatttcaagattcaattctattccactgatctatatgtcaacctttatgccagtaccactctatcttgattactttatctttgtagtaagatttaaaaccagaaagtatgaatcctccagtatcgttcttctttccattaaggttgtttggcttttataggtcccttgtatttctatatgaatcttaggataaacttgtaatttattcaatgacaatctgaaatcttgatagggattgcattgaatctgtagatcagtttgggagtatttccatcttaacaatattatgtcttctgatccatgaacacgagttgtctttctacttatttagatctcctttaatttttttcaacaatgttttgtagttttcagtctgcacttatttcattaaatttattcagtaaattttattatcaataaattttattctatttgatgctattgtaaatggaattatttcttaattycattttcagatttttttattgcagtgtattgaaatataatttgttatttgtgtgtgtgtgtatatatatatwtwttttcttttttttttgagatggagtttcattctttttgccgaggctagagtgcaatggtgcaatctcggctcactgaaacttctgcctcccaggttcaagcgattctcctgcctcagcctcccgagtagctgggattacgggtgcccaccaccacgcctggctaattttgtgtttttcgtagagacagggtttcaccatgttggccagactggttttgaactcctgacctcaggtgacctgcccacttcagcctcccaaagtgctgggattacaggtatgagtcaccgtgcctggcctgttatttgtatattaattttgaatcttgcaaccttgctgaactttttagctctaattgttgctgtgtgaatgtgtgttccatgaaagggctgtatatacaaagcatcctccaaaggctaacagtgaagaaagcaaagagtgaggcagacaaatctagattataggaaaatagtgatttattgggagaacttacaaatggaagcatgtcttacacagctgcaagataggtagatctctgcaccacaacccccttagtccaggcttgaattggggaaaaagtatatgtgctccagaaggaatgagtaggtagctatgggcctcatagcctatgatgtatgcaacaccatcaagggttgttttggaggaaagggaaaacttacagtgaacaggtatttctatataaaaagtaatacatcagctagacatcttggaggcattcctagacttagggttagtcaggagtcacatggcagattagcatttaaatagagtcactcttgttcatacagtgtgtgtgtgtgtgcgtgtgtgtgtgtgtcttccttaggattttctatatacaagatcatgtcatctgagaatatagctatacttcttcctttctgaagtggatatcttttattttattttcaagccctattttcttattttgtattgtttaaaagttgtttatgtatttagaatgcaagttttttattatttatgggatttataaatatgttctctatttctatggcttgtttttctratctcttcagagtatcttgtccatggcagaacatttaatttcaatgaaatcaaacttattaaatttactatatatggattatgcttttatgacttagataagaaacttttgcctaatccagaattatgaagactttcttctatgtttctctggaagtctgataattttagggtttgcattaattattgtatattagttaattagtggtgtgaaataaagggtcaaagtttacttatttattacatatggatgtctaattgtttcagcgttatttgctgaaaagattatcatttgtctattaaatcatgtttgtacctttgtgaaatatctattggcctatatgtgtgggtatgtctctggtctctgtgttctgtttcattgatctatgtgtctaccgtttattcaagattgtctttaaaactgtaactttatagtaagttatgaaatcaggtgttgtcagtcctctttctttttctttaagaaaattggtttggctactctatttctttagcttttccatgtaaattttagtataagcctatcagtacctacacaactattgttaagattaagatagaaatcatattgaatcgttatattagtttaaaaaggattgagatcttaacagtattgagttctccaatccacaaacatggtatatctctccaattattcaggcctcctttgattttttaaatcaatgttttgcagtttttagcattcaaacatttttaattgccaaaaaatttgccacctatttttatactacataaatccattgtaagctttttaacttattttgttagtttatgggtttttcttttttgtgtgtagtacacttaaaagaaattttaggaaagttgcccattaaattaactgatttgatgtataaactaatttaagtaagaaatgtgatgctgcttttaaaatcaaaacttgttagaaccttggaaggcagtatagtctaatgtagtaggaaagagcatagagtgaaacaaatactgatttcaataccatgtgaatctgagcaacttagcccatcattctctcattaggaagatgaagacaatgtctatggacagcacacctattcatttattgggacaatccaatgaggtagtacaaataatattacaataaatataaacctaaaaagtcctaggttgggaaaaagaaataaaactgtcttcgtttgtagatgacatgattgtctatgtcaaaaatccaaagcattgactaaaaaactctttctggaactaataaatgattgtagaaaggttgcagaatatatgattaatatacaaaagtcaattgctttcctatatactagcaacaaacaagtggacaagtggaaattttttttttcaagatagtctcactctgtcacccaggttgcagtgcagtggcacaatctaggctcactgcaacctctgcctcccgggttcaagcgattcttctgcctcagccttctgagtaggtgggattacaggcatgcaccaccatgcctggctaatttttgtatttttagcagagacggggtttcaccatattggccaggctggtcttgaactcctgaccttgtgatccgcccgccttggcctcccaaagtgctgggattatagacatgagccaccacgcccagcctggaattttaaattaaaaacatattatcatttacaccttaacaccctcaaaaatgaaatacttaggtataaatttaaattgaggaaaactacaaacctctgatgaaagatattttaaaagtctaaataaatggagatactccatatttgtggacaggaaaactcagtattgtcaaacatgtcacttcttcacaactttatagattcaatgcaatctcaatacaaatcctagcaagttattttgtggacattgacaaattacttctaaagtttatataaacaggtaaaagacacagaatagccaactcaatattgaaagagaagtacaacattggaggactgacattacctgccttcaggccttattgtaaagctrtaatgattgaaccagtatggtatttgaacaaaaaaggtaaatagataaatagtatagaatagagagcatagaaatagacccacataaagacagtcaaccaacatttgacaaaggagcaaaagcattacaatggagaaaagatagtttttcagaaatgatgctgaaacaactggacatccaaatgtggaaaaatgaatctttacacatccccagcaccctgctcaaaaattaactcaaaatgggtcatagacttaaatgtaaactgcaaaaccataacacttttagaagataacataggagaaaatctagatgattttgagaatggcaacaactttttagatacaacatcaaagtcatgatcaatgaaggaaacaattgatatgctggatttcattaaaataaaaacaatctgttctgcaaaagataatatgaagagaataagaaaacaaagccacacacatgaataatatatttgaaatacatagattccataaaagactattatcatccaaaatgtacaaagtactcttaaaactcaacaataagaaaacaaccaaactgaaaaatgaactgaaggcctaaacaaatctctaaccaaagaagatatacggatgtccaataagcatatgaaaagatgttcaacatcatatatcattggggaattgccaactaaaacaacaagatactattacacatctaataaaatggccaaaatccaagatactggcaataccaagtgttggtgaggatgccgagcaagaagcattgtcattcattgctggtgggaatgcaattgctggtggtacagccactttggaagacagtttggcagtttcttacaaaactaaacatactgttaccataagacccagcaatcacactccttgatatttacccaagggatttgaaaacttatgtccacactagaacctccacatggatgttcatagaagctttattcataattgccaaaacatgaaagcaatcaagatgtccttcagtaggtgaakgaataaataaaccggggtatatccagacaatgggaatattactcaacacaaaaaaatgagctaccaagccatgaaaagacatggaagaaactgaaatgcatagttactaagtgaaaaaagccaatctgaaaggatacatcctatctgattccacaatatgacatttggaaaagacaaagctatgtggacagtaaaagattagtggttgccaggggatagtgaagagggagaggtgaggaggtagagcacagaagatttttagggcagtgaaactgttttgtaggatactgcaacggtggatacatgttattattgtcaatccgcatgcaatgtacaacaccaggagaatatctttctttctttctttccttttcttttttttttttttttttttttttttgagttggagtttccctgtgttgcccaggctggagtgcagcggcacaatcttggctcactgcaacctctgcctcccgggttcaagtgattctcctgtctcagcctcccaagtagctgggactacaggtgacagctgggactacatggtgactacctgccaacatggctggctaattttgtatttttttttttttggaagagatggggtttcactatgttggccaggtagtcttgaactcctgatctcaggtgatccgcccgccttggcctcccaaagtgctgggattacaggtgtgagccaccgtgcccaacctaggagaaaatctttatgtaaactatggactttgggtgataatgaagtgtcagtgttcatcgattgtaacaaatgcaccgctgtggtgcaggatatagacagaggggtatattgtctgtgtgtgaggacaggggtgtatgggaactctctgtactttctgcttaatttttgagcacctaaaattgctctaaaaataaactgaattaattaattattttattaattgttaattggtttattcatttaacaaatctcaggtaaaatgaacatctggtgggataaaagaaatgctgagacaatgtcccatttaaaaatgtcttttattcatgaaaattttaatttatctctgatcaacagttaaataatatgatttaagcatttttgtttaaacatagaaactccaggatattaattatataggagctgcagtacatctgtcagctataaaatatacctaggaaagcagccacaagaggacagtcacactcaaattagcagatttatctgatttcaaaaatggaacaatttttaactacattggcaaggagcagaacagaaacatgaaagcagtagtataatttttaaaaaaggtaaccttgaagtcagtgaaaatgtctgcggaattgctttttcaacacagagacacacaaatggatctcacatttttgttttcagaactttgaaggttattaatctccagattcgaacgttttttgtaatcaaactttttcaatttccaaagcccctttgcagttagattccctcgtataggtttggcatgagatggtgctgatacctttgatgccagagtcgatgagctctgtggtaaggactgacagcaggaagcacagacaccagctttctttaagaaatggactgtcactgtcaattctgctgtgtagagaagtctggactcttgtcagtatgaatctcccatttgacctatgagttggtgccagtggagaaaaaaatcccctcactgtggacgtaattgtattatttttatgattgttataaaccttttttagaaagcaagaggaagataaatgaggaaaagcatagggatcacccaggatttatctatttctttgcttgtttctaggataccttccttcctaagaactggagcagaacagcccacaccagagtagttattcatcacaggcccaggtgactctgcttttggagtcctgttttctaaatcccccagtatatgaaaaccacattyccatgaccaacccacatgtaatttctggaatttgtggtcagtcttagacattttctgcggggagctaagaaagattagatctgagttatgactggaaggtagctaagtgacgtgcataggtcagttttccataattcaatttatgttcagaaaattcacagctataaagctacctgctgcattaaaacaggattgtagtgatgcagtgagagtgtgacctgcaggcagttttaccggagctagacaggtctcaagatttccatggttgtgatcattatttaaaggcagacttcctactcacaagtgtggctgctattaaccatttagtcttgaagaatttcaaatttatttattattttcctaagagtaggaaggagttattttgaccttgttaacagactgagtgccttttctatccaagatatgaacacacagtaaaaaattaaaaagcattaaggcccgagacaatatatactttctaagcttgtaagcaacatttaagtgaaataaagtcaaaacatttgaattaggttctattcctggctctgtcacttgactttggctattatgcctttgtataaaatacatttcaccagcattttatttctgttatgcttttaatctccattatattgatgaaaagacttttttttttctcttggaaaacatcttgacattactgactaaaaatctataaagtatgccatgaataatccctactaattactaatcgcagttccatgacactgcattcctttgtgcacatgtgtgtgcacgcacacacacacacacacacacacactgcatccatttttggcaacatagaaaaggaatatttttaaagttgtgagtgcagacattttaggattgactcttattgggagaaaaatagttgtgcaaaatttgatacttatggggagtcaagggactctcaccttcatctctctctctctctaccacaatttttgtgtagagagacatagaaggtatccacttatagttacctattgtagtgagtgaacctctttgtgattccatttcctcaaatgcagaatggggacaataccactttacagagtagttgtgaagataaaatgacatagctaatgtgtgaggacttagaaaaggaaaaaaaatgctatgcaaataatacttgtagtaatattaatagctatcctgtgtaaatgcttttgcatgccagactatgttacaggctttatctcagttagatattatttgccaaattttatagaatgttaagaatggtgaatcagctttttgacatcacactgttagaagatagtagagctagaatttgtacctaggtctaaactaggtctaaatggattcaaagtccataatcttttgttttctattatacctttcataaaatatttgtctttgtcttcactaataatttttaccttgaaatttgttttcctaatattatctagtattatttrttagcatttgctcccaatggcaaaaccractttgttacgtctgattggaccgaagacagccagagagatggaaaagcttaacagaccttctagtttgcatttctttttcatttggcaaacaagaaaattaaggaacatgccgatggcatatagttagttggtggaaggttaactgactaccagatatctcaattgtaaataccattaatatgacttattatctaatgccttatcatggataatattgtgtgtcttttcttcccagctatgttatcagcacttaaaataatggctgtctgtgggccgggcgctgtggctcacgcctgtaatcccagcactttgggaggccaaggcaggcggatcacgaggtcaggagatcgagaccatcctggctaacacagtgaaactccatctctactaaaaatacaaaaaaaaaaaaaaaaatagcgaggtgtggtgatgtgcgcctgtagtcccagctactcaggaggctgaggcaggagaatggtgtaaacccaggaggtggagcttgcagtgagccgagatcacaccactgcactccagcctgggcgacacagtgagactctgtctcaaaaaaaaaaaaaaaaaaaaggctgtctgcattatataccattagatcctccatgtatgggacatatagtagccattctacaattaattaaatgatttaataaatgcagacacttatggagcacatcctttgtcagcaggcctggcttttaagggatggtgagcagaaactttagtcctttagatattctgcacaccttgacaatgtatttttaaatggtagagttaataccagcagataagcttgttctttggtgtgatttttaccaagtttactgtttgaccttggccaatcacagaataactaaatatgaggtaatctggactttttacatcaagttttaaaatatttagaacctatgtggttacttctgcatatgccaaacttgaacaggcattacacttgaagctaacaaataagatgttaacatgatgcagtgtaaagagagctccagaccttgtttgactgaaaactaagaatgtgatgacagcatggtggatgagagctgagaagcgctgggggtggagctggctgtgaacaggtgactgagtttgtgccaatccatataaaataatgaacccacggtcttgaattgtgactcttagcttttaaagagcttttgtgttagtgkagttaaaacaatttagcaccttgaaatcaagtaagatatttcaaaggtcattaaacaatcatttttgggtgctgacttctgaaatattttattacaatttattcctcaacataaaaaccctagaactcctaaagatatagtgattatacctcagattcaggagtttcatttattcatacacaaaagaggcttaattacactgattatttttctctatgccatttggtaagcattttattttaggggtatggattagacaataatccttataaaacagtatttgagattttaaactaagcaaattagccaattatataataacattatcctgaaataaagtcaaatatttaaaatataaatgcaaggcaaacaacttttctctactaacctctaagaagccagtgatcattagatactrtctagaaataggtgatatggagcactggaaatagagttgtcctgaatcacaagacaggacaaccccaatgtcctaaccccaatgctctcattaactagttgagtgatcttgacaaaatgttaaccttttcattaaaaatatggaagttgatgatctataaggtgcttctaacactaaaacaaaaacaaaacttaattctttgatccaaattagaatgtcatgtgcaaaagacatagagtccttaattatttgaagaaacagtatttttggccaattcaaaggaataaaaactatactaagaagagctaaatagacaagcaaaccttaacaaattgatcatatcagttcttggtgcatgaagattatttgtaaaacctaaaaagtgatccaaagtttcctttttcagcatggattcggatcattttagaagctcataggtctgagagcgtgcatttgctctgtcatagtagtcagtttcttgcagactaaagccctgccacctgcagtttacattcattcttccctctttctgcttttcctcctcttcctccttctttcctttttttttttttttttttttgagatggaatctcactgtgtcaccaggctggagtgcagtggcactatctcagctcactgcaacctctgattccctggttcaagtgattctcctgcctcagcctcccaagtagctgggaccacaggcacacgccactgtgcccagctaatttttgtatttttggcagagaygggatttcaccatgttgaccaggatggtctccatctcttgacctagtgatccacccgccttggccttccaaagtgctgggattacagtcatgagccaccacacccgacctcctcctccttctttctatggatctcatttctactctttctgaatgcattcttcctatacagttttcccctttatgaataactagaagtacctcacaccagacatgttacaatccaattaggtggattatagttttccttaaagcagaaataggcaagtcaggtctgttcaagaatatactctagtatctccccaaaatggstttagagtatctcagataaacccagataaagtctcatattttcagaaaatatttgcaatatctcatattaagggttaatttacatataagtaaatgtctatatctaggtaaaaagtcatatgctgatgactttattaattttatttgcagagggtaaatttgtacgatcttttcctctaattctaagggtttttcctctttagagattaggtactattctgtatctacatggatacaatgatgcctgttcaccttttagatgtctgaaagaatattacaagtttatccctgtaaaatacatgtatcttacatgtctattataatcagccagtggggaggtgtttggggtcagccagtcatgttggtgctcctgtgatcataccaagaaggtaaatgcattctcggtttgtgtgttggaaaatcttggatcttatgtccaatacataatttaaatgtataccactttactccatatcaatgaaaataagttagagctttggtctttcaggttgttattcaaaaaaaatcatgtataaacggtagaaaaccaggggcagaggaaatgatgtaaaatataaacctactatctgagcagtatagttaaaaggtaagatgtttacatattaaaatattccatcaccagagatactgactcatgagcaggtaaaaatgtcaaacaaataaacagaaattgagaacaccagaagaggacgctttgtcttgataattagatatcttcctaatgtatgagagaatcctggtgtattgggtgaaattcacccccgatatttcacataagttcttttctgtattccctaagtgtcagccrgtctgagaaataaagggacagagtacaaaagagataaattttaaagctgggtgtccgggggagacatcmtgtcggcaggttctgtgatgccccctgagccgtaaaaccagcaagtttttattagtgattttcaaaaggggagggagtgtatgaatagggtatgggtcacagagatcacatgcttcacaaggtaataagatatcacaaggcaaatggaggcagggcaagatcacaggaccacaggacctgggcgaaattaaaattgataatgaagtttcgggcatgcattgtcattgataacatcttatcaggagacagggtttgagagcagacaactggtctgaccaaaatttattaggcgggaatttcctgatcctaataagcctgggagcgctatgggagaccagggcttatttcatcccacagctacgaccataaaagacagccatccccaaagcggccatttcagaggcttcccctcagggacacattgtctttctcagggacgttccttgctgagaaaaagaattcagcgatatttctcccatttgcttttgaaagaggagaaatatgcctctgttccgcctggctcaccggcagtcagagtttgaggttctctctcttgttccctgaacattgctgttatcctgttcttttttcaaggtgcccagatttcatattgttcaaacacacatgctctacaaacaatttgtgcagttaacacaatcatcacagggtcctgaggcgacatacatcctcctcagcttaygaagatgacgggattaagagactaaagtaaagacaggcataggaaatcacaagggtattgaytggggaagtgataagtgcccatgaaatcttcacaatttatgttcagagattgcagtaaggacaggtgtaagaaattataaaagtrttaatttggggaactaataaatgtccatgaaatcttcacaatttatgttcttctgccatggcttcagccagtccctccattcggggtccctgacttcccgcaatgctagtgaatgtgcagtagaacccagcaaaggccaaacactcatccaacctgttgtagaggaggaatccatgcattgtgtagtgaattgtattagtttatcctgaaggtctcttcmgctctgaaaatctgaatttgtgttttcccagccgtcagtttagatgacttgtaaattgaaattacccatctyggcccagccttatataaattgctctgtgaggcctcccctcactcttgctggtatcagacgttttcttccatggtactcacaaagtactttggtaatgtctttagactttgtattttgacttacctgccccctatgcaatgatacatctgtgttttcctggccttgggaatttgcttgtatcatctcttcccttccacctagccattgatccactatcataacccagaaaaagccttctttactttcagttcaagtgccagaagacttcctttatctgcaccagaaggcattgctttcacttctgaaatctactaagatatcatttaaaaaatctaatcataatttatctttgattatagcagtagcctccaaacctaatatgcataagaatcacctaaaggattttataaaatagtgtatttggaatggttgtttaaacaaaaattctgtttcactaggtgattccatgaatctgcatttccaacaaatccacaagtgatacctatgatgttcatggaccacgcttttagaacagtggcacagtctagattgtaagcttttcaaagttcaaggcaagattgcttttcctctccatattatgtatcagcttcaaagagatatttcagcttcaaaatcccttgctctaggaagtgttctatgaatgaagggttaaacaaggtcaagtggaatttaatcatacttatcttctaactcatgaaactaccatagtgataattttgtaatggcagaaagagaggcaagtcaattgcaaaaggagcttctgtttgtgtctgtgagaataataatacatttgaaaaagaaacagcattttcacacagagaaaagcaaactgtagaaagcaaaagagaaatgaacagagcttattttattccacttaaatggaactgccatgtgctggaaaatctaaatttgttaattccaaagagaattaggaaaaagggactaattcaatgcatgaaagaaaaataatttgacaaaattgaatattacagtgtaatcacataaaggtagtctgaaaatgtctgtctgtggagttgaaacataaaatcttctaaacctagggagcataaaccccagagcctcacagatgctgtgccagtgtgggacttctgtgtttattatattttgcatcgtcattcagaaactgttcttacaatagccccagcctaatttctttcattattaaagtacatggtggtattcttgctgattgagtaaagtctcaccatgtctggtcactcttagggaaacaactttcaagatattaacaggactaaaacattaataccattttctttttaataaagtcccccrctcttgtttaataactcaaagcaacaaagagaaagagaaacacagtgacccacaattctgcactcaagacatgattccccaaatgatctgaatctggccagccaggaacaaacacctttcctactccattcccacgttatcttgcacgtgcttaatgttgtctcaggagggctttgttcttcatgttttaatacacacagccagaaattagaatttttctttgtataaactttagcaagtctctcagatatatatgtatacacatatgtatatattttatgtatatgtttgtgtctacacacacacacacaaacacacaamtgtactttccccaatcagacttagctcaatttttgtattaggaaatttttatttaatcccccactaaaaacaagtttattccagatataatggccagtacgttacaaattagtcttaacaatgtacytttaatggttctattagacaatgaaacacatttcatttccaactagcttttaaatagctatctatatataagataatcttaaaaagaaatctaatagtaaaatgcataaataatgtaaataaatatatataaacataacatattttaactaaatcactagctgtggatgcttaattcacctttccttacatgctcgtgggatagctgtgaaaatacacactgatataaagttaaaaaatatttcaatctgtgattgagctcccttggaagaattgctgtaagttagggattctgaaatttggtgcccagagcagcagcatcagcatcacctgggacttgttggaaatgcaaattatcaggatccaccacagtcctattaaattagacggtctgggagtgtgacagcaatctgttttgttttgtttttacaagtcctccaggtgattctgatggacactaaagtttgagaaccattgctctaaatacagtagagatggaatggatccagaagtgattagaatgggtgggagatgtctttcattcatccccactctggatcttttgttcagagatttataatctctgtatatatctagagaatttagtgataatcccaggtctatgggtgactgagatgactgaaatttattttgtatcctcctccacatccccctcacacatcactatctttcttcctctwttctggagattgcaacttccatacagcatgtttagaggtgaaaagggttgggaaaascacacaacacatttataaagcaaattataagtagaactgtaaaataccagtagtgcgggaaatagaagaaaataatttcaggctgcttaaaattatccagaaataaatacacctactttactgcaaggattagggaaacaggagatgatacaatctcacttaatctgggtttcattgacaagatcagaaaaggaatatctggatgtacacagggaaatagtgatggagattaaaaygaatacatacacttatttacatgaaacgtgtatatgggtaaagatccccttgttcaaatcgatgaagaccaaactctttctacagaaagagctaacataagaaaaatttgatgtcctaacattgcaaacagaagtaattattttagaaacatattttttctagaatgtatatttgctttttcaataaagaaccagaaaagacaaattcactacagaagagattaaagatgatacaaagttgtcatttgcagagatgcagcttgtgagcataaaaaatatgggatgagaaggaaaattagaaagaatacatcaaactgataaaagtattcattggaggtggtaaaaacagaatcagctaactatgaaatgcagtcagtgacttaaagaacaactttgaaaagtacattaagaatgcagatcaatcaaaaacataatagatatcaaggaaagaaaacaaagatgcaatttgtagatagctgacaatccttgggaattaagccaaaacaaactgaccaaaaagaataatcaaagtcataataaaacagctattatagaactaataagattttggctttgtaagtttaaaaggatcactatgtttcatggaaagctggtgaaaaagacctatgcctagaatatactgttagatttttaaaatgtcaataacaaagtcatatccttcagtgcagggaagagaaggatgttacttaaaagcacaaattttggccgggcgcgatggctcatgcctgtaatcccagcactttgggaggccaaggcgggcagatcacaaggtcacgagatcgagactatcctggccaacatggtgaaaccccatgtctactaaaaatacaaaaattagctaggtgtggtggcacatgcctgtaatcccagctactcaggagttgaggcaggagaatcacttgaaccaggcagtcagaggttgcggtgagccatgatcacaccagtgcactcgagcctggygacagagcgagactccatctcaaaaaaaaaaaaaagtacaacttttaagttagattcaaagtttgcaccataataaatgctagaagaagtcacttatatggagtctcacagggaaaaaaattgcatttcaatatttataaatgtagccatgttgtcatttctatgtgaagacattcttgaaattgtaaaggattcaaaacatatatcattgatgaatcatttttgaataatcctacttgaaaatatgctccaataaaatgaaaaatgagaatgcggcaactaagaactagagaattaaataacatatatacagtggtgtgggcatgattccagttcaacataaagatttttaaaaacttttgcaacactrgccacggaatattttgcaaatgttaaaaaaattcccagagaataaatatatgaaaagtttggccattaaacagtcataatcaacaactgtatcctcaaaatatcttgtcaaatactgaaaatttaagtgaactagaaataaaaaattattttacactagtgtgtgttgggggatgaaacatgcacaggccaatgtttttgtatttttcataaatttgttaatcagaggaaatggtttaagaatgcrcttaaaaatttaggaggatatgaatgttttggttttgtatcactgaagaaaattaaagcacacagtgcagagataaagtgaatcttaccagtcatcataatcaaggcacatagatttatatcccaaattaaattcaaatattcagattaagtttaaaacatttaaagtgttattaaaaatcaaatgtttttcaactatttaccaaaacagtaatgtgattttaaaatatcacattgtaagccatataagcaacctaaatctatttgaaaactcaaaaattgtaagaccacatctctctgaaaacactgcaagaatgctgtaaacgaataatacggattaaatgataaaagcacacagatagaaattttaaaatatatattgtaaatatatattaggtcaaataggaaataataactataatttcatacttttagaatgttttaacataaaattattaaatttttggcccatttacaaagctgtacacagtggcataattttagccttattattaataaacaggtaagatggagcataaagaaggggttcaatttatwatgatagaaagaataatgtaaaattgtattagttgcctgggyrcggcrgatcactcctgtaatctcagcacattgggaggccgaggcaggcagattgcctcagctcaggagttcgagaccagcctgggcaacatggtgaaacccagtctccactaaaattaaaaaaaaaaaaaattagccgggtgtggcggcgtgcgcctgtagtcccagctactygggaggctgaggcaggagaattgcttgaacccgggaggcggaagttgcagtgagtcaagatggcaccactgcactccagcctgggcgacagggcgagactcagtctaaaaaaaaaaaaagtattcgtcacttttcactaggtcttcctccatgacagtacagaatctcaatggctgtaataaatgtttgtttcccagcacgttgaataagagaggctgggtcgttgttgggcgctgtggctcaactgcactctgcaggttggactgatgtctgctttatgcatttttctatttctgggatgctgactgaaggatcagccgccaaatgggaagcatgttcccaaggcaagggtaagaacacaagacacgtggagagggacacatggaatgctccataaagcccctatttggatgtgacacaacttcttttctacctaaatgttattaaagcaactctcatggtcaggcctaggtcagtggagccaaggaatttactctgcccacagtgaaccatggcaagagtgagagctaaggaagaattgtgaagaaataacaatttcttctataatatcctcttcaattaaaaaagtagaagaaaatggaggaaagacaatgatggagataaaagcaagaatttatttattagaagaaaggtatcagaagagttgataasttaatcaactctggttatttcaaacaaaacaagactgacccatagtgaatcaaatagtaagagtaaatatatataaagttataaatgttataaattaaaatggaaatatattaagaataactttttaaaataaggaaatattatgtaaaattaaatcttagtatgtttgaaggtctcagaagccatttttctgagaaaatatacactacctaaattgagccagaaaataaaaacattcttaatgtaccattagtcrtgagtagtatcaaaatgttagttacctctaaataagaatttggtcccaaagtatttagggtttttaaaagaattattcctatgctatagaatttgttgtaagacatgcaaaagtatggaaagctaccaattgatttattttccccaaaaattctataattattaccttataaaaagcctgacaaagataacaaaaaggtaataattatagaattttttattatagatagcaaaattcaatattaaggtgaatcaagaaagcatttagaaaactttcactgttgcctagtctgttatacagaataacttactttaataatatataataaaaaatattrttttatcaataaaagataaaaaagatatttaatcaaaaaatgctgacaatattgaacatcttatctataaaacaaattcataagaactttttgcaaagctagccactgaatatattgcaaatgccttaaaaaagattccgtaatgtaataaaatttcttttttttttttttttgaaacagtcttcctttttttgagacagtgttgcccaggctggagtgcagtggcacagtctcagctcactgcaacctccacctctcgagttcaagagattctcctgcctcagcctcctgagtagctggaattacaggcgcctgccaccacgcccggctaattttttgtatttttagtagagacagagtttcaccatgttggccaggctggtctcgaactcctgaccttgtgatccacccgccttggcctcccagagcactgggattacaggtgtgagccaccatgcctggctgtaataaaattcataatgtaatgcacttttttacatttaaagtcagagttttatataactaatcatttctggctttaaatgtaaaaatagttctccaccagcaccaccaacaaaatacttttgagaaatttagaaataaaaaggtattttcttaacatgctgaaaaatatcaatattatattaacaactaatagttcagattcccattattattattattttatatagttctggaagtttggcttctgtgataagagtggaaataaggaagataattactggagaagaaaaacaacttaaaaggtgttgtttagattatatgtttagagagagagaagaaaagagagagaagwaaattaaccatttttggaatgagtaataaaattcaataagtaaaagaagtttctttaaaaagtcaatatttttttttaaggaatgatgagaattatgtggagctttgagacaaataccatggaaatttatcagaagtgaaaaataagaattgaataaaaaatattggttaacatcttgatataagaaatacatcacaattagttatataaaacttgtactttttggtaaaacatgtcataaataaaattaaaactaattatatctgggaaaatatttgcaataaatgtggccaatataaagttyatatttttaatatgtacagcactcttagaaattgttttttaaagattacctaatagttttatcatggtttattttacacacaataagccattgaaaagaaacctcaaagataggcaaaaaaatttaacaacatcttaatagaaaatagatgtaaagaagcttttcacaaatcaccatactttagttacaaatacagagaaaatcttaggcatgtaatcattttcctaactcattagaaaattatatatacatctgagtaagctgtggattatgtatatacctgagtgaggttaagtaagcattttttttagatggagtataatttgtttcaatcttttggaaaagccctttaacaatacaaattaaacaaataaaaaatatatacatatatatttgtgtgtgttcrtgtatacatatatactttaaaataaaaacatacatatttattctttgactcaacacttctcctaggaaagtgttatctgaaaagttgatcatcttaattataatctgcaatgaagaaaacaataagaaaaatcataatatgttataaattaaggaatatgcttccactaaatgttttatgaaaagtttgcattaamacttagcacaaatttaaaaaacaatataattacaacttttttttctactacacacaagagagwtaaagagatgaaattcgaaagaaaattttaaaaatgttagcagtttttgctttggcaaagaaagaagatatttgttttttcttcttttttttctaaattttctttaaagaacatatcttacttgaatataataaaggagaatatattttaaaaaggtatgacttgaccaggtgtggtggctgacacttgtaatcctagcactttgggaggctgaggcaggagggtcacttgagatcaggaattcaagaccagccwgttcaacatggtgaaacctcgtctctactaaaaatccaaaaatcagctgggcgcggtggctggtgcctgtaatcccagctactcaggaggctgaggcatgagaatcacttgaacctgggaggtggaggttgcagtgagctgagatcatgtcgctgcactccagcctgggtaacagaatgagaatctgtttctttaaaaaaaaaagaaaaggtatgactttgtttaggggataatgtttggctgtgtccccacccaaatcccatcttgaattgtattttccataatccccatgggtcatgggagggacccagtgggagttaattgaatcttgggggcagttacccccatgctcctgttctcgtaatagtgactgaattctcacgagatctgatggttttataaagagcttttccctctttgcttggtacttctccttcctgccaccacgtgaagaaggacctgtttgcttctccttccaccatcattgtaagttttctaggcctcctcagccatgctgaactgtgagtcgattaaacctcttttctttataaatgaaccagtctcgagaatgtcgttattaccagtgtgagaacagactaatcagggtacaaagccaagtggatggcttttccaaggagaacactctgtagtgctaaattagaaggaaattgttcctccttggctaaaactatctttatgtcaatttacagagagagagaggtctagatttttctctgttttgtttgcccacctccaagctcacagtaggctgctcagtgtatttcctgaataaatgaataaacacctagtctagctgactcaaatctgtaggatatgttgcatgggcaacctctccaagccctttactggcatagcaaaggaagagaataacctgggcaaattgagtcaattatttcccctaaagttaaatctagatgttacaaacagctgttatgaactttatttaaatttaatctggtagcagtgtttttgttactattagtttgagcataagagctaattttctgaacttttcaaatcactttgaagggaagattttctcttttttaccaaaaactgttacatttaaggtcatgtcctgtgaattctagccaggcaggaaagctcagagctcaggagctattcattagtattctttagtttggaatgtcatccggaaactccactttcctaatataaattaacctcaataaaccattgttggtagcaaagtgttaaatatgttcacttttccccctttcccatagcaaaagcatgtgcaatacaccatgataaagtgattggataattattgttttagctagggaaagtgaaatttatgttttactctgcttcagaaagctatgttaaaaatttctcatcaaaatgttttctcaatattcatataaatttgaagagttttgcaaaacaaaaatgtggttgtaggtccttagctattaacagctttgcagcagtttacagataaaatggaaatgagagacttacgtgccagagttatgcttaaatttccgaggaaagaaggaagtagrgaagacacaaaaagaaggaagggagggagggaaggagggaataaagaaaaagcatgccactgggaaagtcacccatattggctgaagtttgctttgacttaaatgtgctaattgaactaagccaaaatgtcttgtctcccaattcattagcaatattgtaattaaaagagcacctccagttctagagggtaatgacctttttaattgaacttggggattcagattgctgttgaatartagtgaatttaaatgctcaattcaaatgccaaattttcttctggtaaatgtacaattaggaatcaaatrtgaattcccctagcaatttgctcctgtttttatatatggccttccttggatttcagaggaagactgaatctattgaacaatttattgtgtatttggcccttgactgatccacaataattatccaaaagaaatgttgtcacataattggaaaatacttaaattttataaaatattaccttaaaacaatcactttgtactttcctagggcttcttgttatctctatgattagataaacatgcatttttgcatagttttagtcagagtagtttttagggtcaaatgctaaactactgaaacaaataaagtaagattcaatagctcagacaagatagaagtgtatttttctcacataacarttgcaaatgagtattctgggttagcagtgccttccttccacatagtcactcaaggtcttattctggtagtgcctctgccttattcaccatgtgatataaaagatcactctggtttttattattccagctcataggaagagatcaggggaatgtgaaaagacaggactggtctttttttaaattttaagttcaggggtacatgtgcaaaatgtataggtttgttacatagataaacatgtgtcatggtagtttgctgcacagatcatctcatcatctaggtagtaagcccagaatccattaactgttcttcttgatgcactccctgtccccaccccatgccgacaggctccagtgtgtgttgttccctccaacaatgtgtccatgtgttctcatcattcagctcccacttataagtgagaacatgcagtgtttagttttctattccttcgttagtttgctgagcataatggctttcaactccatccatgtccctgcaaatgacatgatctcattcctttttatggctgcatagtattccatggtgtatgtgtatcacattttctttatccagtctatcattaacaggcatttaggttgattccatgtctttgttattgtgactcatgctgcaatgaatatatgaatacatgtatctttataatagaatgatcttttttttttttttttcagacagagtatcgctctgtcacccaggctggagtgcagtggcacaatctcggcttactgcaagctctgcctcctgggttcacgccattcacctgcctcagcctccccagtagctgggactacaggcacctgccaccacgcctggctaattttttttgtatttttagtagagacagggtttcaccgcattagccaggatggtctcgatctcctgacctcgtgatccgcccgcctcagcctcccaaagtgctgggattacaggcatgagccaccacgcctggcctataatagaatgattttaaaattttttaaatttccttaggttttgggggaacacatggtgtttggttacatgagtaagttcttttgtggtgtttttgtgagatgttggtgcactcatcacccaagcaatatacactgtatccaatttgtagtcttttatccctcgcccccttccaccctttcccctgagtccccaaagttcactgtataattcttatgcctttgcatcctcatagcttagctcccrcttataagtgagaacatacaatgtttggttttccattcctgagttacttcacttagaataatgatctccaattccatccacattgctgtgaacataatagaataatttatatttctttgggtatatacccagtaatgggattgctgggtcaaatggcatttctgcctctagatctttgaggaattgccacactgtcttccgcaattgttgaactaatttgcactctcacctgcagtgtaaaaatattcctttttctccgtaacctcgccagcatctgttgttttttgactttttaatagctattctgactggcatgagatggtatttctttgtggttttgatttgcatttctctaatgatcagtgatgttgagctgtttttcatatgtttgttggctccatgtatgtcttcttttgacaaatgtctgttcatgtccactttttatagcactggtacaagaacagacmtgtaaaccaatggaacagaatagataactcagaaataagaccacacacttacaaccatctaatcttagacaaacttgacaaaaacaagtaatggggaaaggactccttatttaataaatcatgctgagagtgctggctagtcataggcagaaaattgaagctggacaccttccttataccatatacaaaaattaactcaagatctattaaaaacttaaataaggctggatgccatggctcatgcctgtaatcttagcattttgggaggcccaggtgggcagatcacttgaggtcaggagttcgagatcagcctggcaaacatggtgaaaccctgtctctactaaaaatacaaaaattagctgggcatggttgcacacacctataattccagctattcgagagccagaggcacaagaatcacttaacgcgggaaacagaagttgcaatgacagaggttgcaccactgcactccagcctgggtgacggagtgagactctgccaaaaataaaaataaaaataaaaaaggrcttaaatgaaaaacccaaaactgtaatataaaaacgctagaagaaaattaggcaataccattcaggacataggcayggggcaaagatttcatgatgaaaacacccaaagcaattgcattaaaagcaaaaattgacaaatgagatctaagtaaaccgaagagcttctacacagcaaaataaactatcatcagagtaaacagataacctatagaatgggagaaagtttttacaatctatccatctgacaaaggtctaatatccagagtgtacagggaacttaaatgtacaagaaaaatacagggctggtcttacaggtatcagtgtcacacattatttctgcttaccttctcctgaaattagccacatgattccttccaactacargctagactgggaaatgtagtgtttctggtagccacttgcaaaagctacacatctgttactagtaatgaaggaaaaactrgattttatggatagctaaggactttgttaatatgtatgtgcaatattgtcttctttctcatgtaacattatttcataaacaatacgcccttcatttagtgagggatatgatgtaagcgtcctactacttttaattccaaaatttcgtcacattaataaagttttawattaaaaatgtggctttttataccctaaataaatccacaaacatctcctttatcacatttgaattaaaacctttacatttgtgtataaaaccttacaccataatctactaaattttattaaaaatattccctattacttgatgtgcatttgttcctagacaactgggctattggtttsacaaattattttctaacgtactgtaaatttttctgatatacagtggatgagttcacaacattagttaaagctactgctgaattcaacattccactcattaatttactaaaacttctgtttttagctgtgtgctacttctctattagatttatcctaccagttgaatttttaaaggaataacttctccaaaagaaatattgctttaattattaatatcaaagaatgggacaactgggttattgtatatgatcattatcatagtatcctctgaaagtgtataactaacctatacatctggcaaagaaagatgttcttgtttaatgaaatatgatctgcattgagttttaccaatattatttattttttccccttgactagtttaaaagagtaataaactatatactttaatagggagctagactaatttttcaaatattagtcaatttttacctactcttgtagatataactgttgctattcttgatattttttcctaggcaaacttttttttaatgtttgtatcacaagatcttcagatttagagttgaaaggaatcctgaaagtaatctaattttaattctgaagcttgactttcctcttttgtattcttccaagtggttatttagcctttgcmtaaacaatttctagcataggaaaattattgtctcccataacactcaattccatctttgaacatctttgacatatgactgttagaattagttcttgttacacatctatgaaatttaaagcattatgctggtgcttttaaacatgttctcttaggtaatccttgtatcagccttattgttgacatgatttatagtttggaaaaataagctcaaagaggttttatatttagggtcacattgctacttgattgaaggtgaaattttctgctggatttatcagatcttatgtccatgcttttttcaataagaagaattgtctttacttacatatgaaacaaatctgtcttcccaacaggctactgggctactggttttcaaacatacagtggatgagttcacrgcatgagttaaacatcagttactctatgtttaaagttcttcctggcaacaactcttgaaatatttgaagtcagccctcatgtattccatatgctccctcttctctgaggtgaattttatagtcccttcaaatggttacttttagctcttaccttgtctgagccattcttgtctaaatgctttccagtttattttttggtaataccactccaagtgatgttcaaaatagaatgtagtattgttggattggccagactagccaactgtaacatgagattaccatctcaattgttataggaactttattaatgtagtcctattgaattagcttagcaaaccacgttgtagcattcatttctgttaagattggcatataattttatgtattaataagttggcgagatattggctttacattttgaattatatcatacttattctttctaatttcctgttttatcctttgaaaggaacccatgaaattctttggccactctgayttttgtgtcctgaaatttccatgtcattgcaatgaaaaagaatcaaagtatggctgcactaaaaggagagtatttctaaaatataaagcactttgcaaaagcactcaacatacattatgtcgagctcttataactacattataatgtsggtattaacatacatattttactcattacaatttagtaatttgttcaagaccataaagaaagaagtttagaggagatgaatccacccataccgcttttgtttttcctgcaatgtcataatgatattgataagtatatgttatcctaaaggactaattaatcagaaatagattataaaaaagacttagtgatatctctagtattaggccaacttccaagggtcttatgcaacacttgtgctaaaagtgagaggggtgaaaatcattgtgttacaatatctgaracaaatatgcctgtgatttgtgaaacaagtgaggtttcctttccatatccaagtttggaccattgcttcatgcatccaaaaccagatagatcaacattacattatcatgtacttcgtatagctcaaacatatttgaatcttcatatctgccayggtgaacaactgtccgtctgggaagatttcaaaggtggagtaactgggcaatgttgttataccagtgtagaattgctagtggatatttactcttgattctaagttgacagagggcattaaagctctactttacagcactttagcaatgatacatgggtttattgtgttcatcaacttcatttactggaaaatcagatacctggtcttaacctccttgactctgcttaaaggtaaaccccttaattttttcttccccacatcagcaatccaggtctataggagatggtttgtaaatgagttgtagtctctacaaacaaggcaaagatcacctaaagcatattagtgctagatctcttaatatttctttctccagatttttagatcttaagatagaaaatagcctayagttggcccttagtatctatgggttccatatccatgtatttaaccaactacagatgaaaaatgtggttaggtctatagtagttgtgtgtgtactgaacatgtacaaacttttcctttcttgtcattattccctatacaatgcagagtacaataacaactattttgcatarcacatacattgagttataaattataagtaatctaggtatgatttaaagtaaataggaggrtgtgcataggttttgtgcatatactacatcattttatatcagagacttcagcatccatgaattttggtgtccatgggggtcctggaaccagtccccactttgaaacagagtaatgactgtatatttcttcaaatccctttacaatactgagaacagtgctcaggatatggtaggttacatatacacatatttgttgwttacaggtttaactttctaatttattggtctcagaagtagtgagataaaatattgaaacaatgatgatgcaaattagccaaaaggtgatagcgattttcacacataattttaacttctctttccaaagtatgttgagagtttttgtcctaaatgtatatagtgtcaacacatacatatatacacaaattattcaatgaagcttttaaatttcgagatgatatccccttatcacttagcacatttcttctcactgtcaaytggtgtgtgctaagggaatgcaaattaactgtattattaatttaagtaagacataattagtaaggtaaatcttctgccaaaaaccacataacacattccagggccaaatatraatgagctatgattagcctgctgttcctctttattagttcagattaatggcgtattccctgtgggcataaagatgcacaaccatgtgttttctaagggtcttaggaccatttgttaactgcaatgggaacttcacatctcactatcttgtgaggacttcctggtatttaatcaatgtgagaaaggaggacaagtatcaattgattaaaaagcatgaatagggtttgtaagcagaacatttaatgagctaactaaatttctctaccagtcaatagcaaacatgggctcccttcatgcaagtacttcatcgtttcttctcctgcttggtaccattatccagactgtgaatagcattgttgtcagagagcactttcagaaacattcttgrctagaggaaacacagggagtagcaatccattaatgaagcagatttayatcgattaattacattccacttcctctgttcaggcctgtagcacagctccaggaggggaaaaaatatgatgaaagaaagagaaaagctctcaaattaaattttcaagtctgatttatgagactcctctgaaaatctagttttttctaatttcaattatttgtttctctgcttccctgacraggctgttctaacactgcctggattttggcttgttgcctgcctcattcctttcttggcttgttctcattacagcacttttgcctggtaggagtgaagacccttgaaactgggaatccagactatatagagcaaaacctattgctggcaatgggcagttaagagacaacacaggctattaactgatgctgttgttttctggtagccattgagggacactgcatgtgtgccattattcacaatcagggtcaccattctagtccctgctgggattcatttttatcaagaacaagtaagtaagatgactatagaatgtgctgtgcagtgaactggcatttaggattttttttgatgaccttagtccttcctaattgtgttttgtggctataaggccaagtgatttaggcctgtatgtgtgcacaagggtacaatttagagtgttaactgtagtgctattgcttccattcgtagaggattgtaggatttagaaaaatgggcccttgggtaggatggtagcagcatcctccattaatagccataaaagttaggaatacttcaacaacatttcaaaagataaaaatgagaaaacatatgttactagaaacaactatcatgtatctcatagcctgcataaagagagagacattaccagctaattttatattcaaataattataaagttgtggtctgcagagtcagctcctttctctcccctcctctcccttttctttattctttcttgctaggcaggagcagggtaaaaagaaaatccataaaaaccaacaaggtggctaagaagctagaatgatagagcagaaaagacttctttcctgaatgatagagcagaaaagacttcatttctgaatgatagagcagaaaaggccagaatcaccgggcctcacactgtgattggacggaagggacactgactttcctggaatctcttgagtcccaatcctaaacaaggactgtcatgccaagtctctgtctactcaagagccacacttcccccgcccacccccgccacaaccccaggacagatctgattcttattactctacagttgcttgaaacttcttataagtttacagttgtgcctatgagcaaagacttaaaatgaagacagtcctagagaagtaccctcaggaatacactgttgatgtcagagctttagaaccacaaatttggttggagggtcaatggaaaaagtgaacacagatgcagagtgtaaaagcaagtattaaaagtgtgtttctgtgtgtggtggggtggggggagggagttgataaacctgactttgtatggaagaaatcacatttggcctgagtctcccagtggatgtcacttcttttaacttgtaggtttacttacactcaggaaaatctattctctcaaattkcctgggmagctagcaccaattctctgtttatgaaaacatcaaccacagtttagcattttttttttttttttgagacagggtctcgctctgtcgtccagtctaggctcactgcaagctccgcctcccaggttcacatccttctcctgcctcagcctcctcagtagctgggactacaggcacctgccaccacgcccggctaattttttgtatttttagtagagacggggtttcaccatgttagccatgatggtcttgatctcctgacctcgtgatccacccgcctcagcctcccaaagtgctgggattacaggcatgagccaccgcacccggcctttagcattttaattgaaagaaaagacagctgataaatacaacctggttatactataataccctctaagtgctataatatgcttcttctctcagtttcctaatgtcactcatgatccatgctcttgaaactgcatgacataatgtcaggaacattgagtttggagtagaatatctgtgttgcaccacttatggtttttaaaggttttttycctcctaatctgtaaaatgggtatgacagcatgaggattaacagtgatgcccaaaaagtgcctatcacagtgcttgaccttactgggrattcartaagtaagagcaggtattacatttgttgctattgttttgttattaacagtagcgatgaagagccctctcgttgctcccaccttctgtttttatggtctcccaaacattccccagcagggcagcctctcttgctcccttctggctgatgtattttcttagcaacccagaatattcatcattcttaccaggcaactggatgaagttcctctctggtttgcctggttatcacagctttctcagctgagccttcagtgaggaatcatggtccttctttagaacactagtttccaaattttagaattatttatgcccattagtaaaatgatgttgaggctatactcctaataaatgtttctttatttataaataatacatatgcactactatactaataagtaaaacaaagaaattttataaaaattagaatggaaatgttacattcagttgttttcttatrtgttgtcatggctcatcttgcacaccttctggggtgcacagcttgaaaagctttgctcragaggtttatcatgtttttgtaaattagactgtcttgcccataaccaagtacctcagtcatcttccagaaaatgccttccacacccttgggtctctttccgtgaggaaatcccatagcctctccctgcagtatctgaactctcactctagccctcatgctggccctctaacccagtgcttctgaattttgtctgtacgtgtgattcacctggggaccagtccaaaaagtctgtggccccatctcaaaccaattaaataaaaatatttgtgggtctgccccgaggctgtgaagggcctcttttgtttagcccagtgagctgttggactggagtaggaaacatttaccataggtcctgatcaacactcccattctgggaagttggggcctcagaggctactggagagcaggtctttttgttttcttttcttttcttttctttttttgagacagrgtctctctctgtcacccaggctggagtgcagtggcgcgatctcggctcactgcaacctctgcctccgagttcaagcaattctcctgcctcagcctcccaagtagctcagattacaggtgcccaccatcacgcccagctatttttttgtatttttagtagagatgggggttcaccatgttggccaggcagatctcgaactcctgacctcaggtgatccacccgcctgagtctcccaaagtgcttgaattataggcgtgagccactgtgcctggcctagagcagatctcctttgcctaccttccttctgttttcctcagtcacattagagagagaagggtcttcctctaaatcccattctggagaaggcggttttgtccaggaccagccaaacctgcacggcaatggccctatcaacttgttgcaaatgaaaggatgagttgaccttatctttctaaagttgaagttttgctttgctctccagctgtttataaagcaagcttgggagtcaaccaaatagagtggatgattggcaggaggaagggaggaaggcataaaaggtgactgccttcaccttcttaccttcaaatagcccttctatttatctcttttctctcttcttctctctttcatttttttttaactgaaggtgagataacgagagagaaggtctttccaatattttccttagcatcgtgagacatctcaaatcagagtgaaataaacatttaattacctggagtgcatgggatagggtattcttctttaagctagtatttatatttgtatgtatgcattcatacatgtaagttaggaaytgcttaaccatcaggaaaaggttttccttccactttacccttttctttcacttgctactttgtcccccattgtgaaaaagctttctaaaagcctgagtccatattcccgcctgagaggtgagttgaaatgcaggcatctagattaatatcaaattatactggtgcctagctgctaccattgaggccaaaaaacatatctcccctctcccacagcaaagtccctctctgccaactcaagaagatctctgggaggcatatatttgcataggaacaaagtgactcaaatatgtttctctgacttcctcacaatggtctcttgcccacaaaccatataaggccactgtaggcatgctgctgcaggtatattctgagatgatcgtgcttctggttaccctggtctctgcaatacttctggtcatagcagtttttctggggtggtacccttgatgccccatgtgcagaagctgctacacagtggatactgtgtactggattctggatactggatcaaagagtatttactgcaggctgatactaaaattgtttgctcattagtttgttgaaataattaagtatatcttttgctcctaaaatgtagaacacatgttatcagatgttaacttagggtcagaaagttcaagtgtaacatatgtggtcataatggcacagacagacaaataaacacttaatataaatcagatactctgtatgtgtctattgatacaccgacattgtactagagacactattaaaaacactattaagacatagattttataatcaagagtcttagaatctgatcaagaaggcagacccacaagaaaacgataaaaatgcaatgaaataaacattgaaaatagaggaaaaacaaagttcgtaagatcacaggacacttaaattggcttgaggaatcaaagtgcaaagatctttgcacagcatatttggagaacattgagtgatttgatacactgaagtcaaagtataagtgcagaacggatagcgcagatcatggaagacggtagtacctrgaaagcaatgtaaattaatgactttccaccacacacagactttctatgttactttagtggtaaatgtgttgcacaaaaagggaaaataaagttatttgaaatgattttaacaaacaattgtcagygacataacaattgtcaaatcaattgttaaaatggtgttaatcaattgttatgtgattttcatttaacaagtattcattgatcacctgctatgacaagcacwgtttttggcctttggggtacatcggtgaacaaaatgaatgaaaatcactgtcctcacaaagcttacattctctttattataagtttattttattatattattaatgatatttacattatattattatatttaattatwatattacagttttattataaatttatttaccataaattactacatatacaaacatgtattgctgcacagtttcatatataatggggagcatactgtattttttggacaatttaagaaatattcagtgttaattttgagtaaaatagctcttttgcctctttttccttaaaatttaattctaagatttgactccactgtagtcaattaacaatggagaactattaagaaattacatgcagatgaaataatatttgcattttgggaagaggacgcaagcagtggagttgtttgataggtgatgcctgagactraygccgggggaactcattaggctgccattgtgtaaaaaataatgcagtaaaataggacaataaggcaattgcaacatttaggattattgagacagagagaaagagtttagaatcattcctaggattctgcgttagataatgctatgatgagtaacagaaaaaaaaaaaggttaatacaggtgaaagtacttttatatcccttcatttcacattcacagaaactataaaagtttggtgccaatgtagctgtacaacttgttggcttttgtttttcttcataactttaaaagaycttttggttctgtctgtaatatataatcatgccttaaagctgattacaattttcactgttaaaaggattcacactttggctaccttttcatttattactcacaaccacacactgggttcataagggcagaggtagaagccatggctgagtagccagagaatctagagctgctgtcagcaaattgaatcgtcagcattctcaaggaaatcacctgctggcttattaaagttaattgcttgcaggtatcaagttccttagccagagctatcaaagtcgctgtgagagaggtgattaagactgtgctgggagcttggcaaagctggatgagtaccatctcatggggtgtcttagcttcagggagactgcttcctacgtccacattgtttgattctttctccttgctcttccaccatcccctactcctgtccccaccacatgccarcttatccaggtaatgtgttaattttgattctctaacctttgacagacatgtattgaacgtttatttccagcctcaaaaagcgctgtgataacacagcctctgcacacaaggaacttccagtctagaataggagacagactttgaaacctatgattatratactatgccataaattctagaaaccgtggtttgtccaacgtgctatcagaaggtataaagataaggtatatagtacatatatatgtttacattttctttatctscctttggggactgggataaaagaagatggaattatttacctgtrtcagtcggggtcctccaaaaggaattggcttacatggcgggggctggcaggtctgaaatctatcgcgtaggttttatataaactcaggcaagagttgatgttgcaatattagatctgaaatttgtagggcaggttggcaggctggaaactcaggcaggatttctatgttagtcttaaggcagaatcccttcttatgggggatacctcagttttctgtttwtttttttttctgtttttatcttttgcttttatggcttccaacttactgggtgaagcccacctacattatcaagggtaaactctttaattaaagtcarttgattaagaaatgctcaccacgtctgtaaaataccttcacagaaacatttagataaatatttgaccagayagctaggcaccaaagcctgaccaagtttttttgctttgatagaccaaagtcgggtgacgcactgcaaatgtatagaagttccaactccaagatatattgaaattattccctaggatagcaccttaaaactcaaccttactcctagggtaaagccatcaaacacctaggtagtgccatgcttagatccaggaaagaaaggtctttgtcctgggccccatgcattagagggccccacatatgacaaaaacacaaacataaatgcctctgttgcctcaattctggcctacagcactggctcagtgcaatctgtaactctaaacattcactctcgtggttaatattactcgggctaccggaaaattcttctccacaatttttcttacatcctagtagcaaaaagataacaaagctcaaatgccatgaacatttgcagtttgaactgctgtcaayatgagagatgaacatcttattttgcagcaggtgggtggggtgggctaggatttgagcactatagagaaaatatacataaattattttcaaattcttccttgtggaatgaacgcaccaaatcattgcagaatcgaggattgttttcctgggtagagctgaacatccattttcttgtatctgttcatgtttcattggtagatttgaaagtccagacaaattagcataacatttgtacacgataagtatattttggattattaaataaatcatagtactcctacatttgtctatatgtagggttagagaaaataagtatgaagtgtgctaccaattcttcatattggcaagcaaatggatagtggatgctcaatgttaaatgagacaaaattaaatgagaaaatgtcagctttaatgaaatattctgaaattaaaatgtgatattccttatatgcatttcagtttttgacttaatagataatttgaatatttaagaattatgaaaaaaataattttatttttgtttttatatttaatttttaatgaaatatatttgaattttctaacttcaatacaatttcattttattttaaatcctttggctcatccctgtcaagaaattaaaaatcttgaccatagcaatataattttgatgaaataaagaggagaaatataaattttatggaacacatrtgtgtttatgaattaagctggtttcattttattacttacctaaacattgctatctcatcaagagaatgcccaggtatgctatcaaatattgcactgaatatctttgatattttgccagcttttagttatctaaaaactattgccttacataatacttttcatttgtcattaaaaattatatatttaaggcagcacaatgatagaacatattttattaaagtttcttagtttttaaataacttttaaatatttaaatgtggtatgtaggcctccctttctactattgctttgggtcctgcatatctaggagtgggcttaccaataaacaattgagacaacatctaggagggggcattaacatccttaaggagccataactattccaagagatggatgacaatctttaacttgtgaactaggggtgggaggatgtgaggtgggataagcagtgccctttmtattttttcctatgcctccttgcccagtaaacagactttctttccttttaaagagctggaggtataaaaatttaatttgggaaaattatgtaggtggacctggaagaagtggaataggctgtaagtaagttattgaaattagccctcagaaatcattctgaaaaaggggacatttgagcttgatctggaaagatgaatggaacccctccaggtggatgaattgtgtgtgggaagaggtgcactaggaaaaggcaaaaaggcagaaaaagcaggttgcttcacaatatttcaaaacatttatatgactaaaacactgggtgggaaggaggaagtggaaagagaagggctgaaatatgagaacagaaagggtattacacgtcttcccaagaacttggcttttatccttcagaagagactcattaaagaagttttaagcaagcaaatgacatgattggttttgccttttaaaaatatgactttagaaccttggttttcaaattttaaaatgcatgataatcactyggagggcttgttgaaacacagatggctgggccccacctccagagcttctgactcagtagttctggggtggaacccaagagtttgcatttctaacaactcctgagtgatgtgatgctgctgatacgggaaccatactttaagaagcactgctcaaaaaagcagaggtggatggtgaatggtttagaaagatgaatctacagaaagtagacaagataggggattactgcaacaaagcagggaaaaataaagggagttttatggaagcagtgatgaagggtctaaataagagttttgagaaacagtacctaactgaatttgcaaggtctggataaggaagacacaagtgttgaggataactgtgtatctggcttgcttgtttttgaatgtatgaaagagcccargtctgtaatctagagaaagagagaaagagaatggatttccattttaattgtagtcattggcgtaaaggtgcaatttaattgaatatcatgcaacaactggattactgaactttgggtgtgctgaaccaaagaagagggaaagttatttacttacagaatatactagctccattaggaaaagtttgaggtaaatatagttaatatgctaatgttatttatcaataacagtcaatacaccatcacgattcgatcattttgggtgtggtctcctctttggagagtgcctcaagcctttaacttaattactctcttacaaggtagatctgttcagaatgggtatttttacttmattatattctatcatgtgattttctctgtagtatgtccttatactttaaaatattattttaggcttagtaaaattaatattactctctttaacaggcagcaggatgcatgttcacccttaatgtttgaatgaaccagggcaagagtataaatgaaggtgtctccttccatatgttgaaatatgtaaatatatgaaagttataagccaagccaaaaattaaatgggatattactggagggttttattgggaggagtgacttgagttttaaatgctgattcagatatgattcgagaatagaatataggtggacaaggcttgtatgaggaagattctgggttactctgagttcagtccagacataacagcragaatgagactctgtggtggacctggaagatgccagaacagtttttattgctgtactgtgacagtgttgccaggatataatctattagtagggaaccagcaacccaacactgtgaattgagcttccaactctaggtgacattttcattaatttctttaattaagatctttattgctcacactgtggacaaaaaccaaacaacaaaaaaaggcctgccaggaaccacactctaaaacayttaaaataccaatctgctaaatactgtcatataaaagagatccctggttagagttactttgggaaccaaaactgaaaaggaatgaagccacagtgattaggagagatgggaagtgaggcaattgcaggaaccaaggtgagggccctgctattgaatattgccagaggaagaaatgatttgaaaagattttggaactcatttctgtctgttgagaaggagaataagatatgggcgggcacaggcattagagagacccagatcatagcagcctgctagctttgtggttctcgagcctcctgtgtggaactaaagctctgttaccttgagggtttcagagagaggttagagaagtccctagagcataagaggaccccttacttaaggtcttagtatactagtaacacagaagcacccagctttcccagaactaccagagacactaccttgagagtggttcccagatgttaagtaaagacataggaaataagtataggcatatgaataattctatgctcaccacagttgttactgtcatgtagacacattataaaggtatgagcttatttgtggtgtagtctagcataggtagctgaatgtgagacgtcttttctatttgtatcagaggaaatgtaaaacaaaatcattcagcatgaaaaagtgttgctcaattttcagcaaggttttcttatgctactatagagctccaaaggaaagaaacacactctgstgtgccatagcgttagtaagccaatgaaagttgatggtatattcaaatgtctcttgctgtgtgtgtgwgwgagagagagagagrgagagagagtgagagcgattaagagagagactgatttgacatttattaataacttctccatattttatattcagaaaaaactgctaatcagtttcagctaaagttaaaccattcctaaaatggtgactaactaccttcttgaataatatcgaaatatcagaaccagctgatttgggataacagctctttgggacaataaattcttactcaatatgcaggctacatgtttgcctatcatttaattcctccctctttactcatcaagaattttaaaatcctgtattctaaactgcctaggggaaataactgatataattttgaagtacatatttttggatattccctgtctttattgtgaatctcagcttgtatcacawgtttattatttagcatttgagcatctgcagagaacttagcaccatccttccctttcyaagatttgcagcacatatgtggctaataaatacgaagctggatgatataaacaactccattggctctgtttcagctctaccactgttggaccttgacaagagagcattaggaaaatttgtttttggtgtaaaggaggttcttgctaggttttgcctagcaaaaatgggagcagtcagaaaagatggctggggcctaggcttggggaaggcaaaaagaaagagtaaaaacttcagccaaatattctaaatagtaaaaacacaagaaaggtaagaacttttgaaagtaaggtttgggtatagtggctcacttctgtaatcccagcactttgagaggccgagacgagcagatcaccaaggtcaggagttcgagaccatcctggtgagaccaggatttcgagaccagacatggtgaaaccctgtctctactaaaatttacaaaaaattagccaagtgtggtggcacacgcctataatcccagctactcaggaggctgagacaggagaatcacttgaacccgggaggtgaagtttgcagtgagccaagatcacgccattgcactccagcctggatgacagagtgagactctgtctcaagaaaacaaaaaaagaaaaaagaaaagcccaccaagttatcctaacttatgttgttgaatgggtaaagaagcaacacagagaagcacaaggaagacaaaagcagactgaataatgggacatatgaatgagggacacctaggaagatacattattagagagttcaagtacttaaattcatatatttcatgatatatagctgttttttaatgtttcaattaaaatttctgaaatttctgaagctaaaggtcatgatgagtttatgttctttatcttgctgaagtttcttacttttttttttttttttttgtttcttgttcacggtgaaaggctgaaaaagtttcttgaagagactaattgtgtattccaggtcctgtattgcttgactattgcagaatacatgttctaacaaatcagtttgagatttgtgtcaattggtagaaaataggattatgttcactcaccaaaaatgtatttgagagtaggtttccacactgcctacctcaggtggctaactctgaatcttttgatctataactagaagaaaaaactgcataaactgctaacacatttttaaagattctacagcaaggcatggatgaaattagtagtatatttaaaagatgttttatagatagaaagtgctaaatgaataaagaggtggtattatttgcaacatacctgatgcaaacagaattacaaaactgtaattgtaacaagcgcatgacaaagttttaagatttgtttcaatgttgaattataaatatctcagagtttaattctttcctcaaactrtatttaaaattactacttttaatatatcttaaatatatttgaatatatgtctagaatatatattatcacagagataactttaggaaaaaaattattaaagagatttatatataattatgaatgctttaggagccacatattaatttttctaaattcaactaagcttatcattgtgaagaaatctttatttcttcattatcacaaagataggctaattcttcattatcacaaagataatgaaattatcttcattaaagataatttcgtgtactctaaacaatctaggccattccatcattctagcagtggagcatatcattaatgatagataaaagttgagaaaccaaatgttctatcagttagaaaaatattttctcaaaagggaaaagcccaacttttgggttagctagtgtcttgactcttttaaatttcattcatgattataaatagttttaaatattttaaataagcatcaaccatgtgattgcccttatagaagagtaaggaaaccttgaagaaatgattctgctgtgaccttgagatgcctgcagaaaaagaagtggaatgtgtgaagacaccatcttccacactggatttgccagtgactgctgttgccctaaacacatcttttcatgtttctggatctcaattctcacatctgtttatgagagtgtttgccagatggcttctaagaaccctttcagtttcaacattctatgtcgctacaattggccttgatctcaaaggatggacacattgacacatccaatttatttttatgagtattttattagggtcaaaagcaacgtatagtgttattagtttctttcttaatttctaatagcatttcaaatatcataattgtatatttcttactacaacagcgaaatttacacattagggttctgatttggttaaagaatgtttgggaggctcataatcagccatgtttgttggtattgtacatattcacacctcttaatatgtacttcatgttttacaagcccaaggggtcttaaagagtgggcattgaaatgaccgtgtgtcacctacrtataagaasaaatatactagttgatctcatttcaattsttgtttgtaataaacaacaccaacttttaatataattcatacttttgtaatcaatataagtgagtgaagaagtaataaggaataagtatttttgtttaatggtagtcataaacccargtattcaaaaaatagaggttttttctcgaaataatttctgwkttgagacagaatggcaaaaactaaaccttagccatttggcagytctctaatttatggggctttccatattgccaagggatgacgacctttatgcttccatttcatctgacatttgctgagactcattatcctttctagtcattcacccatgcaagttgctactgaatcaatacttgttcctatctacaagtcctatctcagctatgtcaaggccccttttggaagatgggattcattttcctgtgccacatccaagcacaggaaattccgtggactgttttaggtccatctaaggagacacagagccctgaaacagacacagagcaagccattctaccctgaaatcttatttccctatattttaggttttctcaagtttatataaggttgtgtataaggttctgctgctgtgtttatgaatttggtctagaggaattcaggccttggagagtgcaaatgccagatccttcctggtctttacggggcctagacgttttcacactaaaagcttctagtgtatatcacttggtgaggtgataagtatagaataaaagctcactggagttgatgaaaagagaaaatacaagatagaaaaatggaaaagaaaaaacggttgatatttcaaaattattatcccaccacacaatgattaactctctataaatggcatctatttccatggtagtggtgaattccctggataaggaagcagaggctgagactagtcagtgaaaccttacaaccttacgagggatttcagcattgcctaggtggtgagacatgatcaactttgaggtctcttttggctctaaattcagtgatactcagtaaaaatattatttgagagagctatatctttcctgaaatttcatgacagctctctggcctcttgttatgggctgaattgtatctcttccttcctcctcctcattcatatgttgaagccctaactcctagcaccttccttggaatgagagtgcatttggagatagggtcctacaaggggtaattgagacaaaatgagacttctaggatgggactttacctaacatgactagtgtccttgtaagaagagaatatttgggcacacagaaattccaggaatgtgtgttagttcagaggaaaggccatgcgaagacagagcaagaaggccgccacccgcaagcaaagacaagaggtctcagaagaaactagacctgccaacaccttgattttggacttttagccgctagaactaggagaaaataaatttatgttgtttaagctacatccagtcagtggtgtttttttttttttggcagcattggcaagccaaaaaagctctgtatgatagtcacatctagaccttgtacactatgctccccaggaaaggctcttgccagagttgatgtgttttatagttagtggcaagaattatttttaatacatgcttgggattttcccatttctataaagtttatttgtacgttttatagttcttcagaaaagagaaatcagctaagaccctagattgagtgactttaacattatgacaaatgaaacaattgattgatatttcctaccaattatgactgaatgcaccagaacactttgtcctaagtaaatctataatacattttgaaaaggtttaagtggatttcaaaactgctwgataatagcttttttctaaggagatacgatatgaagacttggaaagtgttgtctgtagttattgtttacatccatagtagttgcctggttagttaacaccagctgacacatgaaatatggttttgaaataggtagcttgcttttctaccaccttgtcacttattatccatgtatttccacccaagaaattggtactctgagttagtttcttttctattaatattaaatgaagtgtttctattaaatctctagtccaaggatgtaatcttaaggatacttggcactcccaacatgttagaatcaataggaaagacatttatggattcctacaattaagatgagcagccagggaataattcaggaaatcttatttaatttctaccttgctagatactatatatgatacacagagtgtaagaggragccctgccctcaaagattttaygatccagttgctaagacaaaaaaaaaattaaaatgtaattattacaaaagactgtaaaagtggccatacctaaaatgcactgtggccatcgttgcctagatattaattttataagctgttctttctctatacattgtgcacaaagtgggtgtaggctaaatcaatatgaatgcagcttttatagatattaataagattatctaatagtaaatttttctaactgaagtttgttttactgattgaaaaataccttcccaatatttttatcttggaactctaaaataaagaaggaatttttaaagggtggcttattttttatttaaacatcattaaatgcttaaattggacacattagtattcttactattttaaacattctcttctgtctttctagtattgatatctttcataatcttcttgtgtgtctcttatattctctgctaattctgttaactgtacacattatagtgttttgcaatgtctctttcctaataatgtttttgtattttcagtcttggttctccttcctacaaatttcacactttattctaccgaaacactctctcattactgtggcttcaaatatttttttccttatggtgtagacatttacagacaaactgaaacttctcttttatttaagctgttgtgaccccctcccccttttcatatggactgcatggcaggaagaactatgtatgcatttattcctcataattcagtattaatttttagggtaaaggattatctttctaccaktgttatcaggaagacaatagcctaaaaagcaagctgacattytccttcctgtttccatcagtttaaacaacagattatttttaaccattcttatttaactgattgaggcagtaatggcttctgtgtgtttttttaatccactgctgtttggtgtgtttatgtacacagtcaataatatgctcagaaatgagagaaattgctgtctttggagacagaaaatgttcattcagaagatgggctaaaagtgggccttgcaagacttgcataggaagagtagtggggccatatggtccaattaaaaaaaaaaaaagataagctaycttttgacaacaatgagtagattaattgmatgaaagctgcatttaagagcgagtataaatatttgttgaatggaaggaaagaagaaaaggaagaatgaatggatgaaggatggaaggagacagagtgatgccaagggaggacaactggtttatttggatagactgaagaatttccattgttttttgtaggcagtagtaaacctggggatgttcttgtttctactgcacactgatgatgtatgaaatactgttctagaggctgaagaggtttaccacaataatttaaaatgtcataacatgaagtacagtcagggactgatagcagagggaggataatacactacttgagtaaagatttaactgagaagatgtattttctataaagtgatgtcaaagatgactggcttgaaaatacttgtgtctaggagaattgtgttgcttaggattagaagggatgcctgctttatggagaaaaatgaatatttctgtttcaaacaagaggtaggaagatatagttgggctagaaatgaataaagcctaagacaaaaatcagtgtaaccatgggtagcatttagtacaaccagtattcttaaaaggatcaaaaaagaacatgataaaaagtaaaagtgcaaatagaataaaagaagataatttgttaaggaagggatattatgcttccaaaaaaagatggagtattaaacaaacacacaattatatttagagatgtcaacacctcaatctcaataattgatagaacattcaaaccaaaatattagttaaggatgtagatgacttaaacggcatcattatcaatttaatccagctaacatttatatcttcccacaaagaaaatttgaagcccagatggcttcactgatgaattctaccaaacatttaagtaagaaatagtacctattaccaagtatatacaattatttttcaaaaaattgagcagagaaactacttcccaactcgttctctgaggctaacactatcctgatgctaaaaccaaagacattataaaaaattagtaaatatatggatcgatatgaatatagatacaaaaatttatttttaaaatgtgggcaaatctaattcaatgtatctaaaagcttaacatatcctaatgaaatacgatttatcctaagaatactaggttagttaacattaaaacaaatcaatgtaaggttaccatagtaacaaattaaaaaagaaaaccatatgattatcccaacagacaaaaatatgaccaaattcaactaaagtaaaaactgggaatggaaagaaacttcttcaacttgataagaggggtctataaaatgcaaacatcattagagcagaaagactggatactttaagatcaagaataagacaaggatattcactcttaccacttctgttcagcattataccagatgctatagccagtgcactaaggaaagcaataaatgaatgaatgaatgaatgaacaaatgacatccagattggaaaggaagaagtaaaactttacagatgacatgagatcatttatgtagaaaatatgatggaatctactagtacaggttgagcattgctaatgtgaaaatccaagatgctttttggaacacctacataataccacaagtggaaaattctatacatgacttcatgtgactggtgtagtcaaaaaacaggctctgagcacacagtttattcagcatccctaaggggaagaagaccctcccagaccccttcagctatgaaatatatctttcttaagtacccagattcctccacccccactatgcaggcacactcataaagggtaataaaatggcatgtatgcaggccaaacacaccaatggcaggtttccaataatgtgtcacatggggccaagacctacatgcattactgtgtttttattttcttattatctgctctatggtgtaaagattattaaaaatattaaaaactcctgcagttccctctgtgatatcagtattgggtaacagtgataagaaaaagaagcatttatgtttctctacagcacagaaagtcaaactgttgaagaagaagaaactggacagtggcggaagttgaaatgttctatggaagagtatagtgttgactaccatatatgacctgaagaaacagaaggataaactgttgaagttttatactgaaagtgatgaatagaagtcaatgaaaaatagaaaaacaccgtatacagctaacaataaaaatattgattgtgtatttaaatagtggatccattaccattgcagtgaacacttgtcacttaatggaatacgaatcgggagacaagcaaagatctataatgwggaaatgaatattgaagggaaccatgagtactcaacaggctggctgcagaaaattaagaaaaactatgatattacatttttaaagatttgtagtgataaagcatcttctggtcatgtagtagtggaaaaattcattgacaaatttgccagagtcattgctgatgaaaatctgatgccagaactagtctataatgctaatgaaacatcactgttttggtactgttgccccagaaagacactgacaaaagctaatgaggtagcccctacaaaaattaaggattccaaggacaataactgtgctggcatgtgctaatgcagcaggcatacaaaagtataaacttgttctgaaaagcaaaagcttgcatcctcactgttttcaaggagtgaatttctcagcagtccactattatgttaacaaaaaggtatggatcaccacggacatattttctgattggtttcacaaacatttataccagaggctcaaggttactgcaaggaagctggattggatgacaactgttagatttttgttattccttgacaacatttctgctcatccttcagctgaaattttcatcaaaaataatgcttatgccatatacttttccccaaatgtgacttcattaattcagtcatgtgaccaaggtatccttagattgatgaagagtaaatataaaaacactttcttgaacatcatgccagcaccagtgaagagaggtgtgggtgtggaaggtttctagaaggagtttagcatgaarggtgctgtttatgccattgctaacacttggaacgcagtgactaaagacacagtagtacactcctggcacaacctcttgcctgtgactatattaagtgatcttgatgaacaaggtagtgactttgaagaattctgtgggccaactgagaaaaaaagatggtgtctgacctccttacatacacaaaaaatataatttcagagtctttccctaggctagcagaagtaaatatcaaagaacttgattatttttaacatcaataatgagattccaattcytcattgaccratggggaaatagtccagatggttttgaatcaagttgattgtgataatagtgatgattaaaatgacattgttaacactgaagaaaaagttcctatggataaggtaaaaatgtgtgacgggcttattgaaggactacagcactgtacatttataacagcacaagaaatcatgtcagtttataaagccaaagagagacgaygacaacgacgacgacgatggctactactactactactactactactactactactwcttttcttttttttttttttttttttgaggtggagtttcactcttgttgcccaggctagagtgccggtggcatgatctcggctcactgcaaccaccaccttccaagttcaagtgattctcctgcctcagcctcctgagtagctgggattacaggcacccaccaccatgcccggctaattttttgtatttttagtagagatggggtttcaccatgttggtcaggctagtctcgaactcctgacctcaggtgatccacccatgctcatgcctgtaatcccaaagggagacttctaagacaaaaaccattgttaatgaggcaagatgactctgaaggaaacatttttaaaagccatccacaaaatgcctcttcatccctagaggactcacttcctggtccttcaactgttttgattttttttttctctcacctaaaaaaaaatcagcacacagtaacctattaatcaaaacacagcatcataggtggagactgaaagcctgccattgttggttgttgctgatgttcaacagctgttacgggaattctggtgatgctgctgtgctgcttagttaccctggacacatttgttttttttttactgtgtaaatggcatgccatattttttacagataagtacttatgggtaaataagttaagaaaattgttgcttatcagtagcttataagttcaaaatcaagaatgattgtgatgccaaacaaccacagatggctcatatgggtggccgagatgttgacacttgccttctgatgatttaaaatayacaattttttcattaacaaaattattaaaatattatataatgttgccttcagtctatgggtataaggtgcatataaaacataaatgaattttgtatttagacgtgggtcccatctccaagatatctcattatgtatatgcaaacattccaaaattaaaaaacaaaatcagaaacacttctgattccaagtgtattggatagggttattcaacctctactacttactagaactcaaaacttagctttgcaaggtttcaggatataagatccgtatacaaacatcagtagtatttacatgtatcattaagagtaattgaaattagttgaaatagtaaaaccttttacaataatatcaataatatgaaatatgtctataaaaaattaacaagacttgtacacaaaatgtataaaacagtgccaagagaaattaaggaagacctaaataaatgcagattatgatgttaaactgtacagtgttgaaactgyaacagtgttaaagtggtcttctcttctcctcaattgatctgtagatttaatggagtccagatcaaaatcccaacattcatttggctagtaattgaaaaactgtttctgaaacttatatgcaaaggacctagaatagtcaaaacaactttgataaaaggcaaaatttggggactaagactgmctgatttcaaaactcattataaaactatggttatcaagatagtgtagtgttaaaggaaactcagaaaaatagatcaatagaaatgactagagtccataaagatctacatggatgtagacaactgatrctcaaccaaagttcaaaggcaattcagtgggcaaaggataatcatttcaacaaatggtgctggaacaactggttattaatataaaaaattcaatcaataacctcctaccaaaaatttatcaaattgtacactcacttgaaatgtrggatgtttattttatgtcaattttaactcaataaagctgttaaaaatagtaggaaagtatgagagagaaaggaaaaaagggacgaaatgtaaaatgctatttattggctacaccatgtgctatataagcagattatattactttcttccgatgtgagaatatacagctcctgctatagaataaaattatgtattctagatcacaggaacaaattagcaaaatactgttcctaatttttaatgctcattttgcaaggtgcaaaactgcaaggcacatcttacaaaatgaacaatttagggcataacttcactcttataattaatttagaatgatggacatacttaaatagcatttttcacaaaaatggaaaaattctaaaattaatgtggaattacaaagaccatgaatagccaaaacaatcttgagaaagaaaaataaagttggaggtatgacattccctaatgtcaagttatactacaaagtaatagtaaccaaacactatgttactggcataaaaacagatgcatggaccaatggaacagaataaaaagcccagaaataaacccaagtttataaagtcaaccaattttcagcaaggctaccaagaagacacgatggagagagggtagtatcttcaataactggtgttgcgaaaactggatatccacaggcaaagagtgaaactggacccttatctacaccatatataaaaattaagtcaaaatgaattaaatacctaaccataagagttgaaactctaaaactactggaagaaaacaagggaaaaacttcttgatattgtccttcataatgatattttggacatcacaccaaaagcacaggcactgaaagcaaaattaaacaagtgggactataaaaagcttttgtataacaaaacaatcatcagaataaaaagacaaactataggttggaaaaaatgtttgcaaactatctgacaaggagttaataatctctaaaataaataagaaactcacacaatagcaaaaaacaaaacaaaaaaaaaccaagtaacttgatttaaaaaaaatgaccaaagtgggccagctgtggtggctcacacctgtaatcccagcactttgggaggccaaggcaggcrgatcacctgaggtcgggagttcgagaccagcctgaccaacatggagaaaccccatctctactaaaaatacaaaattagccagggtggtggcacawgcctgtaatcccagctactcggggggctgaggcaggagaatcgcttgaacctaggaggcaaaggttgtgagctgagatcatgactttgcactccagcctgggcaacaagagcaaaactccatctcaaaaaaaaaaaaaggtaaatatcattgagtactcatagttattaaaatatgcatatgtatgtgcatacccatgtatatgtgcacwtgtgcatatgtgtatgtatttataaaaaaaatgaccaaagtacttgaatagacatttttctaaacaagacataaaaatagccaacgggtatatgaaaaggtgctcaaygtcactaatgagagaaatgcaaatcaaaccaaaatgagatatcacctcacacctattaagatggctgttatttaaaaaaaaagaaaaaaagaaaaacaccaagagataacaagtgttggcgagagtgtgaagaaaagggaaccctggtacaatgttgctgataatggaaattggtacagttatgaaaaaatgtatggagcttcctcaaaaaattaaaaatagaactaccatatgatccaacaatcccttttctgggtatatatccagaggaaatgaaatcagcaccttgaaaatatatctgcactcctacattcattgcaaccttagccacartatacaagatatggaatcaacctaaatgtctgttccagtgaatggagaaggttgaaatacagatatgaaatacagatgtgattgtttatgtgtatctgtgtgtatgtgtaaaggtacatatatatagacatacacaaatataaagtatgaaatgtatattctgctactcaggccagtcttgttactttttatttgatttcagaacaaaaggaattttttaaatgatccggtagaataataatacttttgttagtgtcctcatatcttgatattctcagatattaggacattgctygaagcataaatcttgatgagtttcttggatgttttgtttcatctcttgtgctttttctttttagctaatgtaatcatagatttaatgtaatagccctatctctaagttgctgtcccccacgttttatctctcagtratataggctttagggcctgatatcagtacagagctatttattagttcaggatttcattttgtcataagattttgcatcttacgtgaactattttttgcatttctggacgatttcttctattacttcaatattatcttgtgagtgtgatacacttgtgttactgatgaggattrtgaatcttaagcaggagtctgcccactccacaaccatatgaaataccacttaacatttttttgkaatcagtgccacaggccctttaaagctcatttctgataccacctgcaggtattttgggtaagtgatagatggaaggaataagcgcacacacattgtaagattgaattcagctcctgcctacattttccaagaatgtagtctcatcagaagtggaatgtccatgtgaagaggagcagatgcatgatttctcagaataactgcttgtggcacacactaagaaaaatgcttcaccagatatggaaagctcaattcttgctaggtcactttgctttcttgcatgaaacttacatctggaagattttatattaagaacatatgtgcatctgtttaagggaatgtttacatttactgagttctggttcttgaagcaaactctcagcaagacccattatggcatgggtaaaaaggcagagcttgtttccatacatctctgaaaggaaatattccgttttcagatttttttcttgttcagaaggcctgtttccttggaatggcagtcagaatagtcacctgaaacccaacaatgagttatgttctaaaagaataaatggttcagggagatgaaaacattgttttgagaccaccattggcctgagtcagtgtagcaatgcttatgaggcgattggaaccaaagakaatatgctagcacagtttatacactatatctctcttatgcagctttagtttattgctcacgatactcattcacgaatccttgaaaattgcttcaaagaggtagtcttaggacaatgttttttcatgtactgggaatgcaacttaaaaaaagtgtaataagttttaatttatacccattttgaaattcatagacgagcacattgagcatttttaaagcttgtgatcatctgaagtattgcaattccaaactgtcaactctgtaaggtactattttttgccatttgtcctaaaactactcctttggtgtagtttatgatgtagtttttcagtgattggtgaataaacctatattttaatatatatacacacatatacatacatatataatccatatattttgtgtatcagtgtttgtgtatataaatttttttcccaaagtttattggaggtttgtatgtgtgcgtgtgtatacygtgtgtttgcttttcctaggatttattcttctagactccaatacaatttccccaaatctccatttgtctaaggaaggtaagttttgctttctgatagatatctatatatcyatatatatatagatatatctgatatatatacacacataaatacacatatgtatatatacatatatatttctataataaaagtaataaargtggtaaaagattaaatttcttctaagaggaagattttcttgtttccttttttaaaagcagtgaatgaaatctgagattctccaggtatattttgtggatgggcagttgcttcctaacaattccacctaggcatcttgggagatagagcgttcaaaaattactgagaaatttgtagtttaattgacctaagcagagagaaatctggcccatagagaacattttattttattttatttatgtatttctttctttcttcagagacagtatctcactctgtggcatgattagagctcactgccgcctcaacctcctgggatcatgtgatcctcttgcctcagcctcctgagtagctgggactacaggcgcacaccaccatgcttggataattctttaatttttttttttaatagagacagagtttcactttattgcccaggctgatcttgaactcctgacctcaaatgatcctcctgcctgggcctcccaaagtgttgggattacaggcatgagccactgcatctgccccagaaatattttagatgattaagaggctttcttatttcaactggaattagcaatatttttttcctcataactatttactttgcctagaggaatatgcctaaaatttcacttggtgatgggatcatagcagggaataatctaacagttgggagaataagttagttcactttaaaggcattctcatatttactacattattatgtaccaagaggtgtttatgacatattatttaaatacatattgccagcttgaaggtttaaatcgtggatagtctataatgagataatgttttcagttttgtatctcctcatgtgagtatacgcctatcaggaaggctggaaaatgatgaagtaaatagcatctctttattttaaaatgaaagaaaccagtttctgaaacactgatgacatctaaaaaacggttagaaaattcacaaaatattactctttgcacttaaagatgaagttaaattcatataactattggtttttctgctaaaagtgtgatttatattttgataaagtcatttgctttgctgtacctgacatttcaaatatgttgcatacctgttagtaatcctcaggtcattgttcagaggtgcccatactttatgtaagtgagaatgccataccaactccttaatgacttgaacttctggcaaagatgctgttctattttggmatatggatacctgaaaactagttagaaaaatacatttttattgccccccccccttacgtctctttcacccaatttttagatgggctaagttgtctccattagttttggaccatacaaaaagaccccaggattttcaatgcagtgggtctcttgagaattggaaacttctgctgtttcatgctaaaaattagtcatgaatttttaagcaggaatctagcttctaaggtcagatggcccaataacaatattaaagaaatatttttatttttgtcttcttgtatcttcctgtctcaacaaacctgtaacaggatcacttctttccttgcaacaacttctgggaatgacttttattgtgaatatagaacaattttcaaccaactactaggctgctgggagaagctgtgtctatttctatgtgtatcacagagggtattcgaggataataatagattctacacattgtgctagcaatgtgaatattacatatactttctcatttcatttaagtttaaacctctcattttccctgggaagtagaaatttctatttccattttagaagtgagggagctaaggtccaagtttcagtggagagaaaactaaggctccatgttgcccaaagaaacaaatacttcctattgagcagagcccagatttgcctgactccaaagattcccagccttgcttgttttatttcccagccatggtgtctgggagtcaggaggcaaacatgcctgtacctgcatttcccttttggggaggactaaatgatgtatcagctttacatagcaatctatttaatgtgcatctttgaaaaggaaaagaaatcccttgaaatatctctggcattatttcaatgacattgaagtgtcagaacattttgggataacaaagtggtcaattcctttaggtgccatcgagctttcagcagttgtatattttatagttagtaaatagccaaatgtatttctttgcctctgttcaaaatgaaatcaccttaatgaagaaatcttatactgaaacaatctgggcacattaataataaatgaattctgaaagaaatttagtataatttctgaggaggcacaagaggaaataccaaatttaaaaatggcattttccatttgtataagtggaataagtaataacagtaataaaaatgtattcttccactattgttctcagctgccattgtgcttttctgtttgtgatcccttggaattcacagatgtagattatggtatgctattgtttgatggcagaggcaaattatggcctgcgagcacctaatctacctgttttcgtatatcctgcaatctatgaattatttttacatatttttaaaagttagaaaaaaattaaaatgagttagggaggattccctctttttctattgattggaatagtttcagaaggaatgataccagttcctccttgtacctctggtagaattcggctgtgaatccgtcaggtcctggactctttttggttggtaagctattgattattgccacaatttcagagcctgttattggtgtattcagagattcaacttcttcttggtttcgtcttgggagggcgtatgtgtcgaggaatttatccatttcttctagattttctagtttatttgcatagaggtgtttgtagtattctctgatggtagtttgtatttctgtgggatcggtggtgatatcccctttatcattttttattgtgtctatttgattcttctctcttttcttctttattagtcttgctagcggtctatcaattttgttgatcctctcaaaaaaccagctcctggattcattaattttttgaagggtactttgtgtctctatttccttcagttctgctctgattttagttatttcttgccttctgctagcttttgaatgtgtttgctcttgctttcctagttcttttaattgtggtgttagggtgtcaattttggatgtttcctgctttctcttgtgggcatttagtgctataaatttccctctacacactgctttgaatgtgtcccagagattctggtatgttgtgtctttgttctcgttggtttcaaagaacatctttatttctgtcttcattttgttatgtacccagtagtcattcaggagcaggttgttcagtttccatgtagttgagtggttttgagtgagtttcttaatcctgagttctagtttgattgcactgtggtctgagagacagtttgttataatttatgttcttttatatttgctgaggaaagctttacttccaactatgtggtcaattttggaataggtgtggtgtggtgctgaaaagaatgtatattctgttgatttggggtgaagagttctgtagatgtctattaggtccgcttggtgcagaactgagttcaattcctgggtatccttgttaactttctgtctcgttgatctgtctaatgttgacagtggggtgttaaagtctctcattattattgtgtgggagtctaagtctcgttgtaggtcactcaggacttgctttatgaatctgggtgctcctrtattgggtgcatatatatttaggatagttagctcttcttgttgaattgatccctttaccattatgtaatggccttctttgtctcttttgatctttgttggtttcaagtctgttttatcagagactaggattgcaacccctgcctttttttgttttccatttgcttgatagatcttcctccatccttttattttgagcctatgtgtgtctctgcgtgtgagatgggtttcctgaatacagcacattgatgggtcttgactttatccagtttgccagtctgtgtcttttaattggagcatstagtccatttwcatttaaagttaatagtgttatgtgtgaatttgatcctatcattgtgatgttagctggttattttgctcgttagttgatgcagtttcttcctagcctcgatggtgtttaaaatttggcatgcttttgcagtggctggtaccggttgttkctttccacgtttagtgcttccttcaggagctcttttagggcaggcctggtggtgacaaaatctctcagcatttgcttgtctgtaaagtattttatttctccttcacttatgaagcttagtttggctggatatgaaattctgggttgaaaatccttttctttaagaatgttgaatattggcccccactctcttctggcttgtagagtttctgccaagagatctgctgttagtctgatggtcttcyctttgtgggtaacccgacctttctctctggctgcccttaacattttttccttcatttcaactttggtgaatctgacaattatgtgtcttggagttgctcttctcgaggagtgtctttgtggtgtcctctgtatttcctgaatctgaatgttggcctgccttgctagattggggaagttcttctggataatatcctgcagagtgktttccaacttggttccattctccccgtcactttcaggtacaccaatcrgabgtasatttggtcttttcacatagtcccatatttcttggaggctttgttcgtttctttttgttcttttttctctaaacttcccttcttgcttcatttcattcatttcatcttccattgctgataccctttcttccagttgatcacatcggctctgaggcttctgcattcttcacgtagttctcaagccttggctttcagctccatcagctcctttaagcacttctctttattggttcttgtggttatacattcatctaaatttttttcaaagttttcaacttctttgcctttggtttgaatttcctcctgtagctcggagtagtttgatcatctgaagccttcttctctcaactcgtcaaagtcattctctgtccagctttgttccattgctggtgaggaactgcattcctttggaggaggagaggcgctctgctttttagagtttccagtttttcttccttttatttttccctgtctttgtggttttatctacttttggtctttgatgatggcgatgtacagatgggtttttggtgtggatgtcctttctgtttgttagttttccttctaacagacaggaccctcagctgcaggtctgttggagtttgctagaggtccactccagaccctgtttgcctgggtatcagcagcggtggctgcagaacagcggatttttgtgaaccgcgaatgctgctgtctgatcgttcctctggaagttttgtctcagaggagtacccagccgtgtgaggtgtcagtctgcctctactgggggatgcctccctcttaggcttctcaggggtcaggggtcagggacccacttgaggaggcagtctgcccattctcagatctccagctgcgagctgggataaccactgctctcttcagagctgtcagagagggacatttaagtctgcagaggttactgctgtctctttgtttgtctgtgccctgcccccagaggtggagcctacagaggcaggcaggcctccttgagctgtggtgggctccacctagttcgagcttcccggatgctttgtttacctaagcaagcctgggcaatggtgggtgcccctcccccagcctcgctgctgcctcgcagtttgatctcagtctgctgtgccagcaatgagtgagactccatgggcgtaggaccctgcgagccatgtgtgggatataatctcctggtgcgccgttttttaagcccatcagaaaagcgcagtattagggtgggagtgacccgattttccaggtgccgtctgtcacccctttctttgactaggaaagggaactccctgaccccttgcgcttcctgagtgaggcaatgccttgccctgcttcagctcatgcacggtgcactgcacccactgtcctgcgtccactgtctggcactccctagtgagatgaacctggtacctcagatggaaatgcagaaatcacccgtcttctgcatcgatcactctgggagctgtagaccggagctgttcctattcggccatcttggctggagaggatgtggagaaataggaacacttttacgctgttggtgggactgcaaactagttcaaccattgtggaagtcagtgtggcaattcctcagggatctggaactagaaataccatttgacccagccatcccattactgggtacatacccaaaggactataaatcatgctgctataaagacacatgcacatgtatgtttattgcggcactactcacaatagcaaagacttggaaccaacccaaatgtccaacaatgatagactggattaagaaaatgtggcacatatacaccatggaatactatgcagccataaaaaatgatgagttcatgtcctttgtagggacatggatgaaattgggaatcattctcagtaaactatcgcaagaacaaaaaaccaaacaccgcatattctcactcataggtgggaattgaacgatgagaacacgtggacacaggaaggggaacatcacactctggggactgttgtggggtggggggacgggggagggatagcattaggagatatacctaatgctaaatgacgagttaatgggtgcagcacaccagcatggcacatgtatacatatgtaactaacctgcatattgtgcacatttaccctaaaacttaaagtataataataataaaaaaagaaaaaaattaaaagacgtgacatataaaaataatgtaaaattcaaatttaagtatctgtaaataaaattatattagaattcagtctgcacccaagtccttcccatgatctatttctagagccaccattgatgaaccttcattcaacatatacccaaatacacacatatacatgcatactcccagttacacacctcttattctttatttttgagggatactttattaagctttaagactcctgtgtctaatttcccttttccaaatttctctgggcctaatactcatcagctttgtccttttgttctctgcagtttcattgctatcctctttgttctattttcagaaatttcccaaaatattaaaacaagtgtggagaaagcagatctgtagcattttgccttctctgtgtcttttctatcttgtttgtgggactagatcacaagtattaggaatactgtgaaatcccagctgcactgagttattttcttctcattttccccctctctcccttgtagtcttactgcattctcctttattggtcttctcattacttttcaatatcagcagttactgtcttgttattttattgaatccacttgttatttatgatttagaagattattggactcctcattaaggagtgaggcarcattcaatattattaatatgtcaaagagctttgagatatcaaaattgtctatttaaatgtctccaaggactcttgggctactagaaaactgaccataatattttaatatgatataattaatatcacctctttaaattttcttttgttcatgttaatagcaagtgactcttaacaaataattgggattgttccaaaagtttgtttaagccacatttgcataaatatgattatgacatggtaaaatatttgaaataaaggcaatacaaggcaatttctcaggaattaatagttttctttgattacctaattttggagagagctttatgggacaactgtccaggccaacaaactcattaaaaggacctaggccatttgttgaaagtcttgatacycagttctgcttcaattcagtatgtttcaaaaaaaatttttataccactgcttactctgcctatttcagaagcagctctaaccttcattcccyctctgccctaagtgtctcaggcttgccccaagttctcctaattttggatgattaatggattcattgattcattgattcatggatacacacacgtgcacacwtacacacacaggagatttcaataataattgattcactgctgtatgtcaagtattcttctaggtatttgggggtattaaaataggcatttggtccctgctctttttttttttttttttgagatggagtcttgctctgtggcccaggctggggcaatcttggctcactgcaagctccacctcccaggttcacgccattctcctgcctcagcctcctcagtagctgggattacaggcgcccgccaccacgcccggctaatttttttttgtattttttagtagagacgggtttcaccaygttagccaggatggtctcgatctcctgacctcgtgatccacctgcctcaacctcccaaagtgctgggattacaggcgtgagccaccgcgcccggccggtctctgctcttatggggctttaattttagaaaataaagttagtaaagtcaaacaataaatgaacaaaaaatcttctgctgaggtgaagaaaataaagcagtctagctgatagaaagtaactggtgaattggctactgtagatagtgtcagagaagatgtcactctgaggaagtgacatcattcgttctttgacctaactgaggagaaggactagttacgggaatgttgggggctgagggtggcagaacattccaggaaagaggaacaacccatgcaaaaatccggtgggatgaaaacaagcatggcgactttgaggtctgcaagaaggctggtgtgactagaaaatcatgagggcaaatgggtaataataaaggacataggcaggggaaacatttggattttattctaaaacctaagggaagttcttgattgcttttgatcagaagggtgatgtgattttatgacacagtggacatgatctttttattttcttcacggaaatacttgagtcatcttttatactctcctgccatgtaaatcctgtttccttctagccttgtctaccagggaagaagtcaaaatgcaagggtaggaatcttcttttagatttcatatatttttactttaattctaccatatattttttatttctaggatcttttaccctsaaaacagcttctcatttggtgtttgacacaatctctcttcctttcttcttccaagctcagcaaatctaaaawcttcaacacaattaagtaagttatcctacaaactctatagtataattgacctcaatatcatttttttyctcaataaattatggaatatatgaaatgcctcccaaaagaaaatattatctttcattagaatatagagtctagaagataatcaccgtcttccatatgttctgaatcctgaaatctgacttaagtggtatgtgtgtgtgtgtgtgtgtgtatgtgtgtgtgtgtgtgtgtatatatatatatatgaatcaatacaggtgataaggaccagagtttttaaggtgagaaaaaaaggtagaagaaagaattcagaacagttcatatcctgcttggccctctcctcaggcttcttcattttatcacctgtttgtaattcatcctacaattattttactatgtcttgtttatttattctagggatttacttagtagtataaggtatatattagtaaacaaaacaaagatttctaaagttatggagcttatattctaacagaataggggaaaatattatttacaggtatttcttaaaatgctcttatcatattaggatgggtatgtaccaatgaaattcgctgagaagaaatgggaggcatcaagaagacaaagaaggagccttcaatatcaaggtcttttgtaattttcttggtgaaggacaacatatatatcttgagtgtttccactttgaaatttatcaccttttttgcctccttcttgcatcatttatgtatatatttttccattctttttgccatattattatatagataggaaatgaatgtaccctttttcccttcttcttagttggtacatactcatttggtacatacatatttcttttaattctatattcattacattgtaccaaacaatacatatttattgggaacctattaagtataaagtatgtcatttatatcaaagatatcatcaagttctttgagcttaaagttttttattgattttaatataggatataatactctgtaatttaaaaaattatctttaattcagttggtactaattatgttgtgacaaaaaaacaaaaaacaacaacaactcaaactaaagcaaatcacagagatttattggtttgttcttcatgaaatttcagtcttcatacaggtattttttcagggattcaaatgatattgaccttatttggkttctctctctcagctctgctttttactatattggtttaatactcaaaatatttattgtattttcctgttgcttcaagaacattctttccatttacctcatctctggtcccaggagaagacatgtcattcatgccacttaaatctgtgtatcctatttctatgtctgcaatcattgcttcaaagagaggcctatagcctgatcaaagcaaactagaaagaagcagacttttgctaggacagtagagagaagaaaagaaaaacagcttcttatttatttattgctgaaatttgaaaatgggaaaaaatatatattttttgagacagggtctcactctgtcacccaggcagaggtgcagtagtgcaatcacagctcactgcagcctcaacctgcaagactcaattgatcctcctacctcagcctcccaaggagctgggctgacaggtgtgtcattakgctcagctagttttcatatttttttgtagagatggggtttcgccatgttgcccaggctgctgaagagtattcttggagcaatagggaattactacatatacctcaagaattaaataaacatagcatgaggcagagctgagatatatagaaaaaacaaatactgaggatgccatttgagtccctggagcaggatccgcatgctgactgaatttgtgtggaagacaagccaatcaattcctgtaytggygtaagctagtttgagttggttcttgtcataacataaactgtgcatatggaaataaagatacaaaaattatgagtgttatataagtagatcaaatgattttaaactcaaagtcttataaaactatgaaaatttagagttgggagggattttgtgcatctctatatctaatcccctctatttatcatcaagaaaatgaagaatcagtgaagttgaataatttaacatctcagaaagtgccaagatgaggagacaaacctaagtgtcgtggcttctagccctctgcttcttccaggaccccacactttaattctggtaaagagagaagcctacagatacataaaaattgttcatggtcattttaaatatcttgtttacagtggcaaactttttaaaaaaaatatagttcttggcctggcgcagtggctcacgcctgtaatcccagcactttgggaggccgaggtgggcggatcacgaggtcaggagatcgagaccatcctggctaacatggtgaaaccctgtctctactaaaaatacaaaaagttagccgggcgtggtggcgggtgcctgtagtcccagctacttgggaggctgaggcaggagaatggcgagaacccgggaggtggagcttacagtgaaccgagatagcgccactgcactccagcctgggsgaaagagcaagactccatctcaaaaaaaaaaaaaaaaaaaaaaaaaaatatatatatatatatatatatatwyacacacacmtatatatacacacgtatatatatatacatatatatacgtatatatacacacatatatacgtatatatacacacatatatacgtatatatatacacatatatatacacgtatatatatatacacgtatatatatatgtgtgtatatatatatacgtgtatatatatatagttcttctaagaatgccttatagcttgctttggttttcatctgaatattttctattattcattttcttttagaaaccttccatttttataggtagcaaatgcaataattcacaccaatagcttgcaaaatttgaactattagccatgatagaagatctatgaattgcatattggttatagttttttttcacttatttttaaaataaatgccaacaaagacaataagataattttttagaatcatcacgtttattcctacataattactaataaataggagttcatcttcatccacatatatagtaaggacttctccggtgccaacattctattttcagcatcaatagcatatgtagcctctagaatcatgcacgtgtttttaattttatcttggacttccaagaaatgtttataagtaacattcttaagagagaaagacctcctaaatctatgtcctacaaatactttatcagaaaaatttaatatactcacagagttttatcacttctcctgagaagtttaaggagacagcttgtttttttggccttcattataagaaagcagttaaatgttaattaattgaagaaaawgactgctgaaaaagaaagcactaagcctattatagaaatgaatcttatttttctgccaagtgctttataattaaaaggaaactcagtagaaaagaagcttaagcaataacagtaatattaataaaatactgatttttagaaaattgcttttatgctaagaatgattaggtcccattttaccccataatatacttctcagatgattttagtttagcacgtgtattctcaagcttggtattattgaatctcagctagataattctctattgtggagggctaccctgtgcattatagkatatgtagcagtatccttggactccactttctagatgccagtagcaccacacttcccctgtggtgacaagccagataaccccaatatccctgacaaaatttatcctccttcccctccccaactgagaactgctggtttagaaattgaaaaagtgggacagaattacagagaggtcaacttattgtaaattagataattagtcattgacacacctacttttaggagccatgtctcacacctccagcccctgaaataaactttaccattgaccaaaatcccatcttttttgtatacatcaggtcattgtgtaggttcaatygcaaagcattgatgccttttcttgtctatcctacctttgcaattttgctgggggttttgtctgattattgtggccttttggggtatcctacatccccctgcctacctcacacttcccatctttcttcaaaccagcccaaaatacaaaatgattgcttttgtttagattggctgtcattcaagattttgccaagtgtgacaatttagcagttccctcaaacttgaatgagtcgtacttgaaagggaaaatatgctctcatagtgtgatgcttattaaacagtattaaagctttgattgagcattcccatggtgatgacttgcatagcacattactgcattaatgtaagtatttttgcctgtcaaacattaaatatggataagatctgcagtgtcatttggttcacttygctactactgaagcattgcttctccataatacatgctggcccactgttcccagtccaatttaaactataagtaatgatggtgtatttctacttcctttgggaragcattacraagtttaatttactgtttcctaacaacttgtaatagtatcagtagttaatgttctagaattttgatagtgaaactttctgctagtctactttcttcctcaaaggtgaacattttaatatcataagaaggtttttcatacatcccagctttattcccaaagactatagaatacttctaaagtttggctatttctagtccaccacaatcttttcccacacacagttgtttgaatatatttgacagtctaatacttgatagcacctactacttcaaagcacacactggtatcaccttacttgatttttataagatcattttggggataggcaggccagtatccaagctttatttgacgggtggatatatgaaagctcataggggttaaataattgtcctcagtcactaacatttatgtacaackttaagatctggcaatgattgagccacactcattgcatttgctccacaacctgtgaaatgaggagggcaggtatgagtattatcatgacctccattttccagaaaagaaaactgaggcacagaaaagtgaagtgacagagcaaatgcttgttggccctcaatttaggtcttttgactcacatttaaatgtattctttaatgttgcttttctttgttttgtttgtataattatttacctcttccttttgttattgaaagggcttcaccatgaaatatacccatataacaaacctgtacatgtaccccctgaatctaaaataaaacctgaaaaagaaaaaagaaagaaaacagaaataaaaaaaaaaaagaaagcctccacctagaaaatgaggattttactggaattcacagataataaaatacagtgattgagagaatctcctgagaaaataatttgctcaatttgatttgttgtttgtgtaccaaacatgtagtattagattaattcttgctctctatgtctgtcttttttctcagtggtccttccatccgtattttcatctgtagccatccaggtcagttttgaggagatggcctctatgtttgtgttgcattaattcttatacaacaagatttctttattttcttttaatttttacctttaattcttattattgtgcattgtataacccccagatgaaaagattaattggttyggggaaagctcaagaaatactagtcttgacagagtctgaggtcattccaaagctctcccaacacagaaaatgagacagaccctcttagattttacacatttcacgaagtcttatatcacaagtgggaaaatagataattctggaggaatttgtatcaaagctgaaaagctgacatattatttgaaacttaataggatcaaacctccttccagcacagttagggattgggctcttgcaggtgctactgacactcactacaaaggacctgacacgcccacaggttkctagctgcagtggccttgtactagtatgctgctatgctactgtggagaaaattgccattttgactgtgatcaaaacacaatycttttggctatcaaacatccagcaataaatttccattaaaatccaagctctgtaaagccttcttcaggggaaataaacacaaacccccaaaaaggtatcttgtatacatgaaaagaaaaaatcagttttaggttaaaatcagtcttagaggaataggaaaagaggaaatttttaaagaaacccctgaggttcctcttccaaatattggcaaacattcaatcttatttagaatgttgcrttgcctagcaaaatgaaggatatagtacatcrtatccttattaaatcttgtagcagctaatatggtaaaagtccttttgctacaagagcctaaggtgattgaagagggaggtagtaaccaaccactttatttaggccaggactccgatattgttttgttttgttttttaatatggtttgctggataaattcattttcagaccacctattccaatctgattttttaagagccagtaaaggtatgctagattttattttctaaaatataccctcctattttgaatctaatgagctgtttccagtttggatccccaggtatattctgtgaggttgttggaattttgagctgccaaacttaggaccaagtgagttgaagcagttgttgaatggtgactccagcacattgatggcagaatgagtcagggtaatatgcagtcrctccccaaagtcctattctagaggaccagaaacaatttctctcttacataatgaacaaatggstaattcttctagaaagcactcttatgacatatttcaaacatcacatcacatccgatacatcagtcaataaatatgcatccaaatgcttttctccagccatggcacaaactgtttcatcagtgaaattccacaaagtttatgtagacactggagatcacctctgtgccatatacacagcttatgcaacatttaaggctacrtatgatctcagtccccaagagttgtatttgccaagagtagagataagaaaaaattccttcaatgctctcctgtctacstttttagcttcctctctcatcattctctctgccttattattatcattgttgccatgctaaattgcttatatttctttgcataccaagctcattcttaccttggtagctttgttcatgctacgtatccatctgtttggaagtgtttctattcctaccctgtctcccatcttgtctgaatcattcctaagtatcctttaagactcagtccttcatgactttagttcagaaaattattgactattgaaggaacaaatgaatgcatcttgaagaaagttgtggacattaaatagtggaaaggcagatgtggacataccagtctagtttgggagataaaatacatcccatatcccaagtattatagatgaatacctgaaggaaatgttgctgttcattcatacataccaatccacatgggctgtccacataaatgacagaattttgccattcttcttcctttgaattgcctttcctctactcttctttgttattatactatcaccttacattgatggatataataattgtgtaagtattattttttattcactatggggatgtgattaagaataaggctcactggccaggtgtggtggctgatgtctgtaatcccagcaccttgggaggctgaggcaggaggatcacgaggtcaggagattgagaccatcctggctaacacagtgaaaccccatctctastaaaacaaacaaacaaacaaaaaaacaaaaaacaaaaaaaaaacattagtcgggcatggtggcatgtgcttgtagtcccagctactcaggaggctaggctaaggcaggacaatcgcttgaacccgggaggtggaggttgcagtgagccgagatcaagcyactgcactccagcctggtgacagagaatccgtgtcaaaaaaaagatactgctcaccattaatatggtgaatgctyttcttatgaggaccttcaggagaaatttttctcagctcacagtaacataaataattctgttttggagaaattggtttacttttattgtatgagtattaaatatgtaacttgcgatttcrtcaccctttgcattgytgcttgaaagtgtagtgtcagagtgtgatccagagatcagtaaatggtatcaagtagtttgcatgttgtgtgtaagtcacagtccaactttatcttcattgctgtacctcattggccctttagcttatttttcccacttatgtttttatttagtaaaaaagagtatatttttrtacaatgcctattaaggaaaacatacaggtgataaaaatgaagaatacttctggggtaaaatcaaatytattggagtggaatgaagttcctcaggcaaggcatgctgaagtaatcacacccatctsaagccttcagttactgttgatcaacttattttctctagtccagacccaacttctaactacagactcctgtttctacctcccaacagacttctccatataaacattctgcagacaccttgaatttaacttatttaaatctgaattcttgtttgttacactctcatcttgtatttacacgagtgtttttctctttcagggaatgaaatcaccaatctcccaattgctgaagctagtatcctcaaaatcattcatcattcattcattcatttgtccatgattcatagccagtaattctgccttcttggtgtgcttcaaatctgtctcagattgaaatggcttcgcattcctgtctgctactgacttagtctaggatttcrtgatttctcatttgaattattagatgaacaccttggcactaccagatccaccctgctcaccacctagatatcctacatcatgctgctagagtgwtcttttaaaaacaaaacattgaccrtattacacccttacttaaaaccttttaatgagtcaccagtgtgctcaggatgaatccagaatccttagggaaatatacaagaagcttcatgacctggtggtccctccttctccagcctttaaacattactttacatgcgctgctctcccagattctttgcctttctcccaccaaacacataaaactgacacacttgcgtgcacacacacacacactctcatacacatgtttttccccccttagttaattagaacactcttgatgaaagaggagtcgactctttggaaagaatgtacttctagaccaaatatgtagcaataaaggaagggaagaactgcaagtaatagttcagtgagctgactaagcctctttaatattacagccagatcaccagatagtcatgactcaagaaatagccccaaaagtgttcttctaagaagtcttatgtgacccttcctgtctaactttgacttttgtcattgccccttctgcattccctgttgtgattcttcatataacatacttataaacattgaattgctctagacaacttaagggcaggggccatatatgtatatatgtgtatgcatgtgtgcatgtgtgtgtgtatgtgacagggaccaaataattataattttatcctcttctatttgtaagtgcttaatagataagctttgagtacccaataaatgcagtaaggatcttgaaaagactgcaggtagggaataggggaaaggctagtaaaggctttctgagtcaggataattatgagagcacaaaagcatagatgagggaactasyaggtcagggagcagatggcctaggttctagtggtaagtagtcctacaggctttccctcrtttttatccttgttgttcagggaacataaataatcaccagtgacaagggaaagcatattttgttgtcattgtcattattatttacaatctttcattgcatttcaaggaagatggacctttagattgagttccgtttatagtgctgaatgcaatggcaagtgagattgtatggttttggcaggaggagttgaggcagaatggacatagggatrtctgttttttacatagaaagttttaagattatagctggaaggraycttagamtagttgtactcaaagtttgacctatggtccagttctggtcagtccattacaatgacccaagttgataggaagattttaaaatcttttgtattagtctattctcacactgctaataaagacataccagagaccgggtaatttrtaaaggaaagaagtttaatggaccttataaaggaaagaggttccacatggctggggaggcttataatcatggcagaagggaaatgagaagcaaaagcacatcttacatggcagcaggtaagagagcttgtgtaggggaactcccctttataaaaccatcaaatctcatgagacttattcactatcatgaaaacagcatgggaaagctccgcccacatgattcaattacctcccattgggtccttcccatgacatgtgggaattatgggtgctacaattcaagatgagatttgggtggggacacagccataccatatcatctttatagcaacttgaaggagtatttttatatctattgagtctgattaaaaaaaaaagtgggcttctattttgtatacaattattttttatttcatttttgtatgatttttaaaaggaggtggttcatagcagattggaaattacaaagtgctagttcttcactacagatagttagagaagcactcctttagtgtgtatgtttttttagtaacacttaaataatatgctgaacaatttctcctataatttgagtttcctgccagatcctctgaagctcctatgtcaccccagaataagggttcctgatctggctcaaaccagtcatttacaaacaggaaaccaatgctagagaagtcaagtaatctatccacaataccatagtaaagtagaacccaacttagtttccttccattcaactaaactaatgtatttcttcctacttccaaataccccatttctgaccactcagtaccaccagaatgtggcttgggtttctgcttatcaagatttgtaacatactagactgtgccgtgagactttgagggagattcacctgctctgcccacttgtttaagatgacatgcaacacatttatgacattgtagaaaaatgaaggcatgtgggccagcctgtgctgccagaatgtttattaactattgactctaaactccattcttgctgtagcttgcttttttgaataaatcatctcttgactgaatattttatttgtataaattacctttaatttcaaatagatcctggtggtagtacatggaaaatatggcattactaacaaatgtgttttattttgttttcatcctcctgagtcctaggaccatagctggttgtgagagggagaaagagagagaggcaggctatgagaaatggtttctctgaagtttgaagtctgatgtaggagaaaatctgcagtcacaaatgaaagtatcccaggcagagagagggtacctttggctttcctgtcatgcgtgattgatgctttccctttatcactctagctcatgtatcctagaatttttttctctcttgctrccacagtcataattaatgattaaggtacagtaactagcataacacctggctattaatttcaggaagtagattggggtgcatagcatttgacctcacagacgctcaggaggagtctgtacagcttccttcactgcataaagttgaataccttttcctatcccagcagccattttgacagcctgcctacacagaacaagccagtctaacctctttctctgtcaccgttttyttttttcccccagtccatttcacaacctggaaggaataagataaattgcagttgtgtgtgtgtgtgtgtgtgttttaaaggttttaactctaacatgtagaaattcccattatttatgttaacagaaaataaatcctccgttgtacaaaagctttcttccaatgatttagacatgactggttttatgtaaacaatagctctgagaccttgcacctctctttggtccttttgattttatatagtcaggttgcaacttctgtgtttccagattcaaattyctgggtggcatagcctttgctttctccagatagtatctcccaaatattctgtcatagccacagggattgaaatcttattttcatgtattaggctgaagataatataattaagaaggcaaatagtaacccaaacagtcacataatggtatctgtgccaataaaaatgattcaggctggatgtctcttttgagttgttcacataaccactcttgaccataagcacagaaattttgagatgaactaaaagtaaatcttactaattaagtggccagaggttggagaaagtaggaaaataacatagttctcaatttaattaaattcagattgcaagtaattttaatcatgttgacagctatttactttgcatcattttagctaaataagcaacttaacatgacattacatagaatctgttcctcgactaactcaactgccataaaaataatgaatattttggttattttcaagatccaaaatataatttccagctttaggatgggaagttaaaccaactcattttttttcttcccttcatatcttaaccccatgaaaatgactaaagaagcacaaaatgagcaaaaaggtatgtagcaatactagaaaataggaagggtaacatcaagcaagcatactctttcagtaatttatttaaaaagaaaaaaaaaagcagcagcagatggatcgggtttaatcaaggagctgacaatggcttttgttttgctcaatataaaccaggtaaggaagccctgagaggcaagtagacagyctytccagcagaaaactgtgggaatcttatgcttgggaagctgtagcgttgtttaacccccatttgaaagagtgggaatgtcagagagaatcacacaakaggccctctaggatttattagagctctgcagagagaagatrgctgaaatatttgccctggtgcttcttccacttggtgtcatcggcattctaaatgcagttggagcttttcctacccactttaactttgctttttctctttgaaacagatgtatcaggttcatttccagcatatgcacctgggaataaatcaacctttctgttcctctttatgccctgaacacagcaatttcatgacatcaaaggtggcctaagcagagggagcccgtatcaaccactaggatgggcaatctaacgctgaacgcatacatatgaacagataataaagtattacccrtcattggagagaatagggakaaagctgggaattagaacaaatgaaatatagatattacaggtagacaaaagataatgatttagaattctaattgatgtcctcattgatatttgggaggttttttttttcttcactctgtaaaagagcaaacacactgctatgcaaaggagyaatagggtaatattactgaagattattgcacattatctctatgtggtgagaaaactgagrcatagttaatataccttgcccaaggtaaaatagctaggaaagtgctaacccaaggctctagaaagacctacattcagtgcccataaccttaattacactatacactgaataccaaggacttagaaactgaaaagaagatgaccattgttttgaagaaataataaaagaacaacaacaaaaaaacccaaaagcaaataaaaacccttactaggacaagaaaagagcacaacagctatcaataaaaatcagaagcaaacccaaggagttatcccatatgtcagattttaaaagaagaagttagaaaatctcagcaaatattagagaatcttggcactaacacccaatacataaatcttataagaatagatggaattgattgaggagaaacaatagtcacaggagaagatactctcttgagctaaagacttgaggcttcagaccaaaaaaaaaattaacaagtgctgagttagtatagtgataatgaaagaaggctcacatctagatattattgtgagatttctaaatttcaataataaaaagaaaaacctatacacttcctggtagaatgtaaaaatgtttacaaaggcaagaatcaaattggcattgaacttctaatctgacactctaaatttgccagacagtgtgctcagaaagttcttgatacaagcaaaaataaaaataaaaataaaaactcctgtttattttattcagatgtcttttgatgtttctttgaaatgatgaatataataaggtccatatctaatcttcattgcctttaagattatgtagtatatcctttgacgatgtggctgtatttggtatatctaatcataggaatttaattattcataaattggaagcttaaatatatcattttccaccagtaaagatattcttaataaacaagtgtctaggagttttgtatcttaaactaaaagaaaaatttcagtattggagcaagcctggtgtattaaagtgttattttatttgtggtcattacttttacaatgttgtaatgtagacgatttcttttgtttggaaacataacatagaaccacttacaatttagcaacacttaatgaatcttttactcttttcccaatattttttagctacatcaacttcaaagtcaagtttataatttcattaatgtatgtaatatgtctatatggtgatttaacgaacaaaaatctttaacaaagagataagcatgatggaatacataaacaaaggtggtatgcaatctgactaaagtggtgytaaatggtgataaattctgttttcaaatatttttcatgctatttgttatcagctgtggacatttaatgcctcattagcaatagattgaatcagtactttagaatctatccttggcagtagtaaatgcccattatattcaattataatacatgctgatgtggaaagaagttgaaatagaaatggaatttaaggcccagatctggatttgcaactaacatccatatggctttgagaaaattattcaaatatttagaagaataaaataattttattatatattaaaattttcttctaagcctaaaattctgagaccctcagaatatagactgcatgaaagaaggctgatcaatcttaagagctttttggatctaaactgctactccttaaggagctcttctaaactttcttgagcttaaattgaaaatagtttaactcagttgattatacagcacttggtattaagatagtgggtgttgctcgggtgggtggagaaaagcagatgtgatggagggtctctgtgggtatgtggaagtaaagaggtaatttacgtctcctctcccaccataaccaaataccttgtaggaaccagagacactgtgttatttttccatagctttcctttgagtgtctgttttaataaaactgtgagtgacaatgtcgtaaaaaagtcttaaggaaattttgatacataacccccaaagcattgatagcacctcaacttygacatctcatgrtaccattttcatcttttttccctamtttttattactttcaataggaaagtggctttcttgttcaatttaaatcagtgagtcaaaaggaaggatggcttggggttgctagtgtttgtttgcaagactgtgaactccgtaagagcagaaaatcttataattttaaaattcaactctttatatcttcttcacacagagcctataactttgttaggtactcactattwtttttttgataaaaaatgaatgaccaaggtgaatggccaggatgagggatatatcgatagcatctttgtagcggtgaaaacatagctagccagtaggagtacagagctaattgctggagttctgtagggastcttcagccccttcctccattctctctgttgatcagctgacttgactacaggtcagttctactgaggccaaggctgtttgcctctatatcctaatgctgacaggtttgaagagttgaggtctcagtttgtcagtctagggcctaacattggacatcacttcaagaataataaccagcatttatttagtccataccaactatgaaacatttacatgactttacatgtatttacttgtatgtattatcctattttatcctcacagcaaccctgggagtgatgtgtactactcttatccccgttttacagaaggaagctgaggcatagagaggctgaataatttgcctcaagccattcagataaagtgacaaatgggactgaaatctaggtagtctgacttcagagtcctgtgatcttaatcatttccttttactacctggtttatcagctgaatatatgtaactgtgtgaaactcatgttgccactcatgtggaggtcagtaactaaaaacattttcattacaattattataactatttagggtttaacaagaaaagtaacagaaaattcaaaagtactttaaaatcggccattttcattctttcaaatatgttctgattccacaataagcaaattcacagcaagaatttggagcattagaattattttttaatttaactgagtatcttcatttaattggtatttttaaaaattggttttctctttcttgggtaatgcataaatcttcaaaggagtaacctaatgcactccaattcaaatattaaaaaaatgatttcaatagatggttttcagcaattgtacaaaattaatatggatcaaatagcttttgtratattgttattgygtcatattttaactataaaaatgcaattaatgctcttatarcatattttatggggttaatttccagaagaattacagttaaactaatgtttctctagtaaatacttaggaataattgaatttgcartttggttcttaatttatactgataattgcttcctacaaaaagacatctctaattgtaatcaaakaatatcctctctcctttgtttaaacagcttctcccaagaaatccaagtcctgttttaaaacacaaaacaactcaaacaaaagcattcttaatggaaacttctaatagaaaagctttatcattagccatgaagttatccacttgagtaatcaaatamtatttaagaatgcttcatttagagaaatgttatgtttcatagactgagaaatataaatcaaactgccaatttctggttggcaggtctgtttgaatctggtgggcacaccctgtggtagacagaattcagatgtctctgcaagattcccattcctggttataatcaaatgctaacctaggtaatgttttgaaggaattttgaatatgaaactaatattactaatcattgacgtttaaagaaaaaggagattagcctagattatccaggtgagatcaatrtaatcacatgaaccctttaagggcagaatcggagaacagaaaaatcagtcggtgaggggagcctagaagagaagaggtagaaggggaggttagaaggatttaaaatgtgagaaggacacagcctattgttgctgcctttaagatggaggaaggggacsctgagccaaggaaagtgattgatctytggaagttaagaaccatccctggagaagagccccaaggaaattgagatgtcagttctatggtagcatggaattgaattcagccactgaccttggcgtggaagtactttctttgctcagaccttcaaataagagcccaggctggccagcaacttgatttggaccttttagaccccaggaatcagctgaacccagccagatttctgacctatagaactgagaacaaatacatttatgttgtggtaggctgttgggtttgtggtaatttgttatggcaacaatagtgaactaatgcgtatcccccccatagtggacatattactctcataatatgttgccataactgtcagaaataattgaaagaagaccttaaagaatgtttagggaaagggagatttctataccatgaatctcaaatgttccttgtttaattttttttcaattctccatattggatgagctttgatttagaagacatctcaaaatttattctatttttcatgcaattgtttttatccccccttcctctcctcaccctcactgcctcactgtgttgctgacagcatttatgaacctcagcattctgtacctctcagggctgtaagattgcagcagaataaactctatttaattaactatacattgacaatattttaaagatgaatcctctctttacctcctcaatagattttatcaaagcttggaaaattcatgctcaaggggactgctatatgcagagccctctgtgaaaggagtgttcctgtcccatcctccacccagtgttccctttccttaactgaaaacagctaccagaaaagaggagctgtgggtaaacatggcagttgaatggcaaaatggaaactttagattattttttaactttagatttctttttctttttttctttttttttgacaaaagtctcgctctgtcacccaggctggagtacagtggtgtgatctcggctcactgcaacctctgcctcccggttcaagtgattctcgtgcctcagcctccagagtagctgggactacaggcacatgccaccatgcctggctaattttgtatttttagtagagatggggtttcaccatgttggccaggatggtctcgaactcctgacctcaagtgatccatcagcctcggcctcccaaagttctgggattacaaacgtgagccaccacgctcgggcaactttagatttcttttaacatgatctgctatgacacacaacttattataatatgaaatattttagctatacaaaaaggccttgagaataatgaatgaacacctgtgttaacaccaagcatacagcatattgtaaaaataattgaggcttaattcgttctccgccctctctcagattatttaatatgttatttcaagtaattgaattatattagagatttagaatattggaacatatatattcagtatatggataatatccaagatataaaaatataccaccatcaaatagcacacaaatggctcatttagataatttggtaatccagtttttatccaagtagtcattgtgtttttaatgtagtcaaaatgtctaatttgggaactttgcacaatgagatatatatatatagaatatatatgtgagatattttattatttatttatttttgagacagggtctgactctgtcgcccaggctggagtgcagtggtgccatctcagctcactgcaacctccaccgcccaggtttaagygattctcatgcctcagcctcccaaatagctgggattacagacgtgcaccaccacmcccggttaatttttgtgttattagtagagacgggttttgccatgttggccaggctggtctcaaacttctggcctcaagtgatccgcccacctcggcctcccaaagtgctgggattatagacatgaaccaccgcacccggccaatatattttatatataagattatatatctttgaatatatatgtgtatgtatgtatatatgtggatgtgtatcacacacacacacacacacacacacacacacacacatatgagagttgagaaaaaagttttaggaacccatcctgataagtatatgtgctttcaaatgattttaatttgtgaaaatggaaacaggctcctcattctaaagaaacatgaccttgtaatcctactttttgcagacatatttcccttttatgtttccyattatattcccctatatagtttccttttccatcatcagttcttaatttccttattacttagcaaaaacgctatttcttagtgatawattagtaaattgagtgttggaaagaaactcttttaatatacccttattagaagaaagcatttaactcttttaatacacccttattagaagcaagcatttaaaacaatctgtaaacctgggctagggtgtgagtgaatgattcatgatcctttcatcaatctgatttgatagtgagtagtttgttattagtaaatcaaacaatttatttttatcatcttctgtgatactttaatgggcagctgtgggcactataagagtatatgcttcaaccctgggagtttataatcttttttgaaaagttaaggcatatgcccatgaaaacaaacagagcaagagccaactagatgtaactgacaaatactgttatagggagaaatgcagtcaatagaatatttaagctgtgctgggaagagatgtctgtacagactactaaaaagaacctcttaagtatagataaattgaagaagtaatgagagtgagccagcacagaattattaaagaaaaacaaaagactaaatcttgcttctttattcacttggcttactaggctgttagaaagtatactagagccaggcaatctggatttctgtgagacacttgacattctttctcagagtgtacaaataaaaaaaaatagaaaactatggattttatgtaaggaaatgtacagttagtaacattaatacctcgatgaagaaatgttagtcaaaacatactgctgatactttaacacaaaatggaaaagttgtgtgcgggacaatattctcagctctgttctcttaacgttgtttctgcaaattactggcatgagcaatcaagatgataggagataaaatttgcaaataatcagagcttcagaaaataatgaatgtattacattccaaaatatctggacaggcgggaatagataaaacctaacaagggcaattttatcagaaataaatttaactttgtgctcttatagtaacaaaattaggcaaaaaaaaaattactactcttcaaaaacaaaccaatcatctaaccaaccaaacacactggaaacctcgcggtagtgaaaatacctttcaacagttgtacaagtaggttagatagatagttttaaggattgtgcttgactataaactcaataggggttaatagtatgattctctgataaaatagctaatgtgctagtgtgatcttaggctatatcactgtttcacagcctttttttaaaaaaaactattatccctttaaggagtccctaaaaatgtttttttctgatcacttccccaatgaaatttgaataccacagatatttaagtacataacayatctgttaatgtactttatgtacattatatgtgctttatacattaaaaaagtaagttttttttccccaagaaccagttttcagcctcttgggggtgatatcactcctgttgagcayttatgggctttatttaatagagaatattctagaaagaagaaagaaaaattctgttcttagcagtccttacaataatgtgtttaattctgaataccacattttaagacatatttcaaaacctaatggcatataaaggagagcaattaggatggcacaacatgaagaaattttaaaggcaagcaatggttattctggggaaaatgcaaaaaaggtgtccttattatacctatgttcaagtatataagagactcttatatgacaaaagtgatcaattttttaacagttgctttaggaaaacattttagctaaatattataagttatttaatccaaagtatccaaagatggaacaggctgcttcattaggagttttgttactaaagtacttgaccctgtggtggggaccatggtagaaaaaagtcaaaccctgaatggacaggatgattttagcatctctttcattcctgaaattccgtaataccaggcagcaaatgaattgaatcttgaaggagaagacagagttagatgtgctcagaggatctcatactccaaagtagacagtctggcttaggaaaatacatgggagtcaaggcaaacgaacttggcttctactgtctgctctgtccagaattccctgtttggccccaactggttaccaacatccaggggcctgttttctcgcctgcaatgtgttggacttatattagattgtgtttatcttttctagttctagaaagctaagattctgtgactcaatgatttatagtaggaaaacttcgttcctattgtctaaccttccccaccagctcaagcaattcacaaagtacttataartcataaaccagctgttttggcccttgagttgtaatatgtgacaaaaatatcattttttggaaagtgtaatctctgagaatagtttagaaaggtgaagggaaaaaatttataaaacaaaagaggtgttttatgattaaaaagaagttatgatcatataaaartattgctagtcaggaatttctgacactgtcatctctccacagctgargatctttcagacttttagaacatcaggcctttaaatcctcaatggacaaatgtggccttactggcctatgctggcattgaaacagatgggtcggggaagttagacaatgtttataagaatccatcaattgactttttcagactcatgattgggtaaagattctcagatatttatgttgtttaaatctaagcctatacaaagaatgtctgaaataaaaaagaatacaaagacagagataaaattgtgtgacttttgcatttgcaggaatcattattgaaattacagcatgcaaagggctttactatgtaaaataccaaaagagttgttgcttttgttgttattattatgtgttgacttgatttctttgactgattcacatcctgaagggtctggcagaaatccaatgctttttatcctccatgaaccaattcttacacccattttagtccaattttgttcatgtttttctcctctgagctgaaatgagctgaagtaagcttcattaactgaaaaggcagaaaatttatatgaaatagtagaaattggggaagctgggagagggcaccatgatatgatggcaagagaagaccttgtgttggcagtgtgaccttgggtaagtcacttaacctgtctgacctgttttcttacttgttatacagagtaactacattggcccagccaatcttttttacataattttttatccgctctgtgtatttgtattaaatcactgggagagtctttacaaaacagagatgtctgggtcctatccagtttgtaggaaggtctggatctctgtttttttttttttttttttttaattttttcagctgactcatattcagccagggtggatgagcaaagctttataatattgtcgtaaggacaaaattgaataatattatcaaaggatcctgaaaggcattatttcaatgagcatttcccagtgagaaatatcagtgagagagatttttttcccatgggatttttcttcctagcaacatcagcttctgggctgaatgctatgttctgctccctaccaggaagagtaggagagacggaacatacctagatgaktccagtcagttaatagtcatgtttctagatttcaggcttgtcgtagtcatggcaccaaagataatgagcctgtatctgtcatttcccaaagggcctgacaaggctcacaactactaggctagcttcatccaaccccacaactagatcagaggccaagatcttctcttctctgcatggagatgggaccaatattcatgaaggtctctgccagtaacttacatacagagctccaaacgtttcctaaaattattccttttatggttggtaaatttagggtcttcaagctgtgctcaattatgtgacttagttagtgctataaatctgattgacactttttaaaaaaactatttgagatgtgacagggcaagagtatcaggagctttcattttattattcaatgtcaaccctataaatattyatataaaagtgtctgggggagattaaacttctgataagtattcagcaggacacagaataaagattaatcttttgtataaaagattaaccttttgtatatgataaaaaattaatataaaatataaaattagtacagaagacatttggcaggagagatataggctgaatttgtatgttgaaatggctacagaggttctaatcttatattaagggaaacaaaagaataactggcaaaaaattttactctttaaggtgacaaaggagagaaaatataagtaatagcagtctttgtccaactagaaaaaattctttggagactaatgctaatttaaaaaggagaaaactatgtttaattcacagtgtaacaattttataagattttataagtatgcakargtttctgcattctaaaggacaatcttttcttaattttgctctaggtattcactggttacaagactttaacttggtgtacagaactgaactctgattaactttttagagttatgttctgattgattcagtgattctttcaacactagcaatagaaaacaagagataaaaatctcagtcttcttagaagttagtttccagtagagtgggagagaaaggcagcaaactggagagatacaaaataaytgcttttattcatttgtaatgtgtcaggtggtcttaagcctaggtgaaaagcaaagtgggaaaggcataattgggttactggtgaggatttttttttttttttttgtaaaaggcaaaaacctttttaagtggacatttttgcatagaagtaagaaactaagtgagaaagtcatgaaaatatcctggacaaatttggaggacgatggtcccaaagagtgggaagagtaaattctgaggtatgtgaaagggacataaggggaacggtgcattggtttgggagttgatggtcatgactggggaggggccagcttttaggccattgtaaggacattgttaattattctgaaaaaagggggaatcattagaggttttagatggagaagtaacatgatctgaccttttaacagatcattctggctgttgtgtagagaatagattatagtaagataagactggtactttattataatagctctaggaaactcatacagcaattaaggtgaggacgaagaatgtgccattggattcagctccyggargtcagtggtaaattagacagaagcaatttcagtgaagaagggtcaaaatcttgactggagtgggttcaagggaggaaagaccatagaatgaattgaaagtagtaagtaggtaaacattttaagcaggatttatgtgaaggaggaaacaaataaatgaaattatacttgaaggtagatatgagaccaaaggaggcatttttctccttcctttcctttccctgttttttccctcctcccctccttctctctctctctctcagatgaaaatattgctacatgattgaatgctgatggaaataatctattagagaagataaagttgaggatcttgaaggagggaagcagacaacaattgtagtagaaatacccctaagaggcaaaaggagatgggatctggtgcttaagaggaaggattggccttaggactgagacagaaaggacagaggaagraaggccatgggcatagactgagagagtgaatagatgttgagaaagtaagtagaagagctcttccagttgcttctatttgttaatgaaaggggaagaaagtgtacctgcaaaaacaaaagaaaatggtagggttgttgcatatttaagaggtgaagaaaagttaggagatggtcatctaggacagtagggaagttccagcaaaatgtagtaggattgcaggtgtatgctaaacgccctcttaaagttagtgattatgaattcagagagaccagtaagcaaattgtatatgttttgtcattgcaagaatgtatgtcttaattaattgattaatgttgttaaggataccaatgtctccattgttttaagaaaagttaatttagcagcagaattttagtagaatgtattttccccatgaattagacttgccagataaaatagagaagactctgttagatttgaattttagataaacaacaattcgtttttaagcatatgttttctagtttctaaagttcttggatttaacaactgcaaatgtagaggtcacttgcggcatccagaactttttaattttataatgtgtatggatggtgagcagtgcaccagtttttgaaccagactttttgaagctgcatgaaatttttacaaactaactgtgagctgaattgtaattccaccatacgttgattcgactgtttaacattttcactaaaaattaataagaaatgttgaggcayttaaatctcttaccttgctgcttttgccatctctctgggaacatttaccctgttggcagactctcagcaattttacattaatctcttcrgtgataaagcctgcatyaacaaccttcaggctaataaaagttagccttccagcaatagtggcyaaggtgtacattgtacatagttgttggttttttattttgtttttgttttgttttgttttggtgcacttaaaaccctggagaccaagaggggatatgagagtagagatcaatgctttatacctcaagacttacttcttctgccttatgaarttatttttaactaatataaatgttttaagaggtttaaaaagaaaatgacatttgatatgggttggctgtgtcctcaccaaaatctcarcttgaattgtatctcccagaatccccacgtgttgtgggagggatttgaatcatagggggcggtctttcccatgctattctcgtgatagcgaatmagtmtcacaagaaccgatgggtttatcaggggtttgtctcttgccaccaccatttaagaagtgccttttgcctcccgccatgattctgaggcctcccagccatgtggaactataaatccaattaaacttctttttcttcccagtctcagacatgtttttatcagcagtatgaaaatggactaatataatattagattctaaaattggcagaatgaaaatagtgatatgaatggtctaacatgactgatctaattgtttagtatcaaaaaatatatatttcagttggtttatgaataataattatagstataatttattcagtatttactaygtacgaggcactgtactgagcacttaatataccaaactctaacaaaaacacactaagaactcattaattcacttaaccaatattagttgccataggccttgggaaaatattgaataaaagatacagaaatccctgatcccatggagctcacatttcaataggcaaaagtcaataaataaggaataaatatattagatggtgataagtgctttggagagaaaataaagcaggaaatggggatatgggataatgagagtagagatcaattttaaatagggaagtgaaggaagacttctctgagtttgagcaaaaacctgaaaagaattaaagaagtgatacatattatcagctgaggagaaatcattctagggagaagaaataacaagttaaaattcctgggcaaaaagcataccttctatgttgaaggaatttatgataaattttgtatgcattcatactttcttatcagggaccttttgtaaccaaccacatatttatgagatgacaagttggtcactgatttttgcaaggctcaatcccataactttgtctctctagcacaactctaagaactacagcagtatgaaggttgtccctaaagaaatatggatgtcccacctaaccttagagttatcacaagttaagaggttggaggcatatcacaaattaggctatcttatctgcctcatggatcaaaaamcagtgagttaaaagactatcaagtaatattttagtgatctcacagaagaaccacactggcatcttgaggtacacaagtagaaatagagcaaagcccctttctccattcttttagtcaatgagcagtcaccagttgtatgagcaaatgggcaggtaagatcttggaacccrtgtgcataggttaattcmctattctctcttagaatgaggaataggctgggcacagtggctcatgcttgtaataccggcaatttgggagactaaggcagaaggatcttttaagaccaggagtttgagaccatcctgagcaacttagtgagaccctgtcactatgaaaaagaaaaaaaacccaggaatattgtcaatattgtcataatgatattttgactcctagatcctagaagtactttattttcattaaatctcctagggtcttagtctatttgggctgctataaaacaataccataaagtgggtagcttataaacagcggaagtttatttcttacagttctggaggttgggaagtctaagatcaaagctcgggcagatttgatgtctggtgagggcccactttctggttcatagataatactttctaactgtgtcctcacatggcagaagagataaacatgctcccttgggacctctttcwtaaagccactaatcccattcatgagggctctgctctcattaaccatccacctcccaaaggtcccatctcctaataccatcaccttggaggttaggatttaaacatatgaatatttgtaaaaaaacaagcattcagaccatagcagctccactttcggcatttaaatattccttgtaagtacacaataggtctttctaagtcttttctcacaacaacctgttagaaaatataatagaagcaaagatctcagttacaaaactgarctccttctaaataaaactttagctccttctaaaaatctttgtatggttctcttcctcacttatacaggtctctactcaaagttacctcctcagagagaccttctctctccatctaaatacctagtcagtttctatcttattatagtgcttcattttttatttgagcattgtatatctgaagttaaattgaactacacgtatgtgtgtgtgtgtgtgtgtgtgtgtgtgtgtgtgttttcttaattattttttgtctccctaactaaaatgtaaagttcataaggtatggaaaattttcttgttcaatgatatagtcccagttcttagaagagtttcaggtatatcataagcatttaataaatattcattcagtgaatacatgttgaatgagtgaataaatgaatgaatatgactgagaagaaaaaaactgctgggtatggtggctcacacctgtaatcccaacattttgggaagctgaagcggggggatcccttgaggagtttgagaccagcctggtcaacatgacaaaaccctgtctctactaaaattacaaaacttagccaggtgtggtcgtgggtgcctgtagtcccagctactcaggtggctgaggtgtgaggatcgcttgaacccgtgaggcacaggttgcagtcaactgagatcaggccactgcactccaacctgggcaacagagtgagaccctgtctccaaaaaatattttagaaaagagagagaaggccaggctgcaggcagatgatcaggctaccttccatttgtcacacctcttcttttttccgctttttacttcttttgtgtttgcatgcaaactctccaatgctggcacttaacggtagcctcactcattggctttgtcaaaawtatgtgataacacagaacattgacctcctctcttatattttcactgaggcagaataattcccccactgagttgttcaggaattttaaaaggtaatttattctctcatatctttttagttacataatcttgattatcacatcacttaaatttttatttatttatttcttaattgctcattccagaaatagtgtctcataaaaacaagattttagagctggaaaggattttagagagtatccaatctagctcttcattttcaaatgaagaaatgaatgcagagagagagagggagggggagagagagagagagagaaagagagagagagaattttctagtcattgacaagtgatggaaatcagactcaagcccaggtctcccagacaagttactagagtactagagttaggtgaaagttgtgaaaacaataacaaccaaaacaataaagtagcaatgtttctctccctgttcatcagacagaccaaattgaaagggacacacatctccatgataagtatccacatctccatctttgttttacactatagctactcactgccaaaattgctgattgggtttgcttccaacaatcagcaaaaaaagtacaaggacttaagtgtaaatatttcagctgtgatatttccatgttcgatttccctctcaaaattcttaataaccagggtttaattgcacgactgccttcccatacgrtagctttgtaataatttgaagcaaaaagtaaaactatctgattttcaggtaagaaaattgcagaatttattttaaacaatatttagtgactaagattgctgcatgttattgaaaaatgggtrgaaatctattctcaattaataaaataaaaattataaagcagcagacatgcagtagtttacaaagatgaaagtgtgcaagtacattgctyagtaatatagggtctgatttgggagaaattgcaaagatgacagctgttgaagaagacaaatcaaggagagaagtgcctgaaataaagagtcaggaatttgtcatttgcttcagattggatggtgtaagctttaccgtacatattagtggcagcatgtgatgcctatggatcataatgaattgggatgtgtgttgtttttaactgtggcatcctaacattctacacaaacaggtaaacaaacaataccacattgaagaacaggagcaagaacacagtaaggttgctataagattaaagaacgagagctgctttataaagaaaggctctctaaggcaagtcaggatcaaaacttaaaatttgctatctaaaacctgtagagaatattaatcttttcaataaattgggcagccaaatcaagrttacaatgtcaaataaaatatggcatgaaccttcttttrgcatcaggtccaagtagagaccatcttaacttcttaacatgtagcttcctcgtgccattctcttaagagagagagaaaataaaatcttctcattaaaactggcactgcatcagaaacactgacctctactcagagaaaaacttcaaattttcttatttgagctctttgcatgaaagtgcaagagtatgaagtgtggggacatatggattatcttttaaaagytttaacaatgacaattttggcaggaaacagctttacaattgtcagaagaatattttttcttactcttgggaaggggctacattgcaaaaaacaaaaacaaaaacaaaaaacaacaacaaaaagcactctctcctttcctctctcttcccccaacatctgaatttattatagccctggaagcaattgaaagcccaggtctagcagtcctggcaaagcattatgtcttatctgttatatccaaatattgtcatgacatggatccaagtgcttcatgtatctgccaacatgcttactctggggagaaaataaaaaagtaaatgtttattggggttaataaaatgcacactagaggcagactttcagtgttagaatgggtgttgaactttacataaactagcaagtcctctctcacctatgtataaagtccttcctaacatccctttctgggctcaaactccttggtcactggaacttcactttctgaagctgctccttctacttcacctgtatttctcatggctacaaaaatcattctttccagatgaaatctacttcattgcagcttctgcatattagttttagttttgctccctgaagaaacataatgtaaaactctaattccttttccatatagcaactacttaagtattgaagcaatcgttatttgctgctgcctgtcttatttaggcaaaatatcctcaattatctaattcttccttatattgcagagatcctttgctgtcctgctcacttttctctggacatgcattggattcactgtttaaaactctgcactttgtagctggttgaccttgggaaaattactcaacttctttgtgctgtggttttctcattagaacactgaaaataataacactatttactggccgtgtactaaaatttatgtaaaacatttaaacagaagattcagtaagtactcaataaacgtttactactacttcttctrttattcctatgacagatatgagccacgtcttccatattgaatctgcttttctgtaagtcccaacatttcggtggatggaattgagcctgaagttacttaatacttgtatatactttctgccatttacctatcactgctcctaaaattgtgtacttatccaacttaagatgagttttgagrcttcaatgctctttgrcaattcttctgtaattcctagttatctccctcagtgtctctgcagtgctttcacccgcttcaccctctcaaacctaaaatcctgccattccttccttactatcagaattgtcctcctactttgctgagaaaattgaagccactagactagagatgcatccttatcctatcaccagacttttaatcatactgcattcattcyatgttttcttcctttctgcccattatactggaatattccctcctggcagggcaaagcatgagtgaatctttccacctgtcttgcttctatcccagataccttgttgtattttaataattataatttctcatttgtttagcatcaccatctttctctcttatagattctcttcatcagaagtaaaatgttcacatttctgtcgtcttaaaawaataactatctgttaaggtttagtactagattgtatatatgttacttttcaaaaaagaaacrtgaaaaatctttttaattgtgcaaatatctttaaagaggtaactattctaatttctactttctaaaccttaagtaattttttaaatgacaaataaaattgtgtttatttatcatgtaccacatgatgttttaaaatatgtatacattgtggaaaggctgaatccagataattaacatgcattrcttcacatasttaacatttttttgtggtaagaacacaaaatactttctaagcaattttcaggaatacagttctattaactccactcacygggttgtacaatagatctcttgaacatgttcatcttatccagctgcaatgttgtatcctttgaccattatttccccaactccaccccatcccacagcccatgttaaccactgttccactctttgcttctatgatttcaacctttttagatttcacatgtaagttagatcatgtggtaaagcctgtcttatttcacttactaatgtccctcaggtggatccatgtcatctcaaatgacaggatttccttcttatttaagaccaaatggtattttattgtgtgtrtatgccatattttctttagccattcatatgttgacaaacatttagtttgattccatattttggctattgtgaataatgctgtgaggaacatgggaatgcaggcaatctctttgacatactaatttcataccatttggacatatatccagaagtgagattacaagatcatattgtagtggtattttcaaaattttctgaaaaacctctatattattttccatatggctgtactaatttccattcccaccaggagtgtacaagagttccctttcctccacatcctctccaatacttatctttggtccttttgataatagccattgtaacaggtataaggtgatatagctcattgcagttttaatttacatttccttaatggttagtgaagttgaacagtttttcatatacatgttggccagtgtgcatgacttctttggagaaatgtttattcagatattttgcctatttttttaattgggttatttgggtwtttttctattgaggagtttcacatacatttttggtattaactccttatcagatatatggtttacaatattttcttccattccataggttgtctcttcactctgttaattatttccttggctgtgaagaaactttttagcataatgtaatcccatttgtctattttcacttttgttgccttttcttttgagatcatatccaaaaaatcattgcccagacttatgtcatggagattttcctctatgttttcttctagcagttttacagtttcaggtattgcttgatttacatctttaatccattttgagttgatttttacatatggtgtgtgaaaagggtctaatttcatcttctgcatgtagatatccattttccycaacaaaatttattgaagagacttatcttttccacattttctattcttggcaccctcatcagagattagttgatcatatatacatgggttcatttttggactgtctattccattccattggtctttgtgtacgtttttatgccagtaccacactgttttgattactayagctttgtagtatattttgaaatyggagaatgtgatacctctgattgtgttattttggctcaagattgctttggctattcagcatcttttgtgcttgcatatgaattttaggattttttttctattgctatgaaaagtgacattggcattttaatacagattacattgaatatgtagattgcttggaataatacagacattttaaacaatataaactcttttaatcattgaacatgggataactctacttgtgtcttcttcaatttcttttatcaatgtatcagagttttcaatccacaggtcttttacctcgtttaaatttatttctgcgtattttattgcttttgtagctattataaatgggatagttttcttgatttcttttttggagagtttgttgttagtctgtagaaatactactgatttttgtatgttgatgttgtatcctgcaactttctgaatgtatcagttttaagagtagtttagtgaggtcactaattttttctatttataagatcatgtgatctgcaaagaggggcaatttgacttcctcttttccaatctggatgccatttatttttcttttgcctaattgctctggctgggacttacagcactttagttagacagaaccgaaaagaacgggaatccttgtcttattcctaatcttagaggcatccagtatgatattagccatggatttgtcatatatggaatttactgtgttaaggtatgttccttgtatatctaattttttgataatttttattgcaaaaggatattgaattttgttaaatgcttttttcatccatggacatgatcatatttttctgtcctttattctgttaatgtggtgtatcacatttctagattagcttatattcaaccatacctgcatctctggaataaatcctacttgatcatgataaatgttcctttaaatatactgatgaatttggtttgctagtattttgttgaggatatttgtatctatgttcaccaggaatattggcatgtaattttatttttttgtagtgtccttttatggatttggtatggtggtaatgctaacctcatgaaattagtttggaagtatttcttcttcaatgtttttcagaagagtttgagaaggattggaattaattcttctttaaatgtttgataaaattaagcagtgaagccatctggtcctgggttttctttgattggagactttttattactgatttaatcttcttactcattatgagtttgtttggattttctctttcttttgattcaatctgggtgggtgatatctctagaaatttacccatttcttctaggttattcaattattgaaatataattattcataatagtgtcttatactcttttgcattactgtggtatcagttgtaatgtcccctccttcattcataatgttatttgagtctttctcttttttattagtctacttaaagatttgtccattttgattaacttccaaaaagccacttttgttgattttttttctatcattttctcagtcactatttcatttatttctgctctgatttttattatttcctttcttctgctaactttgggcttagttttttttttttttttttttttagttccttgaggtgtaacatttgtttatttgggatcttcctttttattatgggtgtctattgctataaacttctatcttagaactgcttttgctgcatctcattgagaggtgacaacgtgctagcagcccttgctcgctctcggtgcctccttggccttggcatctactctggccaccatttgaggagccttttagccgttgcactgtgggagcccctctctgggctggccgaggcaggagccggctccctttccttgtggggaggtgtagagggagaggcgcgggtgggaaccggccaatgcgggttctgggtgggcgtgggcttggctggccccgcactcggagccgcaggccagcacagcaggccccgagcagtgaggggcttagcacccgggccagcaggtgcagagggtgcgctgggtcccccagcagtgccggccggcgggcactgcgctggaattctctcagggcctcagccgtctcccagcagggcagggcttgggacccttagcctgccatgcaggagcactgccccccaacccccctccccacgcaaggcccgagcctccccgatgggcgctgcccccttctctgcggygcccagtcccattgaccccccaagggctgaggagtgcggcacttggtgtgggactggcaggcagctcagcccagggatcctgcacgtgatccactagaggaagccagctgggctcctgagtcaggtggggacttggagaacttttttgtctagctggaggattgtatatgcacccaatcagcactctgcttctagctcagggtttgtggatgcaccaatcagcactccatatctagctaatctggtggggacttggagaacttttatgtctagctagaggattttaaatgcaccaatcagcactctgtgtctagctaaasgattgtaaacacactgatcagcactctttgtctagctcamggtttgtaaatgtaccaatcagtgctctgtgtctagctaatctagtggggacttccagaacttttgtgtctagctaaaggattgtaaatgcaccaatcagcaccctgtgaaaacagaccaatcagctctctgtaaaatgggccaatcaacaggatgtgggtggggtcagataagggaataaaagsaggctgcccgagccagcggtggcaacgtgttggggtytccttccaggctgtggaagccttgttctttgtggaagctttgggtctgctttgggtctgcaccgcctttatgagctgtaacactcactgtgaaggtctgcagcttcactcctgaagccagcgagaccacaaacccaccaggagggatgaacaactctggacgggaggaaggaacaactccagatgcgccgcctttaagagctgtgacactcaccaggaaggtctgcagcttcattcctgaagccagcgagaccacgaacccaccagaaggaataaactctggacacatctgaacatctgaaggaatgaactccggacacaccatctttaaaaactgtaacattcatcgtgagggtccgcggcttcattcttgaagtcagcgagaccaagaacccaccaattccggacacatcatgagttttgctgttttgtgtctctcttttcacttatctcaaaatagtttttaatttctcttttactttcttctttgattcgttggttgttaaagagcatattgtttaagtttcatatatttgtgaagtttttgaaatttttccagttaactgatttctaatttcttaccattatgatcagaaaaaatacttaatatgattacatcttttcaaatttgttaagacttgttttgccaatatttctgtgctacacccgggttctgtaatctcccacatgggttcttaagctcttgtgaatgacctaacatatgatctaccctgaagaatgttctgtgtgtgtttgagaaaaaagtatattctgctgctgcttaatgggaatgttctgtatatgtctgttgggtctatttggtctaaagtgtagttttaatctgatgtttacttattgatattttttctggataattttttcattgctgaaagtgggatatttgagtcccctgctattgagaccaggagtgctaatctggtgttggggcctgaggcctgggactgcatgggatgttttagcttccggcttgtctgaaacctggggtaagcctgaagcccgagtctgtggggcttaacctggaggctgggtcccaaggtgctggcctgtgtcaggcctggtcctgggtcaggcttatgcctacatctgtgatgtctggttctgaccaagggccagggctggtagggcttgcctgatactggggctgttcccgagcctagggctgctggggtcagcctggcagtggggcaggcccagagattgagtctattgagcaggcatggatcccagggctgtgggagctatcctagaatccaggtgggcctggaagcttagtctgcaggtatcagcctggagtctggggccataggtgcctgcgtgaagttgggttttgctggagcaggcccagtgttgggttccacagtaagtttggtgctcactttccttcccgtaagggttgggtattgctgctgtctgtgtccgtgctgtatacagtttgtgaagcggcttcacaggtgatttaaaactgtccttcttacctttatcagtgtgtctttcttatttctgtgctccactcagcttctgtaatctctcacatggtttctttagctcttgtgaacttttgtttgtgcatggatatttgttcaaattaatgtttctctgtggggataagcactggaaagttctcttccaccatctttataaaccttttctaattcttatttctactttttattttacctcccatctactccttaattcactctaatcaaacttcagtcgcattctccactgaaatcattgcaatgtttgcaagtattgttcaatcattcctcctttaaacactcttttcttctggmacctattatgccacactctcctgattttccttctacctctctggccatttcctatgaatctactttgtgggtgtttttctactgcctatgttagcgttcctttaaattctgccctaggtattcttctcctaaagagaattctacacaccctcccagaacaagcttatctatttctttgccttaacaacccagctatatgcagatggatctcaaatacacatctcccatctgtaatgatttttctcctgaatttccaacctgtrtataaacyactaygtaatatatatacccaaaaatcagcatatctaaaggagaacttctgtcctcatctaattccrctgccacgcctgtacttttttctccattacctctcgatgaattgtatttatgttcatctggtttcccaaacaaaagtctgggaatcatctttgatttttttacaatcattttttcttgtatgtagctagaatatttcttataatgtgcaaatcttaatttgtcaatgttcttcagaaaacattttagtgtctccccattactgtttgtatraattaaggatcacttgtccccggtctttaggtaggattcgcatattcgactcttttttagagatcatggctacaattcatagctatcttgggcaaattccttctgtgtaatggcatatgaatcattaagtcttaagatggtatggaactccatgacattaatttttttctttttgatgtttgtttaatcctcttaaaaacactcattcaccatggcgggccagagtgatttcccgcagagtgattttcctaatgcccttttgatgggcatcagccgctgtgggcaacacagggtcccttaccccaaaccagtggaatcagaatccctggggaagggacacaagtggaaggcttttgtaaragttcttctggtgatgctaatgagctgtcagggtttaaaacctctggttgagagctgttaggccaatggaggatacataaaagcagggycaatgggatggaaacatggaagttaacagacagggaggaatcatatcaaagataatattctttcaaactttgtagtgttaggtgctccaaatttttatagggggcttgcatctttgggaatggctagggagggttcaacttaagctctccaaacaatctataggcagtttatctctttacttttgctctgagctcattatcattccagcactgaatttcttttttgatagcatatgcttctcttttcttcttcttttcaaaaacatatataaagagttctttttggctgggcacggtggctcacgcctgtaatcccagtacttggggagaccaaggcgggtggatcacgaggtcagaagatcgagaccatcctggctaacaaggtgaaatgccctctctactaaaaatacaaaaaaaaaaaaaatttagctgggcgtggtggcaggtgcctgtagtcccagctactcgggaggctgaggcaggagaatggcctgaacccaggaggcggagcttgcagtgagccaaggtcacaccactgcactccagcctaggcgacagagcaagactctgtctcaagaaaaaaaaaaaaaagagtaatttttataactctctatctctgctattcttcaaaattacttaaatgttaactacattgtgaagacttttgtagtcttcttttccccaaatatagttaattaataactccagcctgcctgttcccaaagtattttaaacaattacctagtcatagttactttcctgtattttgattttttggtttgcrtatcactttttcactctggactatgggaccctgaaagcaagaagctcataataaattaatgayggaatgattagatgaacagatgatatatactttgactctcctggcttgtagtgtatgaaccctttagatgttaatttttggttttacaatgtccattcattcttttaccaaacatgattgagcacaacttgtgtgttaaggcctgtgcgaggcacttatttcwtctgaattttgtccatttacatataagcttctcatggagtctgaggtgcagccgcattctttttctttttttttttcttttttgcttgagatcacagaattattattgatagccttcaaaccctctcaaagtgtcagaataagaggtcattaattatacccatttttctctgaagtttttggaatctagcatggccacatatctgggctactataaactaaaatttacaaggtaattttgttcagagtttccactacttcagtcacaaatgcttttagattggttagcacaggattagaagagcactcctcttgtgactgcttttccatctgaacaagacttgccaaggatgctgtatgttgatgggaatcccagtgagtgaatgatggaagctcaggttgctgctctgtactgctttggttctaattgtggagtctctatcagggaagcctcatcacttttctcaatcttgcctggcaatttagagtataccttaataacataatgtattttcatctctctttcacctttaaaagtatgtggttttagcagattaccracaaaagatgtmtgtatttccatacagacatgtctttattgacagtcttctactccctaccccttccacttgccccaaaaaaggtcagcactattataataaaattgacacttctattgctgtgactgagttattgttttgctcccataacattctgtgatgactacatagttaaagttaactctttgtgctataatctcattttttgtttctgtcccatccgttgtgctggaatgctgatgcctatccacacgtccgcatgtatggttcaagtggatattctattttttcacatcaatttttttcatattgtattagtttattagtcttcctccaatgccagaactttatctgcctttgctctgttatcctagaacatttctgtttctttctttaatttcattatagttcccaaaaggatttatatgcaatttcttcaaaatcctggcaagtttttggaaatataaatgcatgtggtctaaatttacaatgaatagcaaaaatagttaaataataaaaagaggtaaataaagtgggraaaagtactctacctgatattaagttttacactatagctgcaataatcaaagtggtgtgacattgccagagcatagacacatagatcaatggaacagaatagggcagcgatccccaacctttttgggaccagggaccagtttcatggaagacaatttttccacggatagtgagtggaggcaggggtgttttcaagatgaaactgtgccacctcagatcatcaggcattagattctcataaaggacgtgcaacctagatttcttgcatgtgctgttcacaatagggttggagctcgtatgagaatctaatgccaccgctgatctgacagaaggcaaagatcaggcagtaaagttcactcaccaatcctgctgtgtggcttggttgctgataggccacagactggtagttgtctgtggcccaggggttggggagccctggaataggggacccataaatatccccacacaaaaatctgtatattcaacacatttttgacaaagatgcaaaaccaatttaatagaagaaagacagcattttccacaaatggtgttggagcaatttgacacctataggcagcaaaatgagttccgaacgaagtctcacactgtacacaaaaataaactcaaaatggatcagagacaaaggtaaaatattaaaaaattataatataaatacaaaaygtttagaacaaaataggaaaaaatattcgggatctagggctaggcagagtycttgataccacaatcatgaagtgtgaatttaaaaaattgatgaattagacttcatcaaaatgtaaaatgctaactttgtgaaarccatgtgagaataaaattacaagctaaagaatgggagaacayatttgtattgtacatatataccatggaatactactcagcaataaaaaggaataaactgttgataaacaccttaggttgaataaatctccaagaattatgttatgaaaaaaatcccaaaagattacatactatataattccacttataaaacattttgaaataataaaatttagaaatggggaatagttagtggttgtgtgggggcactgagctagcaggaggatgtgggattttgaaggagggagatggatatagttataaaaaggcaacatgaatactcttgtggtgtgggaactgttcaacatcttgactgcggtggtgaatccatgaacctacacaggtgacaaaattgtatagacttattgcacacccacccataccacactaagaaaaattaatacaagtaaaactggagaaaaataagatcagtgagttatatcagtgtcaagaccctgaaaatatagtcttacaaaatgttaccacagggggatgatgtggtaacattttgtaagacggggataaagtttgcaagggatgtctctatattatttcttacaactgcatgtgaatttgtaattatctcaataaagaacccaactaaaatttatttcagacatttacatagtgtctaatatattgtgtatgtgtgtatatmtatatataaacatatatatatatatacatatttgggggggatctgggggtttggatcaagtaagagacttggtctcaaaatatatatatgtaaaatataaaatacayatgtaaaatatactatatgtaaaatatatataatatatgtaaagtattattttatatatatatatakakagagagagasagacagacagacagacagacagacagacagacagagagaccaagtctcttattccgtcactcaggctagtgtgcagtagcatgatcatggcttactgaagcctcaacctcccaagctcaaccaatcctcccaccttaaccccgccaagtagctaggactacaggcatgtgccaccatgcctggctaatttttgtattttttgcagagacgggggcttgtcatattgcccaggctggtctcgaactcccaggctcaagtgatctgcctgtcttggtctctgaaagtgctgggattataggcatgagcctccatgcctggcctattttgtcagcacaccattatattgctgttttctttttgtggcacagctgaaatgttctctactagagctgttacacatcttgtactttcttctttgtgtaaaacttatttgaatgaatcatgatttggaaataaaataaatatttggaaatagaaaaatatacctaacaaaggtagaatgaagagaagggatatgtcttttataaaatggtcaattttgaatttgtgaggacagatacaaatacttgtaattgttaatgaagtgaattagtaaccttcggtttgcagcagagaaagcttagaataaagtagttgttgaacccctttatgtgttacaacagatgaaaaatagagcaagggaccatggggaattatcaatgagttataaaagaagatgattgatgtttatgctagatacctatttcatcagaatagttggggttagtaatgatattaactctactagaaataagaagatgcccttaagtagtcttccatttagagcttatgatgccaatatagctatgctcacaaagatttcagkttctaaaataaatgttgacagggagtagattttattaaggaatgaagattttaagtagattaatarcatgcttccagtcacaaacatggtcttcagttacccagcagagccaagttgctattttcatgtacaagatacattgaattcagatcagtatacaattaaataagaaaatattttctacttggaaataaaatttggtttaaaggataatgtggactcctgattgctgttgacaagatttacaagtttagattgtaaattatgtgataattgttttaagtcactaaactgtgtgatgatttgttattctctgttagctagctggagcacctacatttaagtttgttataatctgatctttgttatcatctgacctctctgtatctatctccatcatctatctatatatgtgtatctatgtatctatctagctctctccctttcaaggctttcctttacatggaagatttgaaaaggtctttttagtggtctgcttaaagagttggtctagaaacaggtactttcacaataatcgctagaacttgtctggaaatgcccctaggattctaaagcagagccttcaacagttaagatgttgactttttcatgttaaagaagaaatcctgcaaggatgtcactgcaaaaataataaattaagtacttaatggtatgctaataaagttttctttgccccttattctctaatttatgtacacaaaagcttattggtaactgtaggcttttaaaatatttggagaatgtttattatatatatatatttttgaaaatggcgggcatttatatttagtaccttgtttggaaatatttctagccaagggaatagtaaagctctggtaaacacacaggtgcttgtatagcagttatagtacactgaataacagtgataggttaaacacattgtatcaaattgaaaagtggagatatgccaatgacagatatcttggcagcggttcatactctgcaacactcacacaactggtgtgtagggtgagtaattttctacctgacctgctgattttctgtgaatatattcaagtactgtttaaatgacctagtcatgttttctgggtggagggaatgtaagatttgatatcaggttttgtgtgtgtgtgtgtgtgtgtgtgtgtttgtgtgtgtgtgtgtgtgtgtgtattttaaagaaatatcaacattttaattgcagaattttctgaagaaaatgagaatttcaattatctattatttcaggctgtggcagtttaactttcatatgagaagttagggatagatgagcctgacccaaagaacatctggaagtaagctaatttctcgacctttgtttcgttttatccacatatcatggcattgaattgtgactatctgctgcctgtttatctataatggttcttttgcacagaagaaggcaacaggctcagataagttctgtattctcaaaccttaccttagaattgccatttttatggttgtattcataatttcaaatgtgttctgctgtagctttgggttttttgttttgtttttcatttacagagtccctagcaaggaatgagaagcctgctggctataagacatattttgcatacattttgaagtacttttaacaaggagacagcaaagcagaccattatttgctagatgcagttacaactgcttggactcatgaacaattccagggcaggggtcctggattctaacacctgacaaactaatattaagagatgtttctctctcaatgaaagttttttatcacaatgaaaaagagcagtaagcacatattaaatatgttttaaataaaggaataaacttgtcttcagtttccaagttaaactatatttcaaaagatcaaataacaaagataacacacagctgttcctgtcatctaatggtgcataataaatcatcccaaaatgtggtgacttaagacaacaatcatttattatctcttatagtttctgtgggttaggagcagtcacaagcccttacccagattcaatggaaagagtgtagacccattttagggagattatgtgggttgagacataatattagtctggccatttttagaaaatgcaatatgctacaacatggaaatttctttttctacaaagaagtgtcacaagattggtggcttcaytggctatatgtagttatatctatgtgtgttggaatttatatctttaaatttaatatggcataaaaagcatttctcaacaacttcatttttcaaaggaattattgcaatgactataattttccttcctaaggataggccataacttaacacttatatgacagtttcatttttttgctgttataaacaacactctactacatatatacatatacttctagatagagtggttccttaattgtatcacttgggattgcatttggctgcaaataacaatcaatttaaaaatgatttttgtttttttctcccatgtcaaaaagttgaggggttggtgattgctagcatgcgttcatttgctcaatgatgtttccaaggatcttttggatgcttggtatgtttgttcgcttttatctttatagttttaagattatgtctgccctcttggtattttgtctgcatcccagwtgggaggagaacaaaggggaaaaagtcaaaggaatatattctagtgaatcttgactactaatggtggggggaaaaattcttccctggggaactgtgcctaatctcattggcacatggttcagcctagcaataaaggagaccgaaaaaatgagtattctgtttgctgggtattatgattttcttaagttggctccccgtaagtatactttgatacggatagttctatcctgaagatttactggggagtaatcttcagagataagcctgtaatgaagggagaaaggtagaattgggtagaagcagcagctgacttacaatgaatgtggttgcaactgaaaccttacctgaactcttagggactctggagctcaggtgacctttcagaattgtcacatgtagaggcaagggacctatgcctttgtaatcccaactcactccatcattaattgtgagcttcccctgggaagagacattgccttggggaaggtagtttcctacaacctaggacagttcctagtgaacgactatgccatgagtggtyratagcagttatccccagcagctgaaagatggatgtatccaatatgaagaggagatatggccagagctctgtgatatgcaatagaggggagaaaagacacaggaaagaggagttgagagtaggcattgggtgagtttatctgccacactgaaaatgtgtattttgtgtatttactcttttgtatttaacagtgttttccaaaacttttaattaagcacatattccttttgaaataataagatttctgaacacttaaagtaaaatatatctgcatgtatgtagctatacagacagagagagagagagaggtgcacagttcatccgtagtataattgtagaagagaaacaagtcttttttttaaacttacctagggatttaaaatgactacagtaatgaattaaaagtgacatatatgaagtaaaatctttgacttggtaaatttattcatgttattttagctttacatgcatacttatttaaacataaaaggacacacagtattagaatgattcttgttacagattatgtctttttaaggtagttatgaactcccaaagcacagtgttgcatagtgacttctaaataaatacttcaagttttatctttttactggagaatatgaaagagtggagagttagaaggatttaaagttatattwttgagtcatactctaaaatatgtgatgtgtttccactaactggacatatttgaggggaccacaaatatgaatccctttgggttagtcatcttcatggaagatgagtaaaatataagataacagtaaataaagttcattctgtctggattccaatacctatactgccatttctccttttttcaaatcatactgcttcctatattcatagcrcaacctctacttcatcagcacctgctaacagagcaaggataaatacgaatactttattggacccactaataaaaatggccactgtaactaggatgcagatcttgaaataataaaatgtttttttcaaaactatcttaaatactcactgtaactcataatatttaactggagaagmaattataattgatttctttttctatggttcaactaatgtaccatagcmtttgaggcttttccctcatgaatttgtggctcccaaaacagtgatttcaggtacacttactgcattatagcaaaatattctattcaatttactaaacgtagatataaaactagcccctggctcacagactctatttccaaagcaacaggaaatgaattattcaccaacagagaaatatatttttatttctctgcacataaatatatgtttaaagtgcaaagattaaaaaaaacatattgtttgttatgttttatttaccacagagacagtgatgtgaaaaaggcagaatgagaggaaaagtatgagggattttgtattctacaagatgggataactagtgggaagggaaagaaactatgtgacaagaataacgaatgggcgggggagaaaagagaaaagaatgatagttcagagcccagaaatcaacaaaggtaggtcaactgtgattcctggagataccagaaagtaccagctgtgatcacagcagtacattgattatgtagagactgaattcagtttcagagaagggaagatgatggtgtgggccttgaaaaaagaggatgtggaagatgaatggaggaagacagcagggactggcattagtctatttatgggaaaagaaagagcaacagattttagcctattaatttcaagtgaatagattaagcctattaatatcaattgaatataattgcctgcccccgcccagaagtccacttctagagttggggcggcggaggggtgggcggcggcgggaggatattatattcaattaaagtccgcttctagaggatgcagggaaaatacattcatttgaaattaataggctaaatagaatgtgctgggaaagaggaaatcacgaattgcacttgagttgccagcaacccttagagatgtctgaaaagcaaatttaaaaacaagtcacttgcaggaacagtttccagttcttaataagataattcagaatttgagacaaaatcatgaacaaagattgcaagagggattttgctaagctaaaaacccttgcagagaacgcctagaatggcattgcttagatttaagctttttcttggaaatgtgagaagtgrcgcagctgacagtcttgtcttgttcttccagtggtggaaggtgataatgagccatcagggtccaaagggtaggctgttagggaagagaaacattgtgcctggacaaacagcataatcagccctcaagtaatccagccatggttgtggttttatgcagggatggcagctgcccattagtgttaattaaccaacaaggtgtgggtgtgctttccaaagactggcagccaggggcaggagggatccatagtagtcagaggctgaaggtgagggtaggactctaacttctgtgatgaaaaatgaactgggcttttattggcattctctgtttctggctactgagcatccaggacgctttgtactctgtgtcccaagggggaggtgctcattaaggttaccatctcataggtgagaaagctcagcctctgccctcaagagctggggaaggaagcaacctgtctcctgacttctggaacaaaacggcatacactgagcaaagccagaatgctgtgggatttctttcttcagaggctgagcctgacaacggtttgaaaggctccaggtgcagtgcaagcaagccagccttctgaaacagggtcaaaaactggactagttgatggcaaatgccctccaactcctgtgactcagactcagagcctttgagcaatgctggtgagaatccaggcctggctggtgcaaccatgtagtgccatgtggctgatgtgcatggagctaccttgaatgcagcattgctttcttgaattttgatttaagtttcatgttacttgacataagaattgaaaacaactaaatacataggaagtattgtaataaggatagaaataaaataacatgcaatgtaactttcagtatttgcaataacagttttcattagaccattcactatttcttaaagagaatttgtatttaaacgaaacatttctgatttatccaaaaatcttctgttactgggatttattaatattaaaacttctatgttttctatcaacacatttttatatgacagtcttatttttagagttttattaaacaattcaattgatatatagaaattgtctttctttaagactttttaaaactatccagctaacattttttaaagcttcactgcgttatctccttattatgaagcccatcagcatttagtgttttactcgtttagcatagtatacactgtcatttaaatgttttcattattaatagctctaaatgttttgtgtatttacatctaaatctctcatttattgaagcatggcaactactttttccccatcttctcttctttttctttcagtgcctggaacatgcctgatagataataaatatttgtggattttgttgttgtctttaggcctctgtaaagagatcaatcataaataagtatagagaagacaacgtgaaaaatattttatttgcaatgttgggttaaatgtattcaacagaagctttaagaacccactgcttgcaatatcttagaaccaaaaagaggagtaagatggtttctgtcttcaaggatttcacaatttaaccttgtgcaaatagaattmatatgttggtttgctctaattatggaaggttagtatacaagatcccttcttactcctccctcctcccttctagaactactaggaaccataaataatatatatttaaaaaaattactaagattacactgcaagtgtcttatcctatcctctagtaatggccactactcacagtatgtgtccagtatttcagtgtgctgtagaggtacaggggtagttaagattaaacctgtaatagcttatgcccctgctaacgttaaagggcctaaatattttattttcttttaattctatattacataattagctatacttcatttttatcatataattaaatgcagaacacattcaaggagccctcctgagattcagggacccaagaatgaggggatatgaaatcatagtatttaataatagtacatgcacatatttgtaaattttgctcggacttcatatatacatacacaaatgtgcttgcctctcttccactccacacacacacacacacacacacacacacacacacacacacacacagtgttcttccaatttgtttcactcattatcggcaatttatactcagagacaaggggctttctctgggattataattatggtaaatttcaaagcttctttgcctatttccttcaaagtcataataaatagatgcctacaggaaaaaaatagtttcacagattattgttatgatgtcttcgaagatagaagttgccagatgattgattgcctactgtcattctactaagagacccgttcttttgtgaaagtaaggaatgaatctgggtgtgtatttcgtgattagttagggaatcaggtgatattgatggtctcatccacatccaggaagtttacacaattgcaattcaattaactttgtcctatgcaacaccttctgttcccatgatagcatttgaacagtgcaatatgtacaaaacatgttgattcagaaatagactcactgaaaactttatattggttttaatatattgtatctctctttaagaaaatcccttctctttctgccatgtgagaaatcaggtcactggtcataaaattgctttgaaatttgacagcaatttcaatgataatgaaagctaattatagcattgttttgacatctaccctttccacaatgatcctattaataaacacttattagacctgcatgcttcatatttattcttgacctcagtgacaacaaagaataacactagtttaggaaacaacacttaatcctgtctttaatttatagtttagatttgtttcatctctttggtacttcaatatattttatttggtactgtttattatattaaatttactaggcaggtgacacatacttttatcctttgagtggtgattctgaggtgaataatagcttaatttagagagggaccttgaataaactatctagctggttttaccattataatttacatcacacagcaatatgaggtgtgtgtgtccatttacagttatatattgttccaaactaaaagggaaatatatttggcaaaatgggactcttagagcagtctacattgcagacttcaatttgagctatgtaacatatatttctcataatttattggaagcaataatactgtaacagccaaatatgtttgagtttgtgtgtatgtgtgttttcatctcaattgcttcttttgtgatggcacattctgacgcagcatactgatacctctttttcagaacaatgttgacatatgtccacttagacaaatgaatattttcatctttaatgacttatttgagagggacaagaatttcagacacaaatttgaatagaattggaggtgtgagtaagataggaaaaaggaagaaatgtaggaccatgttataattattcaatcataagaatcattaccttatatctgctgcagacacacacacacacacacacacacacacacacacacacaccatgcacagagtacctttccaaacatgttgaatttaaattcattattaagatcaatattggctggtatgattttgtcattgataagaagctttaattgacttgtttttgtgccattatttgacattaagacaaggtaaaaccagtgccttgtttccctactgtgaattctcaatcatttttgtgaatcatcattttaaatataacagcatatgagaccatgaaaactattttctgcttagcagcatttttttctatgtaatcattatatatgtgtattttctggaaaccttatttataaatggttctgtatcttcaggcttcgcaataagtgtcatgattaatacaattttcttgattggtattaaaaattcacatacaggtatagataggttttattctcttcaaaatgattcatttttattataataagccaaattataaattattaagaatatagaaaaggaaagttgaaattaccttgattttcactcctcagagatcatcacaattgccattttggggaggatcattttggatatcacatttccatatgcatacacaaaaccttaccatctttcataaatgagattattacacatgctgttttacttgtcattggtgtgttccatatacaccaatacatataggactatttcatcaatcgcgtttttttgtaaattagaaaactaatttcactgttaatatagtgaaaaatatacttggaaaaacttcagtcgatatagaaacatagtcaaaaggggatacttctcttcatagcaatagtaatcctaccttctctcccatatataactcaaattaacagtaggaattatcactgtggacattatactttgcatttatacataattttaagtaaataatttttttttttgagayggagtcttgctctgttgcccaggctggagtgcagtggcaggatctcggctcactgcaagctctgccttctgggttcacgccattctcctgccttagcctcccaagtagctgggactacaagtgcccgccaccaaacccggctaattttttgtatttttagtagagacggggtttcaccatgttagccaggatggtcttgatctcctgacctcgtgatctgcccgccttggcctcccaaagtgctgggattacaggcgtgagccactgcacctggtcatgtaagtaaataattttaaatagaatcatgttttccattctgcagtatctcacttaaaattatatacttgagatattttacagcagcataacattttattttttttacagaatcataatattacataatttattctccactgttaaatatttagattcattttcgcttttacaaataaagttttcacgtggctgtgagtctgttcacatatgcaagtatttctgaatgacagattccattaaattgaattgctacagttctgaacattttaaattttcgtaggtgaaactaaattgctctctgaaaagttggccatttaccttccagttgtatccccatattctcagcagtattggataatatcaaaaactttttacatatttctgatctgatgagcaaaaaccgtgattttcttgcttagttgaatatcctgcttagtaagagctagactgagaatcttttcatgtatttattagtcatatttcatatgtaaagtctctatttaaatattttgtccatttttaatggccttttttccttattgatacttaggagctatttatacctgtggataataatttttattatcaaatataaaaacaaagttttgcctatcttttgtattttaactttattttcaatattttgacatttaaaattttttatgtagtaatatattctagcctttttacataattgcacttttctcctgaaagtagagagcaggaaattgggccatcaccaatattttttaccattaccctgaaaaacactaaatttttgtgtttttaattactggcacataatacttttcttcattcttttttttttttttttttttgagatggagtttcattcttgtcacccaggctggaatgcaatgaagtgatctcggctcacttcaacctctgcctcccaggttcaagcgattctcctgcctcggcctcccaagtagctgggattacaggcatgcgccaccaagcccggctaatttttgtattttttagtagagatggggttgcaccgtgttggccaggctggtctcaaactcttgacctcaggagattcacccacctcagcctcccaaagtgccgggattacagacgtgagccaccgtacccagcccattccccatttttataaaayttatttgccagcctttcatatattcttccagatgcacattaaaatttacctaagttcagtatagctctatamatttaatagacaaattttatgagagataacattatattttgcaatactgagtttttccatccaggaatctgatatttctcactattcattccattctctttttatatcattaagtaaaatttaatacatvtatagatatgcacacatatctataattgtgcttatttcaatagatatatactgctatgaaatttataatatttagttgctataataacaaattttgtcatgaaaacttttawaatatatagaaaaatatattattcatctcacattcattctgcatgaagaagtgttacygaatactcaatagtaataacagttttcagataatcttgttttccctaggtagacaattttgagacctgggaataaatatagttatttgttaacaatatttgcatctattgcttttttttattcatttagatttactagaaccttgagtaaaatattgattaacctcacttatagtgggaatgcttatcttaatcttgaattttgagcatgacacttgctggaaatttctggattttgtttgagattaagaattattcttcctattcatagattgctaaggttttgagtttgttttttagtgtagttttgctttgctttaatcagaataggcataaacctgtcatcaatgctttttaaaaatctattgatatccagttcaaaaaggaatttcagtattagatctctcartcatgagtcatttgttcattctgggaataaacaacattgtcttgctttattattaytttttattacacagttgaattaaattggctaatatttcatctacaaattcatgtttaaattaataggaacrttgcctgatagctcttctcctttgtctaatttctgtctaattttgttatcagttacataagcagtaaaacaaaattattgaaatggaaagaggtctagaaatgaagtcaatctgttcctcatcttatagatggatgaccaaagacagagaggtaaagcaaaactaatatcagagaccggattgtgtgattgaggattcataaaatttgggaagcagcttgagatgcaaagttcaagagaatatgaatttcctaagtaataatttgtctccatgtaacactcttactacagtcatctctatgaagttcacctacctctatcttcttrtagtatttggagacagagttttagtttttgatcctttcacgtgtccctttaaatagattgtgcttgttgggattcactttcattgattttgacttctatcatttccctgacagttcccagcccacataataggtgcataatcaatatttgttagttgatgaaattgtttccctgcaatttgctatgtgcttttacagcacagttatattagttaaatattctacagarcccataattcataatcatttcttattactaccaagggaagcagagcagcgctgcttcactaggagaaagagaagggctgacttgttagccagaggtcattyggtgccaacatggggagatcacagctctttctgcaattatcagaagcagagcatatattacattctgaaatagacaatgaagctcttggatttgtcgatggaagttactgtgcctctttccatctgccacacttgccaacatttggcatccagcttgggccctttaagagttactttacttgattaaaaataaataaattaaaagctaaattgggacctattcartagttccatatttgatatcttaagtgaaggtaaaacttgaaagaagctgccccccaagccttgttaaggatgatggccagactagaagaaaaacaagtacttttcttgaaagtccagttgtctaagcctttgtagaatattgaaaatgaatttcaaaggaaaaatttcattcctctttatttcttgtcctgaatttctgctgctgactcctcccttaaaacccatttttcttctatttgtcatctcatgttcatcaagaagatgatacattctcaagcatactgattcaggcattcatgcattcattcacyccccaaagaactatttatagactgtctactgtgtgtcaggtactggcactgtaggctgaatgatgagcaaatacaggggtggtccctgcttttataaatctggggaaatgtatgctaatcaaataatcttcccagtgaacatataattataaactgagaatcatgctctgaaggaaaaatctgacttaggtgggcagaagtttcaggtattctgtgtggaggtggaggacagtgttggtgaaaaactttccaaggaattacttttgagcagagatctgatggatagcagttaagcaagtataagtggtgtgaaggtggctgtgaaaagggaggaagagagcattccagccaacagagaacagtatgtacagatgttttctggcagaagcaagcattgatacataaaagtacattgatatagctgaagcaaagagagaacaagaactacacatgatgactctcaggccagactgcaagacgtagtagggatgggggtatgatgtggggatggaaaggtgatgatgggggaaccaaatttgcatctgaaaaaatttgttggctgcaatgtgaacatattgtagagaaagaacatttgctgacaacaaaagctaaaactggaaacaagaataaaataaataaaactgatcaaaatcttaactagggtagaggacagcaaaaatataggttggtgcaaaagtaattgcagtttctgccattgcaaaaaccacaatcacttttgcaccaacctaatacatgatttgagatattactgagaggtaaaatgttttaaaatggatagatgggagaatgagagagtgagtattatccaggcgacctgtagctctctgccttgagtcataagactcatggggttactttacctcatacacagtcctctgttcatgtcagactagtttaaccatcatcatttgacttgaacactctaggaatgattagcatggttgtctctgtggctgaactggatattttcagggataacttacttgacctctcagcagttgatatatgatatcatcctcttgaaaccttttcttctcctggtctccatgacatcacagtattgtgggcaacctttcttatctctggccactttttstaagtctcattgaaggagtaacctcatgtttctgcctaataaatattaatatcttatatacctccaagaactytttctcctcacataatcatatctaattaccatcaataaactagtaacttcttaattaatatctctactgtagaccccctcttaactacacatctaactatatgtagtttatgtcttcttatgtatctcagtggcaactcaaactcaaagtatctgattcaactcttgctatctcctaccaacctgaagaacttctagtgttccatctatcagtgatttggctagtgactttgtagttttgctacttactactgtgtccaaggggcatagacaccatttttccttcttcatgcttcttcacaagcttttatgaactgccatttatttctaaattcagaaagaagcccaagtctcctttgccaatacaagttaaaaataaataacacatttcagctagattatttccacacccatattcaaagtttttctctgtttatttgtatctttgctacagatttgtctaatcttgatgtttccaatgaatatacacagtcagactgaaatccactcggggcagttaagtttaataacctaaggactttcttttctcaggtgtttccccccataacctaaagcaataattcttacctttatattcatayggtacagaattaggatcatttttattaggaaggagtggaagaaaggacacagcttccaacgaacaaattaagttgtacacaggactttaaaaaatagaattcaccaaatgtgttaatttcagacacaatagacaataatttatattaacaatgattcagttccagatagagataaattattatttttatttatttacatagatgaaatgctattttcggggtatttaacttgatgggaaaatatttttaaaagaatatatcatcgtctttaccctcaagcagctcaccatctgatagatacataaatgagtttagagagaaggagaattygctataatgcgagagtgtgggaagataaagatatggatcctgggcatctgaaaagagtttgtggaagagacaatatttgatccaggccttgaagtataggtatgattttcaaagagtatgtgaggggtggttttcaaacagaatgagcagcttgctgaaagataaactcaaaaatgataaattattttcttcaagaattagatgttctcttgtacctgatatgtaacatgttctaatagacattgaagaattagatcgtcaaaggaagacacttatctgtatgtgcaggaactgatatgactgtctccttccttacatttgttcctaacactaggacatgcaggctgactaaacccagaggcaggcatttaatgagaagttgcctttcacagaaataattatggttatacattaccagctttcaactttgttgaaagtatccatctgagattagtacattcttagggtataagtttctggctcagtacttactaagaatcgtggttctctggttgtatgcaaaggaaaataaatttggcttacttaaaaagaaaataaagactttatggaagacataaggtaatgcacataaatcagaatgaaagaaggctaagattcgacagaacaaagagtgattcagggctgtaggtggcactagtaagtaagggatatgcccaggctagacctaggggaggaccaggatccttgattgacagtcgtaccaagactttacaccactaggttagaaaaagaactgttctccgagggaaatcagtgttattaccaaagggaggaatggattttggatggaaggccagaatatcccctayacttgattttcttattttaatttttagccttttctctatttctcaagtagaagtttaagtcattatttcttgcctctaatgtgtgaagctttctattaaacttcctacgctawcccacacatgttcaggtcattcttttttagactttcacctcagtacatttatcttcgggaaagactgtctattcaaacacatgaaaattaaccaaaatcctagtatgtatctgtgtgttgtcatgtgtgtattgttgttgttgttgttgttgttgtgtgtgtgtatgtgttggagatgggggaggtggtatatcagaatcacctgggagaacttttaaaaaatctaattatacagtccttacacctctgtcttccatgcgtatacacacttaatgtatcagaatatcttgacagaagggaattggacttttctttttaatagctatttactggtgattctattactcttaccatctctcttatcccacaagttgaggactattgatttggattttttgtaggccccattttatttccattattgaatatatttgccattctgtattctagaacaagtaggagaaatttgttgagagaaatatttcatctccttataaagaagaacttcataacttgtgtaactttgtaactttgggctgtcctgcaatgggactagactgccctggaagacaataaattatctgcctctggaagtatttacacaagagttgcatgaccaattgccagatgggaaaatgcatgaaaatgagacagtgacctttctcccccattgagagctaggagacgtggtgacatgatattacaattaactatatgaacaatatataaacaatgaatgtgtgacaatgaaaatctcagcaaacatcaaggtttgcttcgtgttctggagagatcatattacaggtaaatacctgtgtgggaacttcttggtgacagactgaatgatatgtgataagcagctgtccaaatagtgtactcattcctaacaatgatttcatttcagttttctaagatgactgagaacactaccagtgcccctgagatttcagataaaacttaatactagaacgttaaaacataccatgctctgatattcaatttatttaaaatagaatatctttaccagattagaacaaagtaatgatgaaaagcagacttaacctatagtatggtagatcttttttaaagggtcattgaraaaattttccatctcaaaatatctgtttcattgcygtccctggctctaccactggtgactcatycttttgtttcaagcctgatcatcctcctgaccttgatagagagtgagggacagaactagcctaggtgtcaggattctacaaggccaggctccacaacagggaatttctcacctgaaaccatgggttagggagtgaaggatactatgttctctgctgagtgaaagaaaagactcaaagtccagcaaatggaaatcatgacagaaacatactaactagtatacagaactggaactaggggtcagtgccatggcacatggctgtaatcctagcactttgggagactgaggcagatggattgcttgaggtcaggaggtcaaaaccagcttagccaacatggcgaaaccccgtctctacaaaaaatacaaaaattagccaggtgtggtggtgcgcacctgtagtcccagctacttgaggggctgtggtgggaggatcatttgagcccaggaggtggaggttgcagtgagcctagatcgagccactgcactccagcctgggcgacctagtgagacttggtctctaaataaataagtaaataaaatgaacttgaactaggaaccagaaggaagggaacaaacattaacatgattgttcagctgaggaattgtctggctaggcattctcatctacartgttttttagagcccaaatagggcaataaggtcagccatgtttaaagggcctagaatataccatacattttagagggcagaaggaatggtgggaaggaaagagctgcaagagagggatgctaataaaaaacttcactctcctctcataacaagacacatatccctgtttgaagacttcttgtttgtttttaaattattacaatattggtaattattttaaggatgtaatttaatctttcataaaaatgaaagaacattttgtcccaggtttttcttttcaataaatgtgtaaatttaaataactaccttttgtcccatttatttaagataakttagattctgctttttgtagacttggttaaggatgtagcaaaataccaataaaaagtctggtcaatcatttcaatgccagaatgcttttcaagactttcttcagggtagcaaaaaggacatacacatattgctagttaatagtcgccctgccattggttggtttgagtatgtttcatccccctgcttaattttgttttcttatttatacaatataagattagagagtggggttaaatgtcacaaaatggtgacctgtgaactaaagtaagccaacagactgttagtttggctaagacattgagtttttcctttcatttctctcgttttaatgaatgcctttcagtagggcatacataatcattttgtctggggacccacaaccccagcctactactgagttcaatctagactcaatgtttgtatcccatcccctgcatggctcttgaaagcatttgagtttgtggctcttgggtcagacatattgttaaatttctttaggctcctaaggctttaattctacaaaacctctgagagtatgaaatttctttttttcttttctttttctttccattagttgagagatagattaaatggaaggcaattcatacatggtgarggccaccaggcttcagactctccccatacattatctcgtttaattctcaaagcatcccagtgaggtcatcattatcatactcattttatargtgacaaaacaaggtcaaataatttaatatcttgctcatratcagaagcttattaactgtaggaaytgggttcaaacccaaatctgtttgtctccaaaaactcccgatatccttgtttccctcagtgagcagaaacattctacagagatcttatgaataccaacaaagctttgcccacattttgcgcagatacacaaaggatatcaaatgtccaaatatctaaaactatttttacagaacatcttatttgcaggctgtattctttgaccagcagggaattacatttctactgttcttgggaacatacttgactaaagagccatgcagaatttaggaagaatcatcattagaagaaatttggctttattcacacactgatgtaacattagaaaatatgtcataaaatcattcaaatttgaaatgtaaagatattttatttctaacacttttctgttttgtcacagatattacktatcttaaaattcgaccttgtttgtacacaatagcactaaaactgcacatgacttgaaatatactctattacctagtaactttgacagaacagttctggtaaggagaagttcaagtatgtgcaggcatagaatacatgaagacaaaaagagtgttagtatgatgactgagcagaaaactttgagtagaaaacacaactttcagttgtgttgtattttcattagagggttgtataaaattaattctgctaatataaacacacactgtgtttaacataatttctatactatgtcagtcacttaattggcttttaataagcctcggtggccagcaaatatccagaagaagaatgtatactttcaaaaggaaaaagaagaaaatgaggatacagtaaatataagtaagtaaaataaaaaagtatctacatagggccagttttttataatttctaagctttgggttaaccagcattcttctaatttgaccacattgagccaatgatttttatttttatttttatttttttactttaaacaaacagtgctcaattttacaggtcagtattttttgcaaatgcagtgtgaattaatataatacaaattaaagcaattagactgtcaagtttcacttttagtgattggggtttggggagtggaaaggggcacagaaactgttgcccttttcaaacaactcacaaatgtgctaattatgtgtcagaaattatgaaagttgaggcattgtgaccttcaagccaacaaaagaccttttcaagtaagccatccccatgtacattaataaagtgagcaatgcccttccacagttaaataatgtatggctgttatttcattatatgtgaatgaaaaccgaggagttatttcactattggcatattaaaagaaatgttataaaaaagcaaagactgtaaatccatttaaataacattttgtggtacttttaaaatagtgatccaaagtcatatgttgtttatttccactgcatgtggctaatgsgtagtttctccgcaactggatgtattttagatcttagcaggaaaaactgcaatgcgttaaagtataaaacaactgacagagatattttaaaagttagaaaaattactgttagataaagtaaatccttgcaatgataaagacaatgagatattttgtagatcagagaaaacattgcctctgtccataagccttactgtgttagtaagaagaatcttgaacaagagtggggtgcagaggaagggaaaataacctctcactcttcatcatggctctttcatggtctgaagaaagtatttgtaaaccttggatttaggtcatggacataatggtaattaaaacagcactcattttgttggaagaaaatgtaaatttcaaaagcaataatataagagaaatttgggtgtcactaatgcttgaatcaaatgcactgcaggaatgtcaaacagtgcccatgaagttgtagtggaaaatcaagagcaggaagaagttaattatcttgtatttgttcagctttgtagtatatttgatgcaaacaaaatgtataaagatacagtcatacttaatgcaacttaaatatgagtaatagacctctgggaaataataaaccaattacaaatttaaaataaatcacaatcatatgagattccaaaaacctattagcattcaatccacagataaacttttgtttttccagtctcacaatagcttcttattatgggttagatgttgataccaagagactgtatagggtttactgattctctcactagtctctcctcattttaaacaattatctaggtccttttattgttatttgctttaatagattctctgaattctttcataaaatagataccagtgatgattttgagaatgttatttgtcattgagattcttgatgaatgtgtacatgttcttgttcagtataagtgttgctgcatttccttgctaatctaaaataatttccattattttggattgtatttaaggtggcaaatcttgcttgttccatgtcaacaaatgaagatggaattaaaattgtcaaaattgcagccaatcatttggaaaccttgtgtccacaggtatgacaactaagttactttttgtgtgtaaaattatatataattcctaatgcttttatgcatatgaaaatacactatttttttttctttttttttttttgagaccaggtctcgctctgttgcccaggctggaatgcagtggcgcaatctcgactgactgcaacttctgcttcctgagtagctgggattacaggcatgcgccaccatgcctggctaatttctgtatttttaatagagatggggtttyaccatgttggccaggctggtctcgaactcctgacctmaagtgatctgcccacctcggcctcccaaactgttgggattacaggcgtgagccaccgtgcccagccaaaatgtttatttgaagcatggaagacagaattgtcctaaggcgattcttaaaaagagagtagagaaaaagactgacattctttaagtggccatattggaatctcctgaggcaaaggtgctttgtccaaatgatttgatttatttttagtaattatttattttgaaatttcaaatcagctgaaagaattgactctttttttcttttatcaaagaaggtatcggtttgaaaaaagttaagaaatattttcttgtyggtaattcagatgtttcttaaaatctgaagagtgacacacttttagggaattatttctacatgacaaatggttttgaagccatgaatcaagatacacatagagaaattttaaacactcttatctgagaagaagcaggatataatacggatacttcctaataaagaccacaaatgttataaggatgagaaawataacaaagattagggactttaagtctctggacgtctcctgagaktctcagtctacaaaaagtagggcatgtgttaaattattgatttgccttgctgacaatttcatctctaagaatattaaggaaactgtgaaggaaactgcttctttggacttaatgttgattaacaagtaagaacaagctggaaaagtgggatctagaggacctgcagctgagatctcccaactgatgtcaattttctatgaaactccagagggaacagaatactgcaatgaggtctctaaagtagttgaatgaaatatactcccatcaacactctttaagtgttttcatctctgcacattgtgaataatgctcaaggttatcactttttaaaatgccttttcaatctgaagaggattaagtatctctcattggttttaatgtgtaattttctgattcctagtgagaacattctttttgcaaatatttattgactatttggctttctaattcggtgacttgcttatatcgttttccaattttccgatttttgttaggttgtmttttgtaattaatttgcttaggtttgttaaaaatatctctgttgcccatgtcttttgaaatattttttaaataatttttcagtcacagaagatttgaagaactttaaggtaaacatatgatttatcttttaattattttaatatatagttatggagcacctactgggtgtcctggtttgtggttttgtacctcgttaagacattctatcaacaaatttgtcacatatttcccacattatgttgttaaaagagtaaagtattattattcaacatacagatatttattccctctgaaatatatttttatgtctaacatgaggtagagatcatttcatttagtagtgttgacatttgggccaccatcatatattaaatagttgatcctttctcaattattgtgaaattctaccattgtttcacacacatcccataaggacttataaatatttccattgtctaatatatatttgtatacacatgttcatatatacttataaacataaatacacgtacacatgtacaagtttatataaacattatattatgtttgcacttggtaattcaccagtgtttttttcacatatggccatatggacagcttctttttttttattttttactttttatgtttttattattattatactttaagttttagggtacatgtgcacaatgtgcaggttagttacatatgtataaatgtgccatgctggtgtgctgcacccattaactcgtcatttagcattaggtatatctcctaatgctatccctcccccctccccccaccctacaacagtccccagagtgtgatgttccccttcctgtgtccatgtgttgtcattgttcaattcccacctgtgagtgagaaaatgcggtgtttgttttttttgtccttgcgacagtttgctgagaatgatggtttccagcttcatccacgtccctacaaaggacatgaactcatcattttttatggctgcatagtattccatggtgtatatgtgccacattttcttaatccagtctatcgttgttggacatttgggtttgttccaagtctttgctattgtgaatagtgctgcaataaacatacgtgtgcatgtgtctttatagcagcatgatttatagtcctttgggtatatacccagtaatgggatggctgggtcaaatggtatttctagttctagatccctgaggaatcaccacactgacttccacaatggttgaactagtttacagtcccaccaacagtgtaaaagtgttcctatttctccacatcctctccagcacctgttgtttcctgacattttaatgattgccattctaactggtgtgagatggtatctcattgtggtttttatttgcatttctctgatggccagtgatgatgagcattttttcatgtgtctgttggctgcataaatgtcttcttttgggaagtgtctgttcatatccttcgcccactttttgatggggttgtttgtttttttcttgtaaatgtgtttgagttcattgtagattctggatattagccctttgtcagatgagtaggttgtgaaaattttctcccattttgtaggttgcctgttcactctgatggtagtttcttttgctgtgcagaagctctttagtttaattagatcccatttgtcaattttggcttttgttgccattgctttaggtgttttagacatgaagtccttgcccatgcctatgtcctgaatagtattgcctaggttttcttctagggtttttatggttttaggtctaacgtttaagtctttaatccttcttgaattaatttttgtagaaggtgtaaggaagggatccagtttcagctttctacctatggctagcctgttttcccagcaccatttattaaaagggaatcctttccccatttcttgtttttctcaggtttgtcaaagatcagatagttatagatatgcggcgttatttctgagggctctgttctgttccattgatctatatctctgttttggtaccagtaccttgctgttttggttactgtagccttgtagtatagtttgaagtcaggtagcgtgatgcctccagctttgttcttttggcttaggattgacttggcgatgcgggctcttttttggttccatatgaactttaaagtagttttttccaattctgtgaagaaagtcattggtagcttgatggggatggcattgaatctataaattaccttgggcagtatgccattttcacaatattgattcttcctatccatgagcatggaatgttcttccatttgtttgtatcctyttttatttccttgagcagtggtttgtagttctccttgaagaggtccttcacgtcccttgtaagttggattcctagttattttattctctttgaagcaattgtgaatgggagttcactcatgatttggctctctgtttgtctgttattggtgtataagaatgcttgtgakttttgtacattgrttttatatcctgagactttgctgaagttgcttatcagcttaaggagattttgggctgagacagtggggttttctagatatacaatcatgtcatctgcaaacagggacartttgacttcctcttttcctaactgaataccctttatttctttctcctgcctaattgccttggccagaacttccaacactatgttgaataggagtggtgagagagggcatccctgtcttgtgccagttttcaaagggaatgcttccagattttgcccattcagtatgatattggctgtgggtttgtcatagatagctcttattattttgagatacgtcccatcaatacctgatttattgagagtttttagcatgaagagttgttgaattttgtcaaaggccttttctgcatctattgagacaatcatgtggtttttgtctttggttctgtttatatgctggattacatttattgatttgmgtatattgaaccagccttgcatcccaggatgaagcccacttgatcatggtggataagctttttgatgtgctgctggattcagtttggacaacttcttttatgttcastttatgaggactcagcttaaatatcatcttctcagagatcaatctcccttctccctaaatcactcctccagctgtgacttattatgttaccatatttatttattttagagtctatatcacaacctgaagttatattttatattaatttgttacctttattatatataacacactcacacagaaagttcatgaagtcartgatttgatctcccttattcaccattaatatcccctgtacctagcagaaataaaatatatattggatgttcaataaatatttgttcagtgtataaatcagtgagaaggttgctagaatgataaatcattctatattcatagagggcagggatgattttggcaacagcttcttgatatttttcttaatatggtgtgtcttatttttaataagatgaaaaaaagacagtataattactttgagctgtaactgatagaaaaaaatcctttacagtgactattttatgtatagatactgaccaaagatgagatctgaattcataggctagattgattttagagtgagtcagttaagtcctgggtcaggaggagctaatagggtggccctgagtttctatttgttaagtacaattgaattcacgtaggtttcagtgaattgagttgttctggttcttactgtgtacaaaggaccacactgtaaagctttgcccagttataggtatcacccttcaaaaaagatttgtcacttggagcatatttagcagagatatttgaaatagtgacatgagttgaaactatatcatatgaacacctcagaaaagcaatagggaatttttagccaggaaaagacctggaggaacacaatcactctcattatatctttaaaggactatgatgtgaatgacttgttctgaagggccccgaggggcaaaatacaacctatgagcagatgttagaagaatgcaaattttatctcaatatagagawgagttttttaacagagctatcctgacaggaattggrctttattgagaacacaggatttggagtttctcaacactgcagacatttaacacaaggagagtgactagttgaccaaggtattttgtggggggcacaaacaaatcttgggtgaaaagtgggtctagaagccttttgaaacccaatccttagatcctctaatggatctgtctgttttatgaaagagagaaatgtgatctggatgattgctggagtactacaggtgtgtgaacagttatactcaacctggtggaaggataaagcsatctatagggcttaatccttgctccactttaacaagtgacttggaagaatactgaaaaagtaaacattttatatttgtgtaaggcacaaaactgagaaaggtagaatggtctaatgtttgaaaactcataagytgaaattaaataagggcaaatataaagtcagggccttagcttaaatacaacctattgcacgagcatatagtgaaacgattgcacatcaaaagcacatgggtcatcaggagttgagagggacatttgctctcttgttcaatgaatttcaaacctggatctatgaaagcattttcatggtctatagcaaaagtagctcagtgtagttagctttttttcatatagtgaaatttattcaacttttcattctcaggttttatatttactactttatatttatcagaaatatttgatttatgaaataataaagtagataatagttttttacatttttatttttggcaacaaataaattatttatcaatcaataaaaaatatttttttactttactaataaaaaaataaaaatatacccaccctatgtcagttccttctccttcctgtgtctccttcttctttgaaaaatatttgtggcctgaaaagtccagaaagttaaaagtactaatttaggtgacttaacagtataagtcagtagcgtgatatggggactgacttatagcattgaaataattgatctttttgtagtgtaagtttgatcattggattttcatgctcacgtgtgatacgtgcctccttcaaaccttgttatgacactagcacattattcatatgacatgaaaaataaaataaaatggttatgatacttagcttgtgaaatagaaggaaattttcaatatacttggcacaggaatgtccacatcaagaatttcatgctgagtcctgggcccatagtttaaaggataggcagaaaaagaataagttgttttaagccatagtgagctatcacctcattactggaagtgtttaaacaaaagcaaaatarggtgtaccttgacaaaaatattggagagagaatttcattattgagaagtagaagaattagatcctcttaagtgttctttccataaataagattcactaattaacaaaaatcatgatgaaaacctagggtattttccctgtggtgaatacacattcaattaggcaaaccctcctaagtacttagattttccaaaatcacaagagagaaatgtggttctaaaatatgtggttctaaaataagtcaagttttccaatcacggtctagtttgagtcactatgtagtattgctttgttatatctatctgttgctctcaccaagtagtatccaataacctgacagggctaaaacagcttccagagatacctaatttattttcagtgatgtggttgggtataaagagataatayttttataagttgttactgaaaatctgtaatttctaaaagagatatatattgagtgtgttgataagtagggaagaaagtcaagattgccctagagaagcatgtgaaatataaaaagaacaaagtatttgggctagggcatgcactggagatcacttgtattcatattttagcatggaaagccataaactccatgaggataggaatttttrttccgctgatatatcctaagaataatgcttgacacatagtaggtactcagtacatttttgctgagtgaatgattatacctcaatgamctttttcagattatattcattggcaggtaaatgctggaagccattactattccccttccttctttgttttctgggagtgtagaaactcccaatttctaatcaaaatgataaaaagtcccagtatgacactttgtctgttgaagtacaagtcatgtgaagtgactggcattatctctctctgcatagacaggactattttgtaaaaacagcaacttgttctgattaagttatgatgtatttagcacacacttcagtaagagcattagactatctctttmaaatggaaagctatgtgcttatttgtatgggttttttatttgtttttctggtagagaagttgtcatatctgcgaactgaaagcacttaattttctaagtatcaagctttgggaagcaaacatattctctttcatctactgttgatgatgatgatggatgttttgtttgcaactaaacaatataggacccaaatattcaatgtaaaatgaccatattctttaagaatcatgtaaaagccatatcaggccttttataatttatgcctaatttatttcttttcacttcagggaatggcacaaaatgctcttaagactttggaaacaaacagtcgcgtcataatgtaaaaaagacttaaatgaggtgattttatttttaaaaagcttataataattgagtggtgtaycctcaagactgactagggtgatttcaaatgtaagtttastaccagtttctttctagtgatggtgtggtatctatgtggggagagagtgcgtgggtgcagctatgagcacagctactaagactggaaataaatgtctgtgcctttgtcctatcactgccctgtatcttgttccaattacacagccactttcttccacctactccaaggaactcttcattcaacaaatacttacggaccacctactgggagcatccatgaagctagggtgaggcaggggcagggagtggggatttagggggtactcartggagcagttctgagaaataagaattttaaggcctaagttttattagaaggaaaatcggaggtggtgtgtcctggcagaagaaacagaatttgtggaggagaagtcatggccatcaaactcaagtgggaaagtggggtaaaaaattagataatgactttaaagtacatagcctagaattagcatagtttcacatgcaggccaaggcaagaatctcagaatgaattacaaaccaaagtgtttacagcctcatttataatcatggtgtgtgctgtgatattaagcacattaacataaaggatctgtgctggcctgtacaatgttcttctagtcacggaggaaaataaaggtagagccttgctgacattaagtttataatcaaaattgaaaatttattatccagatagaaaggaagtggtgtttgggaggaatcggtggaaatggcatgagaattggattcatgtcaggggacacaggragagcccacagaaaaatgtcattttccatgggccttaaaggagaagcaagatttgcacatttgggaaaatacgaaaagggcattctaggcaacggagatggaaaaacatgtaatagaaattgaaaaaagtaaacaattgagtctgtctaagccacgttgtttctttacaggaggcacccttggattttgggtggaacaattatttgttgtgtgatacagtcacagtggtggggatcaaccttttctggggaggccagaaagctcagaatcagcactaagacacaacttccacctcccccagtccagtctttytaataaccaaaagtgccttcacacatttccataaacctcccagtaaagtgatgttgccccasttaagaaccagtgggagggcatagtctgtggaaaggtaagttgtagcccttagtgccaagtgaaggggtttagatcagtttcatagatttggtttagttactacaggtactacaggttttgagtaggagagtgacatcatcacagctgtgctttcggaagattgatttgaaaattctgtgtcaactgaatgggaaaagggagaggcatgacctgctaaaagataattgaatattacatgcagaagtcaggatctgaataagagatgtasgaataagaatttttaagatgggacaaattgcaaatagacaatataaattgatcagaaactgaaaacaaattagatgattgtgatgatggaggtgaaagggaatgaatttgaggtttatagcctagtacctgggaaaatagtggttatattagaagaaattggaaacaaaattaagaaagggacactttaggacagaaatgaatatatttaagttactaccagaagatccaggttgagatgatagaaaataaaactacaagaacttgagatgtcaccactagattatggtgaccattcatatagatgtgatgattagaaccataaatgtgggatgagattgctaaagagcaaaataaaaataaaagaatcaaaggcgtaaccttaagaaaacacatctgggagagaaaaggaagaggaacctgaaaaagaacaatgagcaaagtaagaggaaagtcagggaagtgtggctggaagcctagcaaatgggagcatttcagcacagtgatcagcaaagacagatactccagtgaagtccagagggatgagtactgacaatttggaaattaggaagtgagcagtcatcttaaccaaagaatagtttcagcagcattgtgagaaatgaggagagggcaggggccagaagctatattcctagattttttcccccttaaattgaaaagtaaacctaattgtggaaaagagaatcactgggaagctccaccttgcagactttttaccataaagtcctaccattctttttactatcagttatttttttctttatttgtgtgtttattaattggtatatcatagttatatatattttgggggtacatatgatatttggatacataaacaatatgtaataatcaaatcagggtaattggaatatccaacacctcaaatatttatccttttttgtgttggagactctacaattcttcacttctagctatttgaagcatataataagttattgtcaattataattttcctactgtactatctaatacctgaacttactttttctatctaactatttttgtacccattaaccaacttctcttcactgccccttattctctttccggcctctggtaaccgccattctacctccatgagatccacagttttagtgaataagaacatgcaatatttgtctttctgtgcctagcttattttacttarcatagtgacctccagttcaatctgtattgctgcaaaagacaggatttcatttttttgtggctgaataatattccattgtatgtgtgcatgtatatacacacacatatgccacatttttttatttattcatctgttaatgaacacttaggttcattaacaaaatatggattttggctattgtgaacagtgctgcaataaacatgggagtacagatacctctttaacatattgatttcctttctttggggctatatatccagcattgggattgctggatcatatggtacttctacttttagttttttgagaaacctccatacagttttccatatttaccgtatgactttatattcccaccaacaatgtatgagcattcccctttctccacatccttgctagtgttattttttgtccttttaataatagctattctaactggcctgagattgtatctcattggggtttgatttgaatttccttgatgactagttatgttgaacattcttatgtcttcttttgagaaatgtttattcaggtctttgggacttttttttccccaacatgtctaaataaactgttattgaaacacagccatgtgagttcctttatktattgtctagggttgctttcatacaacaaggaaagagaccatccacctaacctaaaatagttactatctgacctttttaaaaaaacttttaagttcaggggtacatgtgcggktttgttacatagggtaagctcrtgtcacggggcctgaagcattgctccaggaacatagcccccccatgggtatttttacacaaaaactggaggctattcaaaagatacacatgaagtctattcctggagattattttgtcacccaggtattaagcctagtacccattagttattttccctaatcctcttcctcctcccatcctctactcttcagcaggcaccagtgtctattgtttccctctawgtgtccatctgtgttcctcatttagcttccacttataagtaagaacatgaagtatttggctttctgttccatgttagtttgctaagaataatggcctccagctccatccatgttactgcaaaggacatratctcaatcttttttatggctgcagagtattccatggtgtatatgtaccacattttctttatgcagtctgccaattgatggacatgtgagttgattccttgtctttgctatggtgaatagtgctgcartgaacatacacatacatgtgtctttatgatagaatgacttatattcctttggatatatacccagcactaggattgctgggtcaaatggtatttctgaatttaggtctttgaggattcaccatgctgttttccacatggttgaaataatttacactcccaccaacagtgtctaagttcctttttctctgcaaccttgctagcatctgttattttttgactttttagtaatagccattctgactggtgtgagatagcatttgattgtggttttgatttgtatttctctaatgataggtgatgttgagcgttttgcatatttttttggccacatgtatgtcttctttagaaaagtgttcatgtaccttgcccactttttaatggggttgctttttcttttcttgtaagcttgtataagtttcttatacatactagataatagacctttggctgggtgcgatggctgacaactgtaatcccagcactttgggaggctgaggagggcagatyrcttgaggtcaggagttcaagatcagcctggccaaatggtgaaacttcatctctactaaaaatacaaaaaaaatttagcctggcatggtggcacatacctgtggtcccagcttcttgggaggctgaggtgggaggatcacttgaacctgagaggtggaggttacagtgagctgagatcacaccactgcagtccagcctgggcgacacagtgagactctgtctcaaaaaaagaaaaaaaaagataatagacctttgtcagatgcatagtttgcagaatgtatctcccattctgtaagttttctgttacactctgttgaatgtttcttctgttgtgcggaagctctttagtttaattatatcccaattgtcaattttttcttttgttgtaattgcttttagtgtctttgtcatgaaatctttgcccattcctgtgtccaacatggtattgcctaggttgtcttccagggtttttattggttagggttttacatttaaatgtttaatccattttgaattaatttttgtgtatggtgtaaggaaggggtccagtttcaaccttctgcgtatggctagccagttatctcagcaccatttattgaacagggaatcctttcccattgcttgttttttgtcagtttttttttgaagatcagatggttgcaggtgtgcagccttatttctggatactctattctattccattggtctctgtttttattttggtgtgctgtttttttactgtagtgctgtagcatagtttgaagctagtagcatgttgcctccagctttactctttttacataggattgtcttggctattcgggctctttttgttccatatgaattttaaaatagttttttttatagttgtgtgaagagtgtcattggtagtttaataggaatagcattgaatctataaattgctttgggcagtatggtcattttaagaattttgattcttcctattcatgagcatgggacgtttcgccatttgtttgtgtcatctctgatttctttgagcagtgttttgtaattcttattgtagagacctttcacctccccgattacctgtattcccagatattttattctttctgtggcaattgtggatgggattgcatttctgatttggctcttgacttgactgttgttgatgtatgggaatggtagtgatttgtgtacattaattttgtatcctgagactttgctgaagtttttttattagcttaagtttttgagctgagactgtgggattttctagatataggatcatgtcatctgmaaacaggaataacttaactttccctcttcctgtttacatgccctttatttatttctcttccctgattgctctggccaggacttccaatactatgttaggtaaggaatggtgagacagagcatccttatcttgtgctggttttcaaggaagtgcttccagcttttgcccattcagtttaatgttgactgtgtgtttgtcatagatgactgttattattttgaagtatgttttctcaatacctagtttattgagcatgtttgacataaaagtgatactgaattttattgaaagccttttctgcatctattgagataatcatgtggtttttgtctttaatttgcttatatgataaatcacatgtattgatttgaatcaaccttgcatcccaggcatgaagcctccttgatcatcatgcatttgctttttgatgtgctgctggattcagtttgcaggtattttgttgaggatttctrcctcaaaattcatcaaagacattggcctgaagtttcttttctttcttgcttttttttttttttttttttttttggttgtctctgcctggttttggtttcaggatgatggtagcctcatagaatgagttagaaggagtccattctcctcaatattttggaatagtttcaggaggaatgataccagctcttctttggacatctggtaaaatgaggtcgttaatccatctgatcctgcattttcttcgattggtgggctatttattactgattcaatttcagagctcattattagtctgttcatggattcagttccttcgtggctctgtcttggcagggtgtctgtgtccaggaatttatccacatcttttatatttgctagtttatgtgcgtagaggtggtcatagtgttttctgatgattatttgtatttctgtggggtcagcagtaatatcccctttgtcatttttaattgtgtttatttggatgttctctcctttcttctttgatagtctagctagatgtctatctaacttattaattttttcaaaaaaccaactcctggattcgttgatctttcgaatgctttttggtgtctcagtctccttcaattcagctctaatttggattgatttgtttcttttcttctgctagctttgtgtttggttttctgttggttccctacttcttttagttgtgatgttaggttgttaacttgagatctttctaactttttgatgtggacatttagtgctataaattgtcctcttaatactgtcttagctgtgtcccagagatgctggcgtgaggtatctttgttctcattagtttcaaagaacttgttgatttctgccttaatttcattatttacccaaaagccatttgggagtaggttattcatgtaatgaatttccatggattatatggttttgagtgaatttcttaggcttgatttctaatttgattgcgatgtagtttgagagagtgattgttatgatttcagttactttgcatttgctgaggagtgtgttatgtctgattgtatgatttatttcagggtatgtgccatgtggtgatgagaagaatgtattctctcttgcttttagtggagagttctgtagatgtctctcaggtccgtttgatccagtgctgagttcaggtcctgaaaatctttgttaattttctgcctcaatgatctaatactgtcagtgaggtattgaagtctcccagtattattgtgtgggagcctaagattctgaaggtctcagagaactttcttttgtgaatctggacgcctctgtgttgggtgcatatatattcaggatagtgaggtcttcttgttgtatttaaccctttactgttatataatgtccttctttgtcttttttgatctttggtttaaagtctgttttatctgaaattaggattgcaacctcccttttttctgttttgcatttatttggtaaatttttctccattcctttattttgagcctatgggtgtcattgcatgtgaaatcagtcttggttctttattcagcttgcccctctgtgtttaattggggcatttagcccatttacatttaaggttagtattggtatgtgtggattcgatcctgtcatcatgatgttaggtggttagcgtgcaaacttgtttgtgtggttgctttatagtgtcactggtctgtatatttaaaagtgtgtttttgtagtggctggtaacagtctttccacatttagtgcttccttcagaagctcttgtaaggcaggtctggtggcaacacattccatcagtatttgcttgtgtgaaaaggatcttatttctacctcaattatgaagcttagtttggctggatatgaaactctgggttgagatttcctttctataagaatgtcgaatattggcccccagtctcttctggcttgtagggtttctgctgaaaggtccactgttagtctgatgggcttccctttgtaggttacctggcctttctctctagcagctttaacattttttctttcattttgaccttgaggaatctgatgattgtatgtcttggagygatcttcttgtgaagtatcttactggggttcttcgcatttcctgaatttgaatgttggcctctctagctaggttggagaagttctcatggatgatatcctgaaatatgttttccaagttgcttatactctttctgtctctttcagggacaccaatgagtcatagattttgtttctttacataatctcatatttatcttaggttttattaattccttttcattcttttttctctattcttttctgactgtcttattttagaaagctagtcttcagcctctgagattctttcctcaacttggtctattctacgattaatgcttgtgatggcattatgaaattcttgtagtgtgtttttyagctctatcatgttgcttacattcttttctatactggctattttgtctgtccgtttctgttgttttattctgattcttagcttccttggattaggcttcaatgtactcctgcatcttaatgatctttgttcctatccatattctgaattctacttctgtcatttccgccatctcagcccagttcagaacccctgctggagaggtgatgtggtcatttttaggacaaaaggcactttggctttttgagttgttggagttcttgtgttggttgtttctcatctttgtggactaatgtttcttcagtcattgaagttgttgacctttggatttttttttttttttgcttttatcctatttgatgaccctgagggtttgattatgctatgaagtgaattctgccaactggctttgtttctggaagactttagggagtgaacacttagctctcagctcctgtactgggtgctgtaactctgggggagtagtatggtgacctgagagtgttctttggttctttgaggttagaaatctgctacactagggggccgaggtactcccagaatgctggtcagtactctctgatgggtggtgtcagccaaagcatttcgtagtatggtgacagcaggatctgtcttcatccgcgtatgtcagcagcagtggcagccacagcatggcagggtgcacgctcatcggctgcagcagggtgctaatgggtgtcagtgtacctgcctccatgcggacattcaccacagcggtggaggcagcatgagtcaggggaacggggggcccctgctggcgaatgtgcatgcagtcacactggtggtggtgttagcatggggattattgctcattttttaattggattttttgtttttgtttttgttctttgtttttgctactgagctgcttgagttccttatatgttctggttattaatcccttgttggatggatagtttttaaataattttctgccattctgtaggttgtcgctttactttgttaattgttttctttgctatgcagtagcttttttaacttgatatgatcccattggtctatttttgcttttttcacctttgcttttgaggtcttacctaaaaaaatctttgcccagaccagtgtcctatactgttttccaaatattgtcttctagaagcttcatagtttcagatcttatgtttatgtttttaatataattttatttgatttttgtatatggtgaaagatgggaatctactcttattcttctgcatatgaatatacaatattctcagcaccatttattaaagagactgtctttccctgatgtatgcttttggcactcttgtcaaaaatcagttggctgtaatagtgtgggtttatttctgtattctctattctgttccattgttctatatgccttttttcatgctagtaccatactgttttagttactatagctttgtagtacaattgaaaaccatgtagtatgatgtcgagctttgcattttttactgaggattgctttaactattcagtcttttgtgtccatacacattttaggatttttttgtaattacctgaagaatatcattaatatttgataaggattctactgaatctgtagatcactttaggtagtagacacattttgacaatattaattcttcaaatccatgagcatagaatatgtttccatttttttgtgtcctcttcaatttatttcatcagtgttttacagttttctttgcaaagaccttttacttcttcattaaatttattcttaygtgtgatatatatttttagctattgtaaatgttaytgctttcttgttttttattttcagattgatcactgttagtttgcagacacactattaatttttgtgtcttggttttgtatcctgmagctttgctaaatttattgatctattccaagaattttttggtataataggcctttctaaatataaaatcacgctatatacaaacgaggataattagactttcttcctttttaatttggatgccctttctttgtttcttttgcctagttgccgtgactagaacttccagtactatgttggataaaattggcaaaagtgggcatcgtagacttgttccaggtcttagtgaaaaggcttagagttttccccattcactatgattgctataggtttgtcacatatggcctttattgtgttgaggtatatttcttctatgcaaaatttgttgaagatttttatcataaagggatatggaattttatcaaaagctttttcagtatctattgaaaggatcatagggtttttgtccttgattctgttgatatgctgtatcacattttttgatttgcacatgttaaaagattcttgcatccctgggatgaatcctacttggtcatggtgaatgatctttttaatgtattattgatttttgtttgctaatattttgttgaaaatttttgcatctatgtgtgtcagatatattggtctgcrgtttcctttttttgttgagtctctctggtgttggtatcagggtaatttttcaatattgccttttgtcttcagaatctacatagtgcagtaggcttttaagcaattctagcagcattttctaaagtatgtttttatatagtgaactcaagcttgtggagctaaatattagtatgagctttcactgattattaatcagtaagtaaataagatatcctggacttgtaggtggttcacacttagattaaccttaaatacataaacagtttttttaaaaaaagctttaaaacttaagatacttttatgtaattcagaaggtaatgttagtgctgaaaaatattttgttcataacattatttttaaatgtcattttaaatgtgaggctgaaatgaaatgtcatttgtagtaggatgtttaaccaaatggagaatgtctgactatttcttcccagaaccttgtcttgagggttaatatgaaaattacccatgcccatagatcctaagaacttctatacccagtcatgacaagttttccaaccaaaagaccttatacaaatctaagcaatcattcatcctcttccttgtactacaatcaagattacaaattgtagttctataactgaaagtctctgcactctcattttatgtgtcataactgacaatgctagtgtcccctacatcctaatttagatttagagaggttttctgtatttcttttcaagaagagagtattctaatttcatatctacactgaacctaaaagtttaggactggcagttcactccagatttcttggagtatataagctggttggggcgacgatctgggaaaggtagtgttaaaaagcaatgaaacagacttaagcatgaatgtcactaagtctattatatgtacaccaatagtcattattttttcatcctatactttctatttttttctgttctaaggctgcgtttgttagcaatattctgtaaaataagatttgtcattttggattacccaaggagaatgtgacaagggtaatttaaaacagtctaagcagtcctcccattacagatggttagtataacagacagtgtgcagaaacttggtctagggagctgaaacagaactacattgagatccagaagctataaggtaattgctccatagaaagaatgaactggttttggagaacttgagagtcaaatgttgtttctagtaattagcaagctatcaatatgatattgcatagtttattattttaaaaataactttaatctctgtcatgcttatgcagaaataaaataactgtacttatagcacaataaaattctactttttgcctaatggagggcaacatgagttagatatctcacaaaataaactacttttttttcaatttctcaatttctgctcgttgaatgctaaattaaagtcatgaatctgcttttgaacatgtagataccttctgggcatgctatggttgtgcgtttggtaagaaagtttataaaggaaaagatgacctcttctcatgcatctgagatctggcaggtactttcctagagctaccatatttaattcttgcaatggtattgtgacatacacattactgggctcattctattataaagaagaagaaattcagagattttaggtgactactccaaagttaaagaacaaaaaaaaatgctttaggatttgaacactaataattttcttggttttagaattatttcatcagagtttaatttactcataattgtgtaattctccaaagaacatagacttttctactaccccttgctgtaaaagacgtgataaagaaaatatcccaggaatcttacttttcaacatttaagtctgcaatgcttttgactgtcatatatttagggcttgctatttcataattgaaggccttagctccattagaaaggatgccaatattacttgacatttatgtatcactttattattaaaacaggctttacaatttctgtatcatacttggtaagatttgataccaagagagattttgggggttctgtaagattacacagcaaagagggggaggaagttaaaatacagttcttgccaaatcatttaacatccttatttacttaacaggaactccctcaggtaaaaaatgatggatcagtgtgttatgcaattttggcataatattttcaaaaatctagtagtcaaagcttttgactaaaaattaaaaggctgatttttatgggtggtgtttgggtataaaagtgtatatttcaaggtattagagcaatatatggtcccttgaacacgcacatgagtgatactggaaaaaacaatttgactgaattttaaaaattacattatttcaaggtatatgttcttattttctttaaaataatattttgtattaaaactttctgcttaggatccagggcaatatacctaatttttaaataatttactatcatgaaaaaccatttttctgaatatcggatctttaatcattaaataaattatataacttaatgtgttcctctttaggttgttattataggtgagttcaacataaatttgaggttctatctcagcaactgtgttagcctggttgttaaatatgcttcttttgtctactttgttttttattatttatttccatatcaacaatgactttgtactatcttaagtcatttttctaatctggcaagttattagctaaaaatgaataattgaataagaagtgaacatttcccaaagactttagctctaggtaacatagtgacctaagagaatgtacacttactctgtctcacatataggtgctattgaatatttttggtggtgatgttgaagatatttgaattaygttggtggtaagtggaggccagagagttacttaatatgtggactggcatggtgtaagtctggaaggaactgtggtgaacagtttctttgcttatggtgcagtttcttttgaaggacttaaagcaaacactggaactcatttcctaagacactttgaggtcactcattcccacccaattaaaaaaaaagtagaagaagaaaagaaaaacacctgtratgagttttcagaggcttatatggtgttactgtattttttcagaatgtattgttgtgtaacaagaaatatttcatgggtaatccaaagtataggagttctgggatagaaaagcaaactctagcatgggggcagcctaggagaaatgggccaaaaattgaagggaatagtacagccatgactgcaaaactgtctgtcagcattccagaaataattcatggtttttctyttaagcgaatacttaagtttatggcctgtgcctatgaaccaagctttgtggatgttaataaagagttgacagctatctttccattgaagtctttgcctctctgagtggaatatactgtcaactgtcaataaataataatcattatttcagtttctgccagatgctgcctagaaatcatggaattcaaaggcaaatatttgaaagcctgaacaaaagtatgatttcagtcatttgttgcagttctttgtagctttctcaagcttttataacaaatgtgtatatgcaagggtttatttctggggtctctaatctattccattggtctatgtgtctgtttttatgccagtaccatattgttttgattactatacctttgtgatataatttcaaaatcagggagtgtgatgcctctagatttgttcttcttgctgaaaattgctttggttatttggtgtattttgtggttccatatgacttacagtttttttctctttctgtaaaaaatgccactgggattctgataaagattgcagtgaatttatagatcacttaggatagtacaaatatttcaacaatattaattcttccaatcattgaacacagatatctttccatttctttatatcttcttaaatttctttcatcaattttttctagtttttagtatccaggtctttcatctttccagttagatttattcctaagtattttgttctttatgtagctattgtaaatataattattctcttgatttgtagttcatcattagtgtatagatactcaactgattcttcatatgttctgaatcctgcaactttactgaatttgcctattagttctaacagtttttggtggagtttttctggttttctatatataagaccatgttgtctacaracaagaacaatttgacttcctcatttccaatttggatgccaattatttctttcctttgtctaattgctctgggtaagacttccagtacaatgttggatagaactgatgagaatgggcatccttgtcttattcctgatcttagagtaaaagctttcaaattttcatcattgagtgtgatgttagctgtggatttgtcataaatggactttactgtgttgaggtatattccttctatacctagtttgtcgagagtttttatcaaaaaagaatgtcaaatattatcaaatgcttttttcttcatctattgagatgttattttttttgtccttcattttgtaaatgtgatatattacatttacagatttatgtattcttgaattcctgggataaatcccacttcttcatgttgaatgttccttttaatgtgctattaaatttggtttgctagtaatttttgaggatttttgcatctacatttatcagggatattggcctctgattttcttttctaacggtgtctaatagcggtgtaatagtgtttaatactttcatatatttaatgttgctaattaaccttcttttgtttcaaataaaatattaaataactcccatttcttgtaaggtaggtctaatggtggtgaagtttctcagattttgcttttctggaaaagtctttatcttttatttcttggaaggacagcttttccaagtaaagtatcattgattgacagatttttttgtctttcagtacctggagtatatcatccgcactctcctgtgcctgcaagttttctgcacaaaaaccaactgataatctcatgagggttcctttgtatgtgacaagttgtttttctctttctgtgttcagagtttcttgtaactgatttttattatttatttgttatttttaaaatttttaataaatatatatatatatatatatatatgtatgaaataaaatgccatgttgaccaggctgacctttaactcctgggctcaagtgatcctccctgcctcagcctaccaaagtgctgagattacagacatgggtgtcattcaattttaataatatgattataatgtgtcccactgaataatatgattataatgtgtcccagtgaaggcttttttatgaatcctttgggcttcatagatctggtgttcattttactccccagattggaaagacttctgttatgatttctttaaatatgctttctgcctttttctctgctgcttatagggctcccataatgcagctattagtttgcttgatggaatcccataattcccataggctttcttcattctttttcctttatttctgtgactggagaattttaaatggtctgtctttgaattcactggttcttttttctgcttgagtctgctattgaagcttactattatattttttcatttcattaattttattcttctgctgaatttgtcttgttcttttttattaatatgtttccatctttttgttgaacttctcattttgttcatgtattgttttcttgattttatttaggtatctatctgtgttctctggtggttcactgtgcttttttaaaacaattattttgaattctttgttagacaattgttagatgtctatttccttgggattagtcactggaactttattttgttcctttggtggtgttgcgtttctttgactctttgtgtttcttgaagctgtttgatggtgtcttcacatttgaagaaggagtcatctccttcagtgtttactgtctgayattaggaaagaaaaaccttgaccagtcagccccgttggagattttgggggtctttcagacctttttgtatgtagaggcacccactctatttctcttttctcttcaaagaggtaagtatttagattttgtatattctcttgatcatgcaaagccaggcttgttgctaagagactctcacttattttccttaagacagtgtcctgaattgtttaatatagtatgactcctcccaatccagcagagtcaagccagctgctggtatttgcttgccatctttgggagcttgcacatgctgtcttgcaaaggctcaatgttttgtctgtgggtgagcatagggtaccatatgtagtagacagcagggctctaaccattttagttgaggggcatggaatcctgggaatacatatcagttagctgggggagtccacaggggtcatgggtagagatcctagtggagaccatcatgaaccagccagtgggatttatggycagttgttgagatattcatacaggctgccacggcccctacccccttaccctgttcctagtgtccccaagattatttcattttgctaatccccttagtattctgggtgggatgagacagaagtgggtctccttggaaggaaggaagctgctcccacttttcttcatgagagaaattgtaggacgagggtcagttgagttattgagtcaccatatcttgctgcacttgaaaaatgagtcaaaagtcaacaaggaggctgggcatggtagctctcatctgtaatttcagcactttgggaagtcgaggatgacttgaggaggatgacttgaggccaggagtttaagaccagtctgtgcaacacagtgaaacccgtctctacaaataaataaataaataaataaataaattagctaagtacagtggtgcactcctgtagtcccatcttgtcaagaggctaaggkgggaggatcatttgagcccaggagtttgaggctgcagtgacacatgatcctactacttccctctggcctgggcaacagattaagactgtctcttttaaaaaataaatcaacaggctgggtgcggtggctgacgcctataatcycagcactttgggaggctgaggcaggcagatcacctgaggtcaggagtttgagaccagcctggccaacatggtgaaaccccgtttctactaaaaatacaaaaattagctggatgtggtggcatgcgcctgtaatacccaggaggctgaggcaggagaattgctggaacccgggaggtagaggctgcagtgagccaagaacgygccactgcactccagcctgggtgacagagcaggactctgtctcaaataataataataataataataataataaataagatcaatcaatcaacaagraatatttaacagcaataactataaagtctacattcaaactaaatgcatcttttatgggtctctcttggcacttggtgagataggtaaagtgaaattgtttttcttgtgctttttaatgcgtctattcttggattttggttgttgttgtcgttccactgtgatgctggaacagtggaatcttagctggattcttgagctcacataaaggtatttttgaccatgggtgtttgttaaaattgttgtttcttctgggggttgagggctgggatctccagttccacaatctcgctgatatcactcaaacgagataattgtggataataattgctaacatgcatgtagttcttatatgtgccagatgcagttataaataatttttatatattaactcatttaatccttacaataaacttatatggcagatattattatgtatacatttttaaagataaggaaagtgaagtacaaaagattcttgtaacttgcctaatttagagaaagaagctcaagagttaagattcatacttagatgatctggctttataatccatactgttgcctaccatactacatgctaccatatcaggaaaatcagataaattatgaaatagaaaaggactgtgtgcaaaaaacaaaaatgccttgctacagatggtgacatttgaattgacagttttatagcataaaggaaaaaaccgtgtamaattctaggagaagagcttttcaggcagaagaaacaaatgcaaaagcatccagatgggatgactgcaacctgtttgaatgaagagatgcagacttgagtaggsaatagggaagatagggcaaggaccaggtcatgtagggctatgctttggaaggagatttcattctaagggtactgcagtaaaacaggaagaatttaatcagatccatgatggctgtatgacaaatggattataagggtacaagatggaagtaggaagctattgaaattgtctgggaaagaatcatagtggactaaccaaaggtggtggttgtggaaacaatgaaacttgtcacattgagaaaatgttttggaaagagtggtaataggaattagtggatgtagaatgtgctaaaagggcaagatgaggtgtagactctctggggttccaggtcagagcatcacagtggatagtgttgccatttactgagctgggaaagatttgaggagatgtcatgaggtgcaggggagaaacaaattccgtttggtcagtattgtttcagatacccaaatggaagtgtcaggtggaagagatatttctactttgaagttcagagaagaactttaggcaggaaaacttggagtygttaacattttgatatttaaaaccattggatgggatagggataatataacatagagggargattcagccatcagaaaaggaaagcaatgaggcctagttcaaaattcagctatcagggaaggagtaatctacagaaaacaactgagaatgaatagccaaagaaggaaaaagagaatcacgagattgtggatagtggaacactaaggaaatagtttcaagaaggatatgtttaacctatggcaattcctgcttgagaccttaagtatgatgagaacttgagactgcttttttggattttggtcacaaacagaagtaataaaaacactttgattcaatgtgwctttggcaattacggctctgtawgctaattaaatttctaaataaggtggcttaagggacacttaaagtagtgatattcaaagtgtggtccccagaccaggagtatcaaaatcacctggaaacttagaaatgcaaatattgaggccctaccctagatctaaagaaacagaaactttggtgatgtggtccaactgtgttttgatcatcatccagctgattctgatgcaaactacagattcacctggagccagtggtgtgcatgagtggcctagtagagagtctggggagcagaatgtgcacttttattcacaactctatgtcaccagtgacttgaaactggccatggtgggagtacaaaaatcagaaaagtcagaaatcttcaacgttacagattagttctgttctcaccctgccctgccaccatcaccaacacaccagtattggtgaattcagtatgtctaagcaagatcctatgaattggcttttctaataaattcttacataatgctgatgcaatggtcaaagccccacacattgaaaattataaaaattaaatttgttttattccataatatggctcaaatgttctttcctttccgtcttataaatttcttagtggcatgattctgaaaattattgaatttgccttcttcttcattgtccataatgggtgaattcagaagtcacaacttttactcggttatcattaccattatttcaaactagattttcattgcttctggcctctattattacagtagcttacctcctacctccatgaaagtcttctctaacttatatgcctaatatatttaccctgtgcagacactttggtgtctcccacctctttctgccaaaccttgacataaagtcatccagtggctgctattgctttctgtatcaattcccatctccttttattgttttaaaacccagcacaaattaccattcttcaacccacactaacatatatccatcccttcatcttttaaatttaccaattatatttctgtgtctcagcttttgcttataactctgtagaggactggcctatgtttatttaattctatatgttttgactccccatatgcattctatctgtcatatacattctgatacaatgatacattttatcaatgtggtcttcaattatatatttgtgaccaggatggaaaagtggaggttggatgttagtacaattggggaacattgtaggaggttgacacaamgggttttggtaagtaggtaaattttatcctgaaggagattctgaacttgcttatgtccttttcaaatattttttgaagaaaggaaaataatctgacatttatggaacttctgtttcctaaaaactgtgataaatacttttttcatgatcttattttatttgtattctcacaacaatcctatgaaaagtattattgtataggtctgttgaaaaaccagatatctaatttattaaatttgtggttaatgtaaattcaggaggaaaagctaatgttatggatggttgagtcatgagtcaccatttttttttttttgccaagctagaataatgattcagaaatcaacaaggaacatttaacagcaataactataaagtctacattccaattaaattcatcgcttgtatttataagtccttacaaatttgcttgactgcaattcatgggagaggtcaaataaaacttgctaaaactcaatatgagctgatagggttatatacgggcaataaaactaacatactcttattctgtagttaaagaaatatagtgttcagatcaagaaaaagatttttttcctgtgtattattaactcgccaatgcttatttggagtgttgtattatttctgaatattatatttaaggggattttaacaaagtatagagcaaaaaaatgatgaatatcaggatggcatcattatcattgctgacaggataaagagagaatactatgtgggaatattattgctgcattaaaattccaccacaggaaagggctggaacagctgagagttagctaaagatgggtggatagctggaggtaaaagaggggtaagtttcaggtcaatgtcaagagcatctcttctagagtcagagcagccaacagatgaatgggttgctttaagaacagtgatcaagtaaagcagtttccatcattaatgattttgagattttattatctctctcatgttgccttcaggctgctcttattcaaaatgatatcttttccttctgatatgtaattgcactgatagaccatatttaattatgaaggtacttaattgctctttattccatgtgcgttgataatattcccaacaatcttccttccactgaaagtccccaaggggggaaaaatatgttttatataccactcagtactattctgaacacatagctggagttcaataaacacttgttgactgattggtaattttccaacctgctgaggctgctctcttttgcaagggcaattataaacaattctaggagacaactcaagttcttaaaatgatacagatgatgttctgttctttcccgcttcaatagaaatcacactacagaaaccagtgtcagcaaaatgggacaaaactgttgttttgattttcttaataagagaagacaggaaaataattatcatttaaaaccactcccactcagtaaaccgtattaaattgtactctgtgtgaaaaactaagtccctgtgtttatagattccacaaacaactttgatgccttagatatattagcaatgccatctctttttatatctgcacatatataagccatttttctccctctattaatcaaatgcattatcagttaggaagatattttatggcctttataattataatttttctaatactgttttttctccctctttagaactactgaaaagtattttttctccctctagaaataaggcaaactataactatttttaacattatcctcacatgttacatgactatgttaaaatataaatgccatagcaattttaataaatgaaatyaccctcactgaatcaaatgtaaagctggctttctgattcatggtcctcatttttctcattgttgtatattttcctaattcactttttagactgttttaaccgaatcataatcagatttgtatctagatggatgtatgttgctttaattatacactttgataaatggtaggataatctgaatttcacttttgtctcaaaatgaaatatgtaacatgtattttgccagtatccagttgtctggtacgggtgatttcatatttcatgtatgtcaaaccaagaaagagcagtgggcttccagtctggaaatgggtgctctagtcttctttcactaattaatgatgtggctttaagcaagtcacttgaaccttaaactctcagattcttcagtccctcctttgtaagtgggtagatttggactagatgtctaatattccttctagatttaatattctattttgggaagccttcaacttagtttatacctgtaaaacatactttaaacacataacagatattttacattataatttgattgaaacaataccattgaattagcagttcacaaacttcaatattatctaaacatattttaggctaccaaactttttttcaaaaaatcttactcctttcaatatttctttatactccttaagagcaaagtaatttatttttttctactttatagttaaaaaaataacacagttaaggcagcgtttatgatgggaatcacaaaaacaattcatatatcacagtacactgagcccactggcttttttcccattgaaatgtgtgggatggtccttccttttatctgattaacactgtttttaagtgatcttatctaagggaaaaagcaatggaaacaaatgatgagtcaaagcatgttaaatcatatgttttagaacagattaaacagctgccattatttctgttaatatgacaacatctcaacttgtatgccatttcttaagactgtatattccactcttgaaaattgtaaaaaggartaggtgcttttatcactgatgagttaaacccagtcaaatatgtgcactggttttctaacccaagggaggggaagctccttgatgttgatgcacaatgatatgtagaggaacaaccatgggtgtttatagtaaagagaaaatgttaatgtagaaaacactattggtttttctcatgtctatttcactttctcagtttcatggggtaggggcaggtactgattaacccaaaccaactcccttattgggcatggatatatattgccacaatcaaagtgaaatagaagaatttcattakctagctagggaacttcccacccctttcatccctctttcttttttctgcttcccctctcctctatttatccccatcttctccttgatccccctctctctggatgtgatgtgaccaatgacccttataaacctaagaatcrctggaagccctcttataactataaaggaaaccaacttcaggacaaagtgaaactcagaaagcacaatgtaaatcaagggaaaagaaaaacaagatacattttaaatgacattgttgagctgtcagatctatccttacttaagaaacaaaactagaatttttctgttacctgagttaacaaatgtatttaattactagtctgtttgagttaaattttgggtttttataaccaaaggcactttaactgatgttggcttcagacacagagaccttcttttatctccactgtactcccactagcaatatcttggcaatatccttataattaggttcaattgtaatgaatttttgccttgtccatcctcaaaagtccaactcctactttgtaccttagattacccaagatttcatgcacctaatattgatgctcaagaaatttcttgtcttttattcccatccaaatatgctggtattcttccttttcttcgtgtctgacttttggattatgagagtgatgggataattagataaatgaaatagagtggatatgctaactagtcttcaaatgcataccctagcctataaaggaaaacctatcagactaacagcagacttctcaaataatgtaacagacccccaaatgatgtcaaatagaagcatgctaagttgcaggtgttttaagaattgtgttaactgaaaatctggcctatgtgttatttaaaatggcccagtggtttggaggcattgttagcctgcctctcccacttggaaagacaaaatagtgtgcagagattcacaatgtgcacttctttctaagaagcaacacaggaacttaacagaaaaactgaaagaaactacagaccctttgaaagaagaaacagcagcctacactgtgaaccagatggaaaactgtgagtctccagagtgtgtgagagggggagagactgccaccgtgacacacactcccaccggagagccgggcaattcaggccatggaggcagatcttaacactacccagtgctggagctgatttakcgagtgatggggtgagaagaagcggtatcaggatgcacattgcctgcactttcacactccagcaaggacagagggaagccattcctgatcctacctcacaggggacctcacagaagtctaccagctaactcaagctgcagtcacaggttgagagaagctcccatctgagatatgagattataaccttgagtgaggataaaccctgttggccagaaatgaggggcaagtagtaagtttgctatagccatgggcgcaggagctgggcactcctgcttcacaggtagaccagaaggggtgcggcctgaaagctgtggtttcactggtctccactgggacggcttatggcctggggcagtttttagttctacstacagactacctggaacccagcctgctgcttttagcgaacattatgagtgggatacatgccttgccaagtgcatgggagctgagtggggcttactgctgcttgctaacccctgcatcccatgcggattcttctgtgcaacagaggcagctgtgctactccctgaaatattaccccagtagccaaggaattgacttatgatcctcactggggccgctgcttgtgcctgcatgtgaggagccagagcaaggagttgcctgacctagcccatacccagctttgcccctccacctgccctggtagcacagtgcaatatacagggatgtttgggagctccatggccctacccattacctacctgagacacaggaatacctcccctgagtgacataaagcaagcacaaattctaccactacctccacagctggtgcttttctacaagccatgacctactggctggaggccaaccggcacagcccattaaaacatctgcataaacaataacccagcactcaggaagccaaaaacttttatgcaacctcagctattgccattgccagtattaccttagctaaataggacgtcttgagtctgtctatgtgcccaatacactactactacagctggcatttgagaaaaccaaaacactaaagctatttataaccaagaaaatctcagagtctgtgtcactccccacccacccccatcagaggtaatgctggcacctggtgctgggaaactagaggacagttcacatcactggatcccttgcagatattctccagtacagcctgaactgtggcagccccactggacagctagacctagaggagcagtagaattcagaatagcctggctttcagggactactattttttggggaaagagtagtgaaccacattaagggagcatcccatggtataaaagaaagcagaccatgggccttgagtcccttaacttcccacttgtgagaagtttctttcgggagagacacaagtgcagtgctgggctcagtggggaaagtctgcagctctaccccaacagtcaaacagcgctcatgaaaggtttgagaaggtgatttctttttcccctcacccaacactgcagagagctggggcttctctcatgggagctcagcatggatgcatctgtagacagactttctggaacactccaaggtaactatccacaggaagtgtgccatacaggttcagacttacacaagaggtagagctacaacccttctttagagggaacatcagcattcttgcagatagaaagagatacctgtttgatctgaaaagctagaacaccaggtcagcagtgtgactgggaggtggattgctttcctgctttgcctggaaggagagctggggtggctccttcacttccccatgaaaagacctcagtgtatttcacggagagctttgccagctgcctctgtcaaagctgggacttcatccaatcgttggatattacatttacccacccgcyttagccacaacctgtgtttatctgtgggcacctcctactggcctgaagcctgaactactcaacccgttgaataaaatgctggaagaaaaacttttaaaggtgcacaccactggggaacaaaataagcttcatgagacctctgccattccagccccttaggagacagtgaacctactcacacacccagcccactgccactacaaccggcatctgagaaagacacttcacaatgattctctataaccaagaaactcatacagtctttgccacttgaaaccacccagagctgaaactaagtgtaaataaactataaatgttaaagtcacatcttcaaggaggaaaatttttttaaacccaattgaatcaaaaactaattttaaaataattagaagaaatagcctacacaaatgagaaggaaccataaaaacaattctggaaacataaaaaacatttgagttgttctatgacaactcaaaaaaatcaatcacactgactctccagcagtggatccaaatcaagatgaaatctttgaaataccagataaagagttcaaaaagttgattattatgttaatcaaggagacataagagaaagttgaaaaccaacataaaataccagataaataattcaaaaaagttgattattaagttaacataaagttgaaaaccaacataattttttttaattcaggacatgaatgaaaacttttctaaagagatggatattttaaaggaaagccaatcagaacttctatgaaagactacacatttcggcaactacaaaatgcagtgaaaagcttttaaaatagattagaccaagcagaagaaagaatttcagaactcaaaaacaaggctttcaaattaacccaatcagcacagcaaaagtaaacaaaaaagaattaaaagaagaaggaaagtctcaagaaatatgtggattatataaaatggccaaacataagaattgtagatattcctgagggagaaaaacgtagcaaaaatttcaaaagtctatttgaggaaaatttccagggaggaaaacttccctggacttgctagtgacatagatatccaaatataagaaggtcaaagaactcctgagagactcattgcaaaaacaaaacatcactaaggcatatactcatcaggctatctaaagtcaacatgaaggaaaaaattctaagagcagtaaaataaaagcatcaggtaacctataacagaaaaccaatcaaactaactgcagacttctcagcagaaaccttataagccagatggaattggggtcctatctttagtctcctgaacagaatgactgttggtcaagaattttgtgtccagcaaaactctttcatagataaaggagaaatagtttttctcagacaagtaaatggtgaaggaatttgtcaatactaaaccagctctatgagaagtgctaaatagaatactaaatcttgaaacaagttgttgttactcaccagaataaatactcctgaaagcataaaattcacagggcttataaaacaataacaatatgaagaaaacaaagtcactaagtaacaatcaatatgatgactagaacagcacctcacatctcaatgtttaatgtaactggtctaaatgctccactttaaaaagatgcacactgacagaatggattttaaaaatttgcaagccaaatagatacctgctatcttcagaagacatacctcacatgtaaagattcttatagattcaagctaatggggtgaaaaaagacatttcttgcaaatggaaaccaaaagcaagcaggagtagctattcttaaaacaaataaaatagactttagagcaacaatattaaaaaaggacaaagaaggtcattatgtaawtaaaataggataaattcaacaagaagatataacatgtctaaatttatatgcaccgaactctagagctcacagattcataaggcaattcctaccaggtctaaaaaagaaaatacatagtaacacaataatagtgggagtcatcaacactcctctaacagcactagagagatcatcaaagcagaaagtcaacaaagaaacactagacttaaatttcagtctagaaaaaatgagcctaacagatatttacagaacattctacccaagaactacagaatatacattcttctcatcagcacatggaagattctccaagatagattatatgataggtcactaaataagttcaataaatttttaaaaatcaaaatcatattaagtttcttgtcagaccacggtaaaataaaactaggaatcgattccaaaaggaaccctcaaaactatgcaaatacatagaaattaaacaatctactcctgaatgatttttgggttaacaatgacattaaggtggaaatttaaaaaatttttgaaatgaataacaacagtgacacaagttatcaaaacctctgggatacagcaaaagcaaagctaagaggaaagtttayagtgcaaaatgccaacatcaataattctgaaagatcacaaattgacagcctaacaatacatctgaaggaaccagagaaataagaaaaaaacatacctaaagctagcagaagaaaaggaataataaaratcagagcagaactaaataaaattgaaacaaaaaaaatccaaaggaccaatgaaacaaaaaatagctccttcraaaagataaaattgttagaacactaggtagattaaaaccaagacaagaagagagaagatccaaataagactaattataaatgaaaatggagatattacaactgatactacagatatacaaaagattatttgggactactgtgaagagctctatgcacacaaactagaaaatttagaggaaatgaattaattcctggaaacatacaaccccygctagcttgaatcaggaagaactagaaatcctgaagaggccaataagaagcagtgagatttaatcagtaatttagaaaaacaacaacaacaacaacaacaacaaaaaccaaaacactgcaaacaaacaaaaacagtccaaggccaaatgaattcacagccaaattctaccagacatccaaagaattggtamtaattcrattgaatctattccaaaagattgagaagaagagaatcctccctaatacattctacaagcccagtatcaccctggtaccaaagcaaaggaaagacttaacaaaaaakagaaaactacagaccaratctctgatgaatatagatgcaaaaatgctcaacaaaatagtagcaaaccaaatccaacagcgcatcaaaaaaataatccactatattcacatggatttcactttagggatgcagagatggtttaacaaattcaagggaataaatgtgattcatcagataaacagaattttttwaaataaatatatgatcatttctatagatgcagaaaaagcattcaataaaatccagcatractttatgataaaaaccctcaacaaactagacatagaagaaacatacctctaaataattaaagctgtatattccaaacccatagccaacatcatactgaatgagaaaaagttcaaagtatttcccctattaactgaaataagacaaggatgctgacttttatcccttctattcaacatagtacaggraatcctagccagagcaatcagacaagagaaataaataaagggcattcgatttgtaaaacatggagtcaaattatctttgtttgccaatgatataatcttatatctagaaagccctaaggattcttccaaaagactcctagatctgataaatgaattcagcaaaatctcattacaaaaccagtgtgcataaatcagtatcactgctatacatcaacaacaaccaagctgaaaatcaaataaaaaactcaatcccttttacagtagctacaaaaagataaaatatgctagaacatacttaaccaaggaggtgtagtatctctacaagaaaaataaaacacggctgaaagaaattgtagatgacaaaagcaaatggaaatacattctttgctcatgggttagaasaatcaatatcatgaaaatgaccatacactccaaagcaatctacagattcaatgcaatttctatcaaattaccaacactattttttacagaattagaaaaatcaatcctaaaattcacatggaaccaaawaatascccaaatagtcaaagcaacctaaacraaaagaacaaatctggaggcatcacattacctaacttgaaattttactacaaggctaacgtaaccaaatcagcatggtactggtataaaagtagatcaatggaatataatagagatctcagaaataaagccaaatacttaaaaccaactgatctttgataaaacatacaaaaacataaatcggggaaaggacattctgttcaataaagggtgctagaaaaattgcatagtcacatgtagaagaaagacagtggatctctgtctctcactagatacaaaaattaactttaccttgactaaagacctaaagacctgaagctaagacctgaaaccataaaagatctagaagagtacctaggaaaaactcttctggacaccagcataggcaaataatttataactaagwcccctaaaagcaaatccaacaaaacaaaaataatgaataggactcaaactaaaaagcttcttcacagcaaaataaataatcattacagtaaacagacaacttaaaaactgaaatgtggacaaaasacatgaatagatatttctcaaaaaatatacaaatggtcaaaaacatatgaataaatgctcaacatcactaattgtcaaggaaatgcaaattaaaaccacaatgtataccaccttacccgagccagaataaccattattaaaaagtcaaaaaaaaaaaatccccaaaagatgctcgggtggacgtggtgaaagaggaacacttatakgctgctggtggaaatacacattagtacaacctctatggaaaagagtatggagatttctcaaagctaaaagtagatctaccatttgatccaggaatctcactactgggtatctacccaaaagaaaaggaatgaatatatcaaagagatgcctgtgtgcatatgtttattgcagcacaattcacaattgcaaagatatgcagtcaacytaaatgtccattaactgatgagtggataaagaaaatgtgatgtatgttatcatggaatactactcagccataaaaagaatggaataatgtattttgtggcaacttggttggaactagaggccattattctaagtgaagtaactcaggaattgaaaacgagatactgaaggttctctcttataagtgggagctaagctatgggtatgcaaaggcataccaagtggtataatagacatcgaagacttaaaaggggtgagggggtaaaaatgaaaaactacctattgagtacaatatgcactattcagataatgcatgcactaatatcctagacttcaccattatacaattcatccatgtaactgagaaccacttttacccctaaagattaccctcaccaggcagtaatgaggcaaccctcttcttcctctgccaaagcagtttcagaagaagccaactaaagcagaaatgtgatccagaattttaaatatgatccatagtcttttaacataataaccaaaatgtctccatctcattcaaacatcacttgtcatatcaagaaccaggaagatctcaagctgaataaaaaaatacatttaatagatgacagcgatgttagaattatcttacaaagatttcaaagtagccatcataaaaatgaatgaacaatcataaacatccttgaacaaatgaaaaaatatcacctatttcaaaattggttgaagagaagatttggaatgttcccaacacaaagaaatgataaatgtttgagataatcgatattcaaattacctagattttattatacattgtatgctcatatcaagatagcacatgtaccccattaatatgtacaattatgtagccataaaaattaaaaataaaaataagcaaaggggaagaatgtcrccaaaggagaataaaaaaatagaatgttacagcaaagaaatcaaagaagaatgaaatagaaatgttagaactaaaaatattaaccaataaaataataatttaaaaagtcaacatatgggctcaatagctgaacagaggagacagagaaaagaaccagtccattgaaaaataatacaaatagaaattacacaatgtaaacaacagggacaaaatagactttaaagaaaacaaaaacaaaacacaacctcagaaatgtatgggactataatgcaaaccccaaacatgataagcccaaagaaatccacatgaaatcacaccatagacaaacttctgaaaattaaagacaaatgtttaaagcagtcagaaataaatatcacattctctgtggaaaaaagaacgttcagatgacactggatctctcatcggaaaccagggaagccagcaaaaattacaatagttttgaagtgctgaaagaaaaaattttgtcaactcaggatcctatatccagtaataaatactcttcagaaataaaggagaaatcaagaaattctcggagatgaaggaacaataaaataatttgacaccagcagacctacattaaaagaatgactatcttggttgaagtatcaacaatgcaaaaacttgtattattttctctgtggcctgaaatattattgaaggctttgctatggataaaaacaaaaccaagtgataaaaacaatacctctaagtctgtaatattctgccaaagtaaagatcatactttagagttatagtggtaggagttgaaatctccactttaatggtctctttcaaattggatagatcatggtattttaaaagtcacacgtcagtttgcatttataatccattcataatctgatggcatgtactgcccaagcaaatactactgattcttctgtaatacttgatgtaagaacttcttttgtaatgcaactgagctataacttgacaaattaggtttgtgactatttagggaaataataaattaataactagattaataaaaggagaagaaccaaataaatacaatcagaaatgaaaaacgtgactttacaggtgatctcaaagaaatacaaaaaatcctcagagactattatgaacagctgtatgcacacaaactagaaaaactgaaagaaattgataaattcctggaaattcaccctcccaagaactgggaagaaattaaaatcctgaacagaccaataatcagttctgaaattgaatcagtaataaaaagcctaccaaccaaaaaaaaaaaaaggcctagagcagatggattcacagctgaattctaccagacatacaaaaaacagctagtactaatcctactgaaattattccaaaatttgagaagggattctctagcttattctttgaagccagcatcattctgataccaaaatgtgacagagacacaacaacaacaacaaacaaaaaaaaaaaaaagaaagaaaaatatcaggccaatatccccaatgaacagagatgcaaaattttctcaatgaagtactagtaaactgaatctaacagcacatcaaaaagttaatttacggtgatcaagtagggtttattcctgggatgcaatgttggtttaacataggcaaatcaatacatgtgattcaccayataaatagaattaccaacaaaaaccacatcattatctcaataggcaaagaaatagcctttgatacagttgaacattccttcgtgctgaaaaccctcaagaaattaggcatcaatagaacatatctctaaattttaagagctatttatgacaaacccatagccaacatcatagcaattaggtgaaagctggaagcattccccttgagaagtgaaataagacaaggatgcccacactcaccattcctattcaatatagtaaaggagatcctagccaaagtaatcaggtaagacaaagaaataaaaggcatccaaatagagaggaagtctaactcactcttggaagacaacatgactctgcttagaaaaccccatagattctgccagaaggcttctagaactgataaatgaccttagtaaagtttcagagtataaaatctatgwgtaaaaatcagtagcatttctatacaccaataatgtccaagctcagaacgaaattatgaacacagtgtcacttacaaaagctacaaaaagaataaaatacctaggaatacagcttactaaggaccttaaagaaccttgcaaagagaattacaaarcaatgctgagagaaatcagagacaatgcaaacacatggaaaaatattcttcctattccatggataggaagaatcagaattgttaaagtgaccatactgccaaaagcaacttacatattagatgctattcctatcaaagtaccaatacatttttcacagaattagaaaaagttattctaaaattcatatggaatcaaagaaaagactgaatcaccaaagcaagcctaagcaaaaagaacaaagccagaggcrttacactacctgacttaaaactatactacaaggctgcagtaaccaaaacagcatgattcaggtacaaaaacaggcagactgatagaacaggttagagaaccctgagataaagccacaaacctacaaccacctgtcctttagcagagttgacgataacaagcaatggggaagggaccctctagtcaataaatggtgctgggatcactggctagccatatgcaaaagattgaaactgaaccccttcctttcaccatatacccaaattaactcaagatgggttaaaaacttaaaagtagaactaaaacaataaaaaccctagaagaaaacttaggaaataccattctggacatgggcctttgcaaagaatttatgactaagttcccaaaagtaattgcaacaaaaacaaaaattgacaagaaggacctaatyaacttaaagagcttttgcacaataaaagaaactatcaatagaataaacagacaaccttccgaatgggagaaaatattagcaaactgtgcatctgacaaaggcctattatccagaatctgtaaggaacttaaatcagtaagcaaaaatatattaattgcatttaaaagtgggcaaaggacaagaagagacacttctcaaaaaaagacatacatgtggccaacaaatacgtgaaaaaatgttcattatgactaatcactagagaaattaaatttcaaactatgagatactatctcacatcagtcagaatagctattattaaaaagttaagggccgggcgcggtggctcacgcctgtaatcccagcactttgggaggccgaggygggtggatcatgaggtcaggagatcgagaccatcctggctaacaaggtgaaaccccgtctctactaaaaaaaatacaaaaaattagccgggcgcggtggtgggcgcctgtagtcccagctactcgggaggctgaggcaggagaatggcgtgaacccgggaagcggagcttgcagtgagccgagattgcgccactgcagtccgcagtccggcctgggcgacagagcaagactccgtttcaaaaaaaaaaaaaaaaaaaaaaaaaaaaaaaaagttaagaaacaacagatgctgtttaagctgcagagaaaagggaacgcttatacactgctggtaggaatataagttagttcagccactgtggaaagcagtgtggagatttctcaaagaacttgaaacagaactatcatttggcccaacaattccactattgggtatacacccaaaggaaaataaatcattctaccaaaaagatgcatgcactcatatgttcatcacaatgctattcacaatagcaaagacatggcatcaaccaagatgcccattgacagtggaccagataaagaaattgtggtacatatagaccacggaatactgcacagccataaaaaagaatgaaatcatgttctttgcagcaacatgaaatgtagctggaggtcattatcctaagcaaactagtgcaggaacagacaaccacattccacatgttttcgcttataattggaagctcaacattgaatataaatggacacaaagataggaacaaagactctggagactgcttcattggggagggtggtgggggggcatggattggaaggctacctgttatgtactatgctcactaccttggtgatgggctcattcatacatcaagccttagtgacacgcaatttgcccatgtaacaagcctgtatgtgtaaccactaaacctagaataaagtagaaaccaatagtaataataattaaaaaaccagctgggatgtttataaaattcaggttcctgggcaccaccccagacttaattgaatcagaatcttaggtgagatgacactaaaactgtattcttaacaagctccccagtgattcttatccatgctgaagattgagattcacatcattggattgtacaagatatctttattaatgccaccatctgtgggcgaagtgggagtgacttctctcatcaatggacacactgctttgtgctcggtttcctcccatacctctctgtcttttctaatggaattcctttgcatgcagcagcctagcacctcttactagatcatgtgtccagctgaactttacttaacagccaaacacacagttattttcacaacaatattttcaggctgtgtattaagcctatttcacagctgtgatcacaggtattaaagaacagatgtattgatttgcggggcacccatttttcattgtatttgatgtccttgtccacaaggcggaatggcaagaggcttagaaatctaaccatgtaccggttatgttgtrtttgctttgagcctatatcctcattgaaaacagctgctgaactcagagttattatgaagactcctggagagaaagcagaatggaataaatgggaagagcacaggctttggagtttagagagagctggtgagaatgccatctctstctcccaccagctgtaggatatggggcaagttattttacctctctaagcttcatcttcaaaatgagactaataatagtcccttgaccagcattgtcaagattaattgaaatgatccagatacatggtgagggctcaaaaaattgcaagtatcattttcagtttggggaaagaactaggcacagtgccagggatgcaaggcattttttcctcttataatttaaatcttctgagcagacttatcagctgtgcagctgcaaagtgaattttaaaggtacacagacatgggagcaattcctgccctagtatttcttacctctgtgactttggcacaagttgtttaaatttttgagcctcattttttgtttgttaaataaaggaaatagtagttacatttacctcacagaactagcataagactctaaagtagtatagctcacctttttctctcccctcctcccatgcctctcttccggagaaaagagatactggctaggacggtgcatgggtttacagtcaaattctggttaatgaagttgctattcaatttgtcactaaatcatgattgcattttttcaaataatatagctagaagactccagtcctctcaacttagatcaagatgtgttatttgttatgtaaccagtttaccattttttctaggttcttgaatagacaatcacacccatagttaagtggcttcttgggacatccaacccatacaagatggccaacattaaaagaatggatgcagttaatatagactccagctgaatctggaatgtagactaagaatcctcttttgagcataggctatggcatgagcatccttgcgcccatacggtgcatttctgtctttagagaggaaaactgtagtaaaaaaactgttacacttacaggaagctcaaagtaatcatggaaaattatatttcctaagtgttttgtrctttaatactcagattacagcttgtttgaggtagcaacatttaaagaggggaaaaaaaaacaacctttgtttagatcccttttcaatatgttttcttttcaaatgaatcaggaaatatttttgaataacagatatgtgatttacaactcaaccaaaaagaaattattcacatgtaaagaacgttatttcctagttttttcttattctaatttctttttaaattatcttatttttgcttttttcattggtacttttgattccatttctccctaatatttcagtgagcttttatttctttacaaaaacatggtagaacctttgctcacctttcatatctttctggatttttcggtgataattgaacaaaacatggtagtaattattacattattgctttcttcttgcctgtgccatttattgtcattgtttttccttttttcttcctttcttccctgcctccactgcaccccggattatcagattatcaccctattatgacggcatttctgagttaaattacccttagtaagacagtaaatgggtagaaattaaaatgaatatattaatactaatttcatctatgtcaactatctgcacagtcttgtaagcagacatgacagccttttgagtaaattattgctgtttgaaaaggatcacagataatcttggtaacctcaacacactttcaaattcctgaaatggcatttatttcaattgtgttttaggtgtacattaaacatttttactatttatctgtaaagtacatcagtagtacagcttttcaaaggatgatgatattctctgcacattgctgatagtgatccaatgcccaaaggcatgcttaaaaaaagtaacatgaattagaaaataatagtgttgtccattgctaaaaaattgttttggttatatagaagaatataattaatgcctaattcattataagtaagaaatattctaagatactaaatgactaaccagttttcttttaattgaaagcagggggtattaaatagaaagggcatttttatttctgctcatattcatcttgctgaaaattgtggattctgggaaggcaaaaatgaataggcaattcaatagaataagccataaagaagaatttctcatatgtatttgttatataatgattttgttgaacttcagtaaaattttgtgaagcactttgtgtgaaacacttagaatttttcctataatcctggagtgttacagttattaattttaaacagaaaatgctatctcttttctcattaatgggaggagacagctgtgttacctgaagctatgggctgcgagcaaccctggtagtcaatcacatcattcataatatgttgggattgtgcttctggcatttgcttattcagaaataatgcatatcattagaatttttcactgtgattgcatttttagttgatatattcggctaggcctaacactgaaatacagttgtccagaacatcagtggttctccaaattttgagaaaaatatatcacactttagtgaactaggaggtttatatttcatgtgaacytgagccacagaaaataattctgttttctttaaacaatgtcaatatataagccatttcccctagatgcactgtttccattactctacctagggatgtagtattagtcctgtgcacagacacttgtaatcagagccccagcattccatttktcattaggggaaacacaaggaaaactgtacaatttggactccgaayatctgataagcagatggcaggttagcctcaatgtagtgcaaatattgtctgtttgcaagactgatatttgcacacacgtctttggcagatgatggtaaagcattgcacagaagaagcatgtgtcctgagtcacacagcacacagaaggaaacatcttcctcaagtctattttctctcctctctttgcaaagactgatggattcttttaaatacaaagatattttgagaaaggttttgaaagttaaatgtggagataagtggcctccaatctgtgaagttttctttatcttttttcctccccagttaaaattcaaacttagaatttctcactcatctaggttattttggtttatttcatgttttgtttttttttttgagtcctggcctaaatgcaattagccacacagaatgtgattatcaatcatattcaagaccctcagcataaggtgtatgtatagataggtagatgtagagatagacatatagtttgtctaggtatgtatgcctgtttgtgtgtatatgtttgcttagattcatattcagatttttttttttttttaagacagagtctcctctgtcaaccaggctggagtgcagtggtgcgatcttggctcactgtaacctccgcctcccgggtttaagcgattctcctgcttcagcctccctagtagatgggattacaggcacgtgcccccacacccagctattttttgtatttktagtagagacggggtttcaccttgttggctaggctggtcttgaactcctgacctcaagtgatccacctgccccaacccctcatagtgctgagattacaggcataagccaccactcccggcctcatatctggatttttttcatactctgctcatgggagactgtgtagcataatgaaaagatgtccgtaagttttggaatctctggaggcaaatatgtatagtggttaagaacatggactctaaaatcaaaattgcctcataaatatgtacaactagtatgaatacacactaattaattgtttaatttctttaaaaaatgcgtcagtgattctatacaaattaatcatctgcattgtgcctcggcggcttcatctgtgacgtgacaatgacatagggtcattatagatttatcttatttaactgcataacaaggttgttatgggtcattacagatttatctcactgttaacaaggtcgctrtggggttaaatgagataaatctataatgaccctattatctataaagttcttatgagagggactcttgtataataaatactgtataaatgttacttttctttttgttcattagtctgccataygtatactaccttgaacccaaaagacttagggtgataattttaaaacactgaataaatacgtgttttcttgaactgggcttagttatgagtcagaggtccataactgctcagccatgtgcctttgagtaagccacttaactcttctaagccaatttcctcatccatgaaatggggcagtaattgctgccctgttttcctcacaggattattatgtagaccaagtgaaacaatttatatgaaagtatgggtttagcttgaaatgcaacacagatagttgtaatgctattttttaatctccaaaagggaatgcgataaccaattcaggctttcacttcttctggtctagcaggcatgataatacacctacacatatgactatattaaaggtagaatctgctaatgcatcagaaagttccagaacaaatgcttcgatacaacttaaaatataatgaaattgtttctccktctagaaataatggaaagagaataaatacacactagtcaagccttagtatatgctttgaagtaatttttaaaattgttagttaccttgattactatcttgcttaaataatatgtttcatctggagccagatcaaatcaactgggaacatgtaccaaaacctataagaatctcagcactttgacagattttatttcttggtgtattaggagaacatcaggacatttttttgagagctccttgctcaaaactgttttcatcttaggaaattaaaaatgtatgctcacagatatttcactcaaggcattttgttcagctagtaaatattgtttttttcttctttctttcagmggataaaggatatgtctcatcagtttatgtggtttaaaaaacatttccattagataatataaaattttgtctagaattcaagtgggatgtctttattttttaatttttttttttttacttttgctccatctgagacctgtgtgaaatcargtggtttttaaaagtcaagttagctggtttgttctgatgtgtttggtctttaaaaattcatattttgtyggctgggtgcggtggctcacgcctgtaatcccagcaccttgggaggccgaggtgggtggatcacgaggtcaagagatcaagaccatcttggccaacatgatgaaaccccgactctactaaaaataaaaaaattagctgtgcgtggtggcatgtgcctgtaatcccatctactgggaaggctgaagtaggagaatcgcttgaacccgggaggcagaggttgcagtgagctgagattgcaccactgcactccagcctgggcgacagagcgagactctgtcaaaamaaaacaaaacaaaacaaaamaaaacaaatcatatttttgaaaggtataaggaaaactagcatctattgcctttaagattttctgtgggatttaggtctcaggggtaatgtggagagacactgaacccacacagagctaaaacttctaactgaagtatccytaaaagggtccattggactgttttggtaacatatctcctgtctataccagaatgacttctcttacacctcattttggaaaggcaagagatgagagtcattcttaatggctgcacagatatgtggtagaccaaagaaaggtgtgtggctcagaggttgcagacaacttccctatgctcactctcctttcatagtattgcccttcaaaagaaagaaaacatttaacaaatatctacctatattatttttattagtaatggctctgccttttgaatcaactctttgaatactgttttattactgaaatgacttttacaccacccactcctgatattgctcataatatcttactgaggtactttcagatatcacatcaagcgtgggtgatttgtagccataaacaattgtcagtgtagataatagctgactgtacaagctgatatatttgaggtctcaaagccatcatgtttaatatccagaagtgcattctctgggacccaacaggatgctaacacctaccatcaaagttcatgttctgagaataataatgtcttattataatttttgaataaatatgtcctgcttattaattaaaattgttctgtgcacaaarcatgttattactgttttcttccagctaatgagtcatagtactgagatgattacttttgagattaatcatttttaaatattgcaaagtatatctgttgcatattatgctccatctacaggattctgttatatttgagtaaattttagataaagtccataaaagaatacaatactctttttacatgggccattatctcttattaaccttgataatgtttgtcccaatgaaagaaaatagaggagggtaaggaagactaaattgcaaagcaaaaggctggcgcagctaagaaatattggctgaatattttccatttgtccctccacatcccctttctctcctcctatggtcctaggaraacatcgatggggcagsctcctttgttctctggcttctggttgggcaaggctaatgagaggcactaggaggtgattagaggccaggagcaaaatgatgtctagcttttattctctagcttcttcctgacaaagccacagtttatcagagggcatgttcctttccaaggccacagctcctgcagatcctttgctatagtcagagtactttctggatttcagttacttctctcttcctcctcctcattcctttaggatgtagagataggaagcaaaggctttctctgctgccagccctggcagacttcgcttcccaggttggtttcctttgtcattctgccccatgtatgtaaattgtcctgttatcagtttctctttgtttactattcctagkattccatgcgtttctgctaacatctgatttggtacaagcagaagaatgcaaagaagataycagagttgcagccagcattgctggatttgaactttggttctattgctccctagctttgtgacagcaggcaaaccccttacccttcttggactgcagtctctttaactgtgcaatggaaggtggtgaacccaattctgagctctaaaaatgttatgttctgtatgcagctcaggaagtagaagtggccacccccaagatatatcctttataaattattcaatcatttccagaagggggagtgaaataaagacaccctaggggtattggtgtcagaacttagttaatgtcatccatgaacttaagggatataactcatacattgaaattgccttattttcatatttctctagtgttttctcattttggatacaaatgttatcaaagtagagatagaatgcttgtcagttttgttgaagggacactgtctacaatcaggttggactctaattgattttsaatgaagcactctcagctactacttcagttaggcaccagtttggctataatagatgattttttaaggtccttaatagatttctatttgaaaaaaatgtcaagcatcacttcttggctaatatcttctttatgctctcttttgtctgttcttctgttagaagctacctactacctgctttttcttgattgtcttgttgcaagatgaaggaaaactgagagaagcaaatgaaagtaaagccatagtaattactgtaaatgtgaagtatacatgtttgaacacaatctctatattttagtgtagttgttccaatggatggctctgcaactgtgtcagttataacattttcaggacccagagtagtcagaagagcaaatgaagtttattattgtaacttggagaactgctgtgctggggcactgagtctctgagctggaaaaaatcatcaaccaagatggatggatgccagctcagagatgaggagggtaaagattgaacatggttgagtggcaatgacctgaaagggggatgtgtgaaaacaatatcttagtaaaatggcaggatgataaatttgtttttagtgaagcccttcgctgttaagggaaatgaaattttcctctctctctcgtttatttttattttattttttccccgagacagagacttgctctgtcacgcaggctagagtgcagagatgcaataatgattcaccgcagtctctacttcctgggcttaaatgatcctcctgcctcagcctcctgaatagctaggactacaggcatgtaccaccatgcccagctaattatcttatttttcacagagacagggtctcactatgttgcccaggctggtcttaaactcctgggctcaagcaattctcctgccttggcccccaaattgctggaattacatctgtgatccacctcgccaggccagggaaatgaagtctcgatagactattggagctcttagtttctggagaatgtataatatacagaaacatcatctctttcttcataggctcccatgccatcctctgtcattgcaccttccactgattagtctaatcatatgattccttgcctgtgtctgtcaactgcctgtgagttccctgttcataatattgagtgatagtgatattgaaaaatgaactttagacttcaaaagccacctaaacccctccccactcctccctccctccctcccccttcccctcctcctccctccctccctcccttcttctctctctctacatccttcccactacctcatccactacttgtcatccactagccccccttcacccattgccgctgatgaagcagctattgttctacacaaacatatcctgcatactaatcaccaactccaccacgtaaccaaaccgttctaactcacaacgagaacatgacatcttggcgcacctaacacctagggcgaagctcaactggccaaacnnnnnnnnnnnnnnnnnnnnatagtagtgcatagatataagaagaagaaaacatgattagaaacggagtaagaagaagatacgaaagtagaaaagagagacaaatcgaagattaacaaagtagcaaatagaggaagaggagagatagatcacgaaaggagaagcaaaagtagaaaaagtaggaaattgagaaaagaaaggacgtacagtagatgagaggaacgacgaagagatgaagtaaaataagaagctagaaagagcagaaaacaaaagataagtcttagtattatggtatgatgaaggatggaaagtagtaaagattcgtaaaaccgatggaagaaaagttaataagaaaggtaaagtaataagaagtagacagagaaggtaggagaaagatggagtcgtagaatagagaagcaaaaaaatagctaaatgagataagaaaaatcagaagcaaatttggattaagaaacgactacaaagatggtatgagctaggagaacaagaagggaaggaggaggacgcaaagacggagagagaagaggagcgacaacaaaagacgagaaaaaagaacaagagagagagaagagagaagagaagaaggagagagcagaaagagaagagacagaggggaagaggaggcagagagaacgtgcgagagaagtcacacacgaagaacacacaccacccagcagcggcaacgcagaccctaccacagacgaaccgggctcctcctccctccctccctcccttccttccttccttctttctccttcccctcccatccctctttctccctaccccctccccttccctttgtcccttttctcccacttcctctctctccccctccccctaccatcctcttctccccgctccctgctcttgccctcaccctagcccactccctcccacctctccacctctctttttctctccctctctttgtgttttacaaattcagaaaagtagtaaagcagaaatctgtgatgtttctgtagcttaaagttatttgctaatatccacattcagtgacaacttctagcagtttatttcaaatctcagcttgggaaagaaattcaccttggtttctcttttgacatttttggatgattagccagactcctactcaggagtcacaggaacctagtagcaggggttgcctcttggagcatgaagaggacaaggagacagcgatgggaaggagattcacattgtactgcatatacttggttctgttattatttttcttaccatgtgtcaactagtcaaaaacattttcattcaactcaaaaataaataygcccactcaattcatgaaaattgcttttgcgtttgattttgaattgtttgamtacttcagacgtgattatttcaattatgtaagctaagctgcatttcaatctgggcacagacttaycatcaaaatgttcctgttgagaagaaccagtttctcttctttaaatttcaagcagttttatatttattgtcatgatctaggacactagtgataatcatccctgattcctctctttgccactcccccatcagtcaccaaatcctgggcatttgaatatgtrcaactcgtgtctttcttcatttctccaagtmctatcactgttccattttgggacttcattatctcttggagagaatactgaaacattcatttaatgcctgcaggctctactcttagttaccagtcctccacattgcagccaaagctaacttttaaaaacagccccgattatgttttcctcccactgaaagtcaataaataaaatttagtgtttcccactctccacagaacaatgtctatgaatccgttagcgttctggtttcaacctactcgtcctgacctcaggatttctttcaacatttatttacctcatttcctttttttcttttcagtggctgctaatatgtcagatacaatactaggtgctgggatataatgaaaagcaacaccagatagatctccttttctcctaatgttttctgcccatgtgggagagggagcaaacaatcaaataatgaaaatgtttattcacaaggagagatcagtgcaatgagaggaaggagctcagagctcggaaagcctatacctgagagacytgacatattcttggggctctgaaaaactttcctgagtttatgtcgctaaaacagagatctggagaatgaattgcagcaacctcaggcgcgactccatgctagctgcagcaggcaacctgccatccttcaacctgctgtgagttttcctcaccctctgcctcaggttttccctacttcatttgatgttcggtaaaagtctgtttaattatatttcccctatccttccctttatggaatattaattaagatccgtctcacgtattacttctaagtgcagcttccctgacattgctaatggcctctcttcttgagccccatggccctcatctctcagttcccacatcattttatataaattagctattacttgrcatctgtctcattgttacctacacattttacttatttctctctccatctcttatgtatcctttgtattcccagaacgtaaaatggtgctagaacagtaaaaactcagtatctccattggatcaagtagtacctaacaacaaattggtgaagtgattgttttataggtgctgtcaattttattggctttagataataaatatttacagattgtgtctttcttttttacaatgtcattactccaagaagctcctggtataaggaagtgaaatatttcaattattgttttatgactyagtaatttgaaacttggaatgcattttcccaaagggaaggaaggtagaatggtatttttcgttcctgtatatgcatacgaaaggcagagctgcccagtggaaatagccaaagatacataggttctaatgctatttctgacttttactagctttrtgacttgagcaagtgccttaactgaagagcaactcatttctttcacttgaaaaaataaaatacaaataacccttcccccactaatttattgtaaacgtcgaataattagcatccataaattgcctagctcaaataattcaagctcagtattatatgttagttctcttccttgtcccttcctcaccttttatgtccttcaaggaaaaggcacttttggtaactttgtcaggatatgatagcataagtaggttactgagaatgaaagagtcmgtgcttttcaagtcccctcaaaatcagaaagagaagacctcagcattcacatgtgactcacttgtcgactcacttaacaaatgatctagcactccttatttgccaaccagtagttaagcaatggggcaatcaaatcccaatggcatcatcactttctatttgcagagaggcttggagaagctaggggaagagaattgtaatctggatgaagcgggcccatgaggtaaacagggaagagtagccatctagaccatagccctgctgaaacctgtatgacactgaagcctttcctggtagtctggccattgtacatctgctcattatgggtcctggctagaggcaagatctgtagtatgtcacaggcacagcaataaggactttgctcattatttaactctgcttttcagttctggaaatatgaacatagcaccaagtagacaacttttggcgaagtcttttccttattataagcgcataaaactgtatcgattattcctataaaggagagtattgtgaacccaaaatatctgcgacaggtctcagtcaatggagaaagtttgttttgccaaggttaaggaggtgcccttgacacagcctcaggaggtcctgacaacatgtgcccaaggtggtggaggtacagcttggttttatacattttcgggagacatgagacatcaatcaatatatataagatgtacattggtttggtctggaaaagcgggataactcaaagtggggaggtggcttccatgtcataggtagataagagacattcttttgagtttctgattatcctttcactgaatacacaatttattggaatagtcacttatgtcttagtctggcttcgtgaaacaatagggcaaaggaagcaatcagatgtgcatttgtctcatttgagcagagggatgacttagttctgtctgtcctttgtccacaaggaatttccttgtgggcaaattgtgaggggggtatgtagaccttttatctttgtaactatcttatgtaggaatagaatcggaggagggtttgcccaacatggttcccagcttgacttttctctttggtttagtgattttgggggccycaagatttatttttctttctcatatgaaacaactagcaaagagattatgtaattatatctttaaaaaatctttttttctgtaatggaacaactttttcttttaatctttttaagtgaattgcaaaatgacagcatattttcagcaaagaaaaccaaatcaggatttggtatgcctgtattcatagagaaaaagaagtctttgataaaaagaattacttttaattcttctgtaatttgcaaaataaaggagaaatggctatttcatttgatttgtttctctttttgtaaaacagtgctccaatctgaaacagctgtggtgactaatgtatgtatgactgatatttactaatgatagagatttgaaagaaaaaagcagtggttattctatactgcattatttaatataattattaactttgcaattacaaagatactacagtctatagaacactaagggaagttgagtgctatgtggtcacctgctgttctttggcagtgacagttctacactgacacataaaaagcaataggaattgatgatgtattcatgaagccatcctcccttaaaatgtgtgggtcaggcttatattacatattttcacgaaaaattattttaatgttcctgaaatgcaataaaagtgatcattaataggagttatgctatgttggagttaggatgaactgtaattggttttattgaacaaatagtataaagatatttccagtgaaatgcttcaaacttcttagaacaaaatatttatatacttaaaagtattattttataaaataataaatatagttattagactattttacaatcaataaactaaaagagatcctaaaattacctttgatctgtacatattagcataatccaatgacaaccacaaaaataaaactgagtatattctatgctcagaccactgggcaaggctcttatctacctgacatcacttaatgtagtcttaaatattgagtaatcgaggatagtaaaattgcttgtgcttttggtggctttcttttaaaattttcctcacrtgattgtattataggctctcaaagagtaaaggatagaggaggacttagcattacttaaaggagataaacgtgctgctggaaaagtaaagctggacttgggagttagaaatctcagctgggctatctgcttaggtgtgtgaacatcagccagttggcttaacctatctgagctcagtttcttctttttgaaatgagggtaataatgtttacatttatatgattaaaataaggattaaagagaatgtaaataagagaaatttgtcagttaccttatatatgaaaacaaagtcaagctgttagctgaagttttccttgaacaatgagatttcagtaaaattgacctgttctagcaccaacattctgtgagatgcacaatgtcctatgtctttgctaatatgtatgcacgtgtgtataaatttttacaaaactccaggccttaggttttcatagtaatttctgactcctagttctattcattgaacttctaatcatacttagctgttacctctcacctgttatcttctctcttctctgagccatctcatatgtggtactcgatcccttatctttgatctccccctcacaaaccatcgtcacgatgtatattgccaacctgactaaaggttattgacaatatagagcaattcaaatcatgtmggataatgtgaaatttragatcatgcaaacaacaaaaaaatgggtgtaaaaatccctattctcataaatcctatggtcactctcatgctaaagatttctcaaaagtttccattaggtaaagtttttaaagccctgcagcattttcctttgcttatttagtctgttcatccaggtccacaatctccttgcttcctgttttgaatgtctcctctcatcagagtcctttaacttcctctcttgtgatactgagtatcatccaaccctggtctcatctttgcaaactgtaattctcctttattcccctggttagatccttcttacccaatcactttacatagaacttggttttattgtgtactagccaagtgatgttgggcaagtttattaatgtatccgataaaaatgtgagaaatagtcctgtgatatgtctttcctgtgagcattaattaagacaatatatgtaaggtactaagtatagtgtctggcacacggtaaacatttaataataattgttagatgtaacaaattcacaaatacagtttttccagtatgtttgcccattgtcttgccctctcagtacatttgtgcattgtatgtcaaaggaacaaaaagaattttaaagatgaagtacattgataaatttcaggattctactcctcttgattttagataaaaagataaaattcctgtaaaactctgttttataacttgttaatgtttaacttgtagtgatgttactggtattttctttttcttgagtttaaagtttttatttttatttttttaaagagtcaccttgtcttagtttgggctgttgtaacaaattaccttaggctggctggcttaaacaacaaaaatttatttcccacagttctacaggctgggaagtttaagatcaaggtgttggtagatccaatgtctcaagagggtccacttactggtttacaaatggctgtgctcttgctagtttctcacatggcygagaaaagagagtcagagagagagggagagagagagagagcaggcaagctctctcatttctttttttatagacgcatgaatcctatttatgagggctccaacctcatgccctttcaaaggccccacctccaaatactatcacattagggattagacttcaacgtatgaattttggaggacacattcagttcataccacactccattatagatcaagaccgagaatataatgaagtttttggaataatgaattcataaactaatatccatttagctttgcaaataggctaggacataaagctgtagattccmaaatgataaaagtacaaaaaagtcatgataaaacaatagcaatggtgtagctgtgaactcttgatacctgtgttgcaacaccttctgcaataaccatacattgcaagatacagagacaaattttcttactcgtttagctttggtatcagtggaataatagctactaaagtatttattgtacaactattatgaatcaagtgctttgtaggcaattcaattatgacaacagtgccatgaggtaggttactgttttacagataagaaaaccaagactcaaaaagttataaaattcgctcacgtttctatctccaaattcaaaacctgaayaatctgactacaaaacccaaaatcttcctgctgtgttttgcttagaagatggaacacaaggagtttttattatgaccagcttaataaaaagtagaaatattaaggagtaattctcattgttgagtttacacttttaacaaagatgaaaagcatattatggcttttttctctaaccaccatttctgagaaatccctgtgagtcatgcaatcccgtcctctctccattcttcccacttgtctttatttcgtgcctattgtgtgttgagcgtcagattaagcactaggatacaatgatgaacagaaatagattatgatgtagaagtggagacagacacttcccaaatattatttcagtgaaagtaaaattgcataagagaaacactaaaaatgaattactatgtagtattataagagcttaaaagggggtggcgtgggatggagagatgttcatttggtcaagagggtagaagaggatcactgaggaattggtggtttaaactgtgttctaaaagatgagtacatgctaacccagtaaatgaggaaagaacatttcagacccagagatgagcatgtataaaagtctgtcgygatacccgagcggggggtgcatggtggcataagaaactgaaagaaactcaatgttgtacaccaaattctccatgaagcagaatctcagctgctaattggaggtgggtgtggggggtgttcctgtgtattgtaggatgtttagcagcatccctgacctctgctcactagatgctaaaggcaaatacccaacccagagttgatacaatttaaaaaagctgcaacattgcaaaatgtcctctggaaggaggcaatattgtgcctcattgagaacaagtgaggaaaaaaatggtgtaggttagggtgggaggggtgggtaaaaaccagatcatgcctggccttgtagccatgtcaagtccttttgtccttatttttaagaaagggagcaagaccagatttgtgttaaaagtatcagagtcactgcagaatagaaacagagtggagaagggtctgattggctgcaaggagaagaagaatagctagaaggagatgatttgtataggtaataactaatatttgtagggaggttctggtgcaaaggaaaaatgaacatagatatgagagatatttgggttggatataagaacctgaaggaaaaggagttgtcacagatgaatccttagttttgctcacataggtagatgatgatgccatttactgatttatggaacagatgtgaagagtgaagaccatgttgttttttagtgacttttctaaaattagggtgaaatataaaaagacatttggatttggatcagcagctccaagagagactgatagaattatttagtgagatttgaatagatactaattaaaactgtgaatgtgaaattggatgttttctctaccctgaaagaggttttagtcataaccagtcatttcccccacagcagtttcaactccttttcagactcttgctgacaggtgtaccataaacattgatgaatttgtcatatatttaaaatatttatctatcttattccaataatgaaatagacacaaatcagtacacacaaacatacttgtgcacacccacaaggtgtgaaaaataatgaagtagaaaccatcaatatcagggcattttggcctttatttccatgtaggaatttatgcaatatgtgatacctagttattataagacaaaagtactacttaaatttttcatctagagtcctgcaggccatcagtgaatcccagaaaagtgtcaaagatttccaatacccaatatacctctttaaagagtataagttattttttgccatttccccaaaagaaaatgataatatgaacaaaatcttggcaagagtaggaaagaaagacatttaaattaaaaccattattcatatagaaagtagaagtgcttcagctttttgtaaaagattggagttggcaaccggagagatggctcttacaagcataactgaaggcttcatgtctgacagcaggatctgggaggtcaagcccagaaacctagctgctttgtccaaatgtacctgcagccttttccaaatgatggcatgtgcttatccatatcccagttttccccagtgcttattctctcattttacaccttctattcacagttctctggcattccagtatcactgaccatgtcattttcaagggtaaggagtatgattgtccttgaaggtcataattattttaaatatatatactggaaatacctccacagactcaattactagtgaactgttatatctaatgactatttctacaagaatttaatcaccagaaataaatgaaacatataaaaccaactcaaaattggtaacaggaaaaaagtgatgtaaaaaatatttttaatcagaatcagataatcagaatattgtaaggcttagtgtcttatgaaaaagaaagactaagaacatttcatgcataatcaggaaaaggaggagctcaacaattctgaaaaccaagtaaggagataaatataggaactccagttgtgggagtatacttatgtgtgagcagccagaaatgacgaagtcctgtctgttacttcacttagacattgtgatcaatcagatgggatattgagagaaacaaaaatcctaccgttgcagaaaattcccttggaaatggtaaaattcactcattattctgtctttgtcatcattttaacaaaccctcactgaagcatgcttaatatattcacaatgtttttgaccagagactgaacatggtatataccaatttttgtgttatcatatcagagcatgtatggaatagttaatgatgacaccattatcatcacctgtgtgaatgatacatgggaaattgataatggtcatttatttatagtagtcatttagtcaacaactttattgggccttgtttatggtgtcacctgtatttcagagaacttatagaaaattgatatgctagaaataatgatggatattgtttttccccattttgtagcatatgtgccttttcccaatatgcacacatawwaagcacgttgttcaattcaacaaaaaatagagaatgtatgttctttcagatgcttagttctgaattgagcaagtcatgaaagcaatgcttaataagcacmtagtagccacaaagatatgactatgaaaatgaaaaaaaattgcagttgtattattttaaatgctaacacttttttactttttaataaaattgtatatatttaaggtgtacagcatgatattttgatatacataatgaattgattactacagtcaagtgaattaacagatctttctcttcagatagttaccattggttttcctgctgggagcacctgaaatctattctctcagaaatttttggtataaaagagtattattaattatagtcatcatgctgaaagttagatcgctagacctattcatcttatataactgcaactttgtaccctttgaccaatgttcctctatttcccccacctttctgcccctgataaccagctttctactctttggcttctatgtatttgacatttttgtatttyacatataagtggatcrtgcagtattttgctttctgtatatgtcttcattcactcagcttaatgtcctccaagttcattcatgttgttgaaaatagcagaagctcctttattaaggctaaatatttcactgtgtgtatatatatatgatatatgtacacatatatcataatttccttatatgcattcacagatacataggttgtttccatatcttggctgttgtgaataaagttgcaataaacataggggtacagaaatctcttcgcgatactgatttcaatttctttggatatataccaaaagagggattaccggatcatatggtagttctatttttaattttttgatgaacttccatattcttttccataatggctatactgatttycattcccattaacagtgtggaagggctcacttttctgctcacccttgccaacacttataatctttcattttttgtataatattcatccttacaggtgtgagatatcatctcattgtggttctgatttgcatctccctgattatcagtgtcgttgagcacctttccatacacctggtggccacttttatgcctttttgggaaaatgtctatttggttgcttatgcttttgcttttgtttgttttttatttttgctgtgagttaygtgaattccttgtatattttggatattagccccttatcagatgcctagtttgcaaatatttttctttcataggttgcattttcattttattgctcttttttatttctgtgcagaagctatttagtttgatatagttccacttgtttatttgtgctcttgtttgctgtactgtccaaaagttatttccagggtcagtgtcagggagctatctttaagcttcttgatgtaatttttggtatatttgatgttaaagccaccaagaaaatggaatattagccttttgattatgttgatggtggactaggtaatttggactaaacttctcatgaagagaactaaaatagctggaaaaaatattgcttaaaatatcaccttaaaagcatcaaaatgctaaccgaacagtgaagcgggcctgggctaagatctaggttaaaatggaaatcaggaggtagtccagtcattttggtcacttttggcctgaggtaccagataaaatacggaatgcacagttacacttgaatttcatgtaacagtgattattkttaagtattaagtatgtcccaaatattgcatgggacattctcatacttacacttatttaaggtttatcttaagtgtaaacgtaactgggcattctgtttttttaacatttagcaaccttaatctaatggcatttgcagttctggaagaagcrgttgagaggatgaacagaacttttggcaacatctcaagaatttgaagcaaaagtctaaacaaggaactgccaaagggaagatcaccacaactttgttttgttttgttttttggctgggaccttgaagaactacatgtaagaataaaagtgaagcaaaatgaaaccagactacgctgactagaaccccttttcaagtcatttgagaaatcatgaaaatttccacaccctgaacttggactaagacagtcatgtgttaataatgcccagracaccatgaaaatcccttaaatggaattatcatcccagatctgaaattatttctacaattgttatttaactaatatccaacatataatcagagagccaagtatgcagtaaaactaaattcataggaacaaaaaatagcagagaaaaaataaccaaaaagtagaagaacagggacaccagatattaacagtgtcagtgagagactgaaaaaaatgaagaaaggaggaagacaggaaggaaacaakgaagaaagaaggaagaagcctrtacttattctgttaatgagataaaaagacaaaatatggaaactgtaatttatagaaagtgatatactacatttactacattttttaaaaggaccaaatagaaatcctagaagggtaaaaatagctgaaaatgataactcagtgaatgggctaaatagaatattatatacaggtaaacagaggactgggaaataggctgcatggtattctccagaaaaaaaatgcaaagatacaaaggactggaatgcaaaagaaagagtaacagctattaaaaataggagaagttctggcatatttgccattggaatctctagaaggagaacagagagaattaggcaaaaagaaytattttttttaaaaattatgactaagatttaccccacactgatagtagataatagatttaaagagtctaaaaaaatttcaaggtggataaataaaaatgtatccctattttgacatatcactgatatactgtataaagctaaatcaaagataaaatatctgtattcaggggaaaaaaggcaactacttattaacaaaaacaatgggaagctgaactatgttttataatatattcaatctgttgaaagaaaataatttccaatttatatttacatatctcaagaaaatattcttccagatggaggactaacagtttcagaaagaaaataagaaaactcaccaccaggagacaagcacaaaggaaaattgtgaagtgttttcagacagaagaaaaatgactctgtgtgggaaaaaaatgaggagtaacaaaaagtaggtaaatgagcagtgacacaataaaataataataatgttttgccaaatttaaattataacttgaataaaatatatgacgaaaatagcctataattcagcttggcaaaacataggattaactgattgaaggaccttttattgttcaaaaggagagtaaaagtattattcatcatggccgggcgcagtggctcacgcctgtaatcccagcactttgggaggctgaggcaggcggatcacgaggtcaggagattgacaccatcctggctcacaaggtgaaaccctgtctctactaaaaatacaaaaaattagccgggtgtggtggcggtcacctgtagtcccaggtactcgggaggctgaagcaggagaatggtgtgaacccaggaggcagaggttgcagtgagccaagatgggcgccactgcactccagcctgggtgacagagcaagactccgcctcaaaaaaaaaaaaaaaaaaaaaaaaaaagaaaagtattgttcatcattagatcttggtgaataattcatgttgtcacttctagggtaatcactgaaaaaaaaaaaagatatgcttcatttccaaacttactgtggaaaacaatgtacaacawtaacaatgatcaaccaaaaggaagcaaaaaataaaataaacatatatttggtaggacaaatatagagtataaagtgtatgccaacatgttaaatttgaattcagccatgccagtaattccaccaaatataaatgtattaaaaaatgagtcatatagcaaagtttgtcagactcattttttaaaagataaaaaccatactacttaaaaactatatttaaaacatgaggataaagaattttcaagataaaaggattacaaaatatataccatgcaaatattaagcatattaaataccagtatactgctagtatagagaaaatagaatttaaggcagcaaaataaatgaataaataaccaatatcagagaaaatagacttcatgcataaaaacatattaatgtcaaagaaaattgattttagtgcaaaaaaatcactcagcatatttttaaaatacttatcaactatcagagaaaatagatttttgaacagaattttktttaacaaatatcaaagaaaataggctaaacggaaaaaaaggaaaatgtgcccagagaagctatattaatatcagagaagatagacttcaaggaaaaaaataatgaggctagaaatagtcacttcataaagataaaggtttaatttttcagagatatataaaaaattttagtgcacctaaagagtcctttcaaaaagaaaaattatactccaacctctgaaataaacacatatacaaaatccctagaaaaaaatacaaaatatcggagtctagaaccattagaaaatagcagttttagttttggcatggtgatgtaagctcactagagaccatatgtctcatggatcagaactgaatatgctgacaaaatgcaaaaatgactacctgactttaattggaaaagcagaaaaagcatgtcaactttggaggagagtacagacttggagaagcaattttacagggttgattttcctgttgtgtgcatgtgtgtgtttgaaatgctctcctgtggattgctccccaaagtgggcccagttgtaaagcatcatatagatggtggtaatggtctctttggctaaaactccaatacaactctcatgtttctgtctagagaaccaaaaagaaaagctccagaaggctggagagtgaggggaaatcccagcatagagaaagtctgataagaagattccctaatcccggccaagagtggtggctcatgcctataatcccagcaccttgggargccaaggcgggtggatcaagaggtcaggagatggagaccgtcgtggctaacacgatgaaaccccgtctctcctaaaaatacaaaaaattagccgggcgtggtggcacacgcctgtaatcccagctgcttggaaggctgaggcaggagaacagcttgaacccaggaggcagaggttgcagtgagccaagatcagcgccactgcactccagcctgggcgacagagcgagactctgtctcagaaaaaaaaaaaaaaaaaaaaaaggaaaagaaaagattccctaatcccgtgaatgaacctgtacaattttcaggatcaccatgagctatgcatgtacggacagstccaaaacagtacatcaaacctactgagagctaaactgaaatttaatccctatcattctcagaaggtaaaacagaacttacaaacggaacttgagttraatgcctactaaaataaaaatatcaacattcttcagagtattacaagatccacatgttacaaagtattttatcaaacacacacaagacgtaattccaaatttgataatttataagacaatatcaaaaggaattactaatgtaacaatacaagaaacaagagagtgactggagcagaagttgaggaaayagtggtcttaaatttttttgaattgatggaagtcttaagtttatagcatcaagaagctcagcaaaccccaaacagtataaccaaagaaaaccatagacacatcataaacccctaaaactctaagatgaagaaaaaccttcaaaacagctagaggaaactgatacgtatattacttacaggaatgcagtgatttgaataagatttttctgatgagaatgtctcatcagaaaaaatgaaggtcagaagacagggaaacaacattttaaagaatagaactgtcaagccgtaattttatatccactaaaaatatcattcaggaagggaggtaaaataaaaattgagaaaaattattaccttccagatctgccccgaacattggctaacaaaaggctaaaggaaagggaatgatgccaaagtgatatctggaccttccgtcatgtcttgagaacaattggaaagggtaaatattagagtaattgcagaaaacagagttatttttctctttaaattmacttaataaagaaaaaataattatctggtggggttttcaatgtatataaaagcaataaagtataacctaaaattcaatggggcaaaaggatttataaagtagcagcatttctacgttttatattaactaatacaatattaactcttagtaaaccatgacagcttagatatgcatattgtaatctctagaacaarctgaaaaaaaaatcagagatttataagcagaaaatcaacagattaaaaaaaagtcagccagtagacagaaattacaatgagataataaaaatattcaaataatcaaaaagaaaacaaagaagtgggaatagaggaacaacaaaataataataaaacggtagatctaaaattatccacatcagtaattacagtgagtgctaatgatgtaaactagcagttggcaaactttctcttagagggccaaagagtaaatattttcatcttgcaggccatatggtgtctgtctcagctaatcacctttgcatgaaagcagtcatagaaaatatgtaaatgaatggtcacggttgtgtccaatttaaaacgatttttgctaaattaggtggctggcctgkgagcctattttgcatatcccttgcctaagcattccaattaaaggatagagaatgccaaagtggataaaataaaataagattttactctaagctacttcaagtataaagatacagatctataaagacagactgaaggtaagtaaaaagaaaatgatatatcatggaatctgtaaacataaaaagaattgaggggatagtttatcagttaaagtagacttcaagacaatgtgtataatgagagattgtaaaaattttatcatgataaaataggcattcatcaggaagacataacatttataaaggtatatgtgcctgataataggcctcaatttatggagcataaattgatagaatttaagagatagacaatttcataattgtagtaaatttaacacctctacgtcagcaataaatagaacatttagacaaaaatcaatgaagacattaaagatacgtctttatcttattagtataatagagtagtatatgcaactggaaaatatacattcttgcacatgtgcatagtgcataaaccaaattagatcctatgccaggccataaataagtctcaataaattaaaaaagaatcatacgaggtgtgcactctgaccacaacataattaaagtagaaatcaaagtagatatctaagaaaacacccaatatctataaattaaacagcacacttctaaataattcatgaattaaaacaaaattacaagataattagaaaatgtttyaaactgaatgacatggaaaatataaaatattacaatttgtaggaaaagctaaggtaatgcttagcagcaaattcatagctttaaatgcttatataagaaaaggagaacaatctaaaactaaagtcctaagatttcaccttaacaaggtgaaagtaagtkagcaagtaagcaggtaaaagaaaacagtgaagacaaaagtagaaatcaatgaaatagaaaacagatgagaaagggaacagctcactttgaagagaccaacaaaactgacaaaattctaactattcagwtcaataataaaaacgataatcaatatcagaaatagaaaaggggttattacaaaaaatctcatagtggtgatgatttcactggttaattcaattagacattcaaagaagaaaggcggccgggcgtggtggctcacgcctgtaatcccagcactttggtggagacagaggcgggcagatcacgaggtcaggagatgsagagcatcctggctaacaaggtgaaaccctatctctactaaaaaatacaaaaaattagctgggcgtggtggcgggygcctgtactgtagtcccacctacttgggaggctgaggtaggagaatggcgtcaacccgggaaccggagcttgcagtgagcggagattgcgccactgtgctccaggctgggcaacagagcaagactccgtctcaaaaaaaaaaaaaaaaaaaaaaaaatggagaaaggcaagtcatattttaagccagaataattttaatagcaaaacctttccattataaaaattacagagaaatattcttcgtgaatatgaatgcaaaaaaatccttaataaatattagcaaaaaaatccaatagtatataaaaggataatatgttatgaccaactagaaacatttaaaaatgtattataagaaagatayatatttttcaggaagtgcaaagttgctgtaagactcaaaaatcaattgttgtaattgatttttaattgatttaattaaacatatgaatttacaaaatactaaaatattggatgatcacttgaatacatgcagaaaaatatctgacaaaatcagaattttagccaattaggaatcaatggaaaatgttcacagctgataaatgacatctgacaaaaaaatctataacatctaatggaataatgatacttgaaagctttcctttggaattggaaataaaataaagatgtttacaatcacacttttctattgtcctagagattctaattgaggatgaaatatgagaaaaagaacagaaagaggaagaattggaaataatttaatgtagagaaaatacaatgcaaagacaaattataatacttaataagtgagttagccagtttctggatacagtgtcagtattttaaaaaatcaattgcaattctatgtactagaaaaaagatataagcaatgaagttttataaaatataatatattcaataatatcaaaaatatcaaatacagccaggcacggtgtctcacacctgtaatcccagcactttgggaggccgaggtggacggatcacctgaggttcggagtttgagaccagcctgaccaacatggagaaaccccatctctactaaaaatacaaaatgggagccggacatggtggcacatgcctgtaatcccaactactggggaggctgaggcaggagaatcacttgaacctaggaggtggaggttgtggtgagccaagattgcaccattgcactccagcctgagcaacaagagtgaaactccatcttaaaaaaaaaaaaaaatcagatactaagaaatgatgtaacaaaaagttatgcaagacctgtatgcagaaaaccaaaaatcataattgaaagaaacatgtgtgaagaccgaaatctatatctgtatttctcaatctaactatggtcatgtttatggattgtaagaccaaatattttaaagcttgcaaataaccttaggctgacctataaatttaatgcaataccaaccaaaatctttaaaatatttatttatgaacttcacaaattaataagaagtttcatatagaaaaatcaggctgggtgcagtggctcatgcctgtaatcccagcactttgggaggccgaggagggtggattacgaggtcaggagatcgagaccatcctggctaacatggtgaaaccccgtctctactaaaaatacaaaaaattaactgggcgtggtggcgggcgcctgtagtcccagctacttgggaggctgaggcaggagaatggcatcaacccgggaggtggagcttgcagtgagccaagaatgggccactggactccagcctgggcaacagagcagactctatctcaaaaaaaaaaaaaaaaaaaaaaaaaaagaaagaaaaatcaaaggaacaagaataagttatatactcatttaaaagattaggttaatcattagtgctgtctatccaatattttattttctcctcttggttgaggtsatgagtggtcgtgtgacgtgttttgttaatgaaatgtgaaagtgacatttgtgactcctggctagaagatttaagagccaatwaataattcaccacactctatctacttccttctgctaaggtaattagcaatatgtgcaagagagtagctgttcaatcagtgtgggctccagaattagragaaatcaagtatattctccagacaacccaaaatggacaactagagagagcaagaaaaacaaaacaaaaagctctgttgttataagtcactgcaatttaaaattctttgttattgcagtataatctactctgacagaaacaaagtgtaacatggaaggaattactccatgggacatatcaartctgataaaaataaagtaattaagaccatgactatggtttggctgtgtccccacccaaaatctcatgttgaattgtaatccccatgatccccataatttccacgtgtcaagagtgggaccaggtagaggtaattgtatcatgagggtggcttcccccatgctgtcctcatgatagtgagtgatttcacaagatctgatggttttataagcatctggcatttcccctgctttcacttactcacatctaccgcctgatgccttgtgaagaaggtgccttgcttccccttcaccttccaccatatttgtaagtttctcgaggcttccccaaccatgctaaacwgtgagtcaattaaacctctttcctttataaattacccagtcttgggcagttatttataccagtatgaaaacagactgatccaaccatgttgtactgaatcaaggataaacaaatggaataaaaatacagaaatatacatttattattatgattattatgatgatgatttgatgctacaaaagtggggaaaatatattcttttcagtaaatgatgctgtgacaattacatgcatgtgaaagtaaatgaaatttgagttctccctcatatctttcatgtaaaccaattccatgtggattagtaacttaaaagtgaaagcaaaaacatatgtttttagaagatagtgtagaatatcttcataagcttgggatatgaaaaagttttaataggaaataagagtagtaaacataaaaataaacaggagataattatactgcatgaaaactaaggacctgtgtttatcaaaatacatccataagagagtgaaagtataagccttcacatggaaaaatatatttgcaaaatacttaactgacaatgagtttatatccagaagataaatatattatatttaaatatataatatataatgtacatacataattttatgtagataaaacatacgtatatgtttgtagatatagwtatayaaaatatacaaagacagaagctaaccacttgggaatgggcaagtgacttaaatatactaataacaaatgacaaaacccaaatatctaatgaacatatagaaaacagaataatctctttagttattggtaactccgaataaaaaacacaactgtattctctccagaatggctataatttaaaagattgacaataycaagtggtgaagatgtgaaatatcaaaaatactcatatgttgctgggagactacatcagtatggacaccttagaaacatgtttagcattgtcttctgaaatgaaaagttaatacactctgtgacccaaccattccactcccagacacataatctgaagacaytgatgcatataggaatgagaaaatattaatagcagcattaattgtaatttcctagaagcaatccaaatgtttgacagtagaatggatttgtgttatatttatataatgaaaaaaggaacaacaaaataaatgatttataggtacatatagcaatctggatgaatctcacaagtgtartattgactaaaataagcaagaaataaagctgctgtttttgtaaatttcagaaagaaataaaattatactgtttagaaagggacrtttatgcrgtaacattaaaaagaaaaattagcatataagggtgtgtaatttatgataatattcttttccacaacttgggtattggttataattatttgtaaagctatacattctgttttatagacttttaatttttgttttatttaaccatatgaaagcttaaaagaagataaaatatcctacccgttcaactttagtattccttctgcatatttaagattcatacataagtgtattttgttaagtcactgtgagagagttctactatagggtgattaattacaggaacaacagtcctcatctttcatgatttctaactagaagataatggtttgttacataaatcttttcccaaaccagtagaagaacagagaacaccgttggtttatttggtcctagacacatttaaaataatgaaaagtacacaatatgcattatcttttccatgaaatgcaagaaagttcttagtattatttaacaacacaatctgtaatattttacaaagctttcttctgatagcttttgtttactagagtgtgggcttaagataaaagcaaaacaaaacacaattatcctatagatataaattgagtgctgacttcatttttcctgaggtggtaacttatttgctcaaatggtacgactagatggtcatacaagtttaaggcacagaataatcaagagatttattaatttgaacctaggatatattactaaaaacacagaaatttcttatattttctgttaaagcartctcagtccacatttattaaaatactcatctagcttggtttttgggctatatcctcatcaaacgatggtaataggaaatgaaccaaagtgacatctgtagtctcagcaacttaaagtytgcttgcaatgattagttttcctttcccaaccctctgaaataaggtcttctcaagctttaggatgygttcaacattaagtcttcagttaagacatcttgcctatattggaagagaagggattttataggttaataggctgcatggtataaggtgggaaagggtaatttactaggaggctaatacatttactgggaaattggccatcctgtatctgtcatagttagcagattaaaatatttaatgccaaaggggacataatagccaatgaagccttgagtcacattactgtgtgaagtaaattctaaaatactattcaatcttctgcattaacttgtttcaaaggctgaagcagtaaataaaattactaatggagctggcagatagataggtcatccatttagctcaaaaggagatagaataaaataaagaaaaatgctgaagaacaaatatatatatatatatatatatatatatatatatatatatayacacatctcaagaaggattagctaaattcagaaaaagcawaatttagcaattttaatacattcacctatttcaccatatacagtgggagaagaaactttaaaaaattaactcacaatggtgaattggatgttgttacaagctattcacagctttccttataattgaaataagattcagagatgaacagaggttctaataggaaagattttgaatcagctctaagagagcttcattttttctactatctttagaaatgtaattcattaaaaaatacaaaaattttaaagtagaaatttcttgtaatttctctaccagaaatcatgatgaataatatttggtgtataacctttcagcttcttctgtgtaggtagttgtctctataaaatgtatcacatatatttttaatttatttttttcttcacttaaaataacttaaacccctttccatgttattaaatattgtttaatgtaatttttcatggctgcatagcattttattaaaaacctgcattctgggcgggtgcagtagctcacgcctgtaatcccagcactttgggaggctgaggtgggtggatcacgaggtcaggagtttgagaccagcctggccaagatggtgaaacctgtctcttctaaaaatacaaaaattagccgggctcagtggcagagacctgtaatcccagctactcgggaggctgagacaggagaattgcttgaacctgggaggcagggattgattgcagtgagccgagattgcgccattgaactctagcctgggcagcacagcaagaaaaaacaaacaaacaaacaaaattctgcactctaayttacttagtggatatacattttggtaatttactatatrgtgtttatttattaaaaaatactgtagcctttttaagctaaatttcaatgtttaccttagttatttcattagaatacatttctaaaagtagaatttctattttaaagtctgcaaatttcaagttttattttatttttttaatgtatatatttttattatactttaagttctagggtacatgtgcacaacgtgcaggcttgttacatatgtatacatgtgccatgttggtgtgctgcacmcattaactcatcatttacattaggtatatctcctaatgctatccctcccccctcccccaaccccacaacaggccctgatgtgtgatgttccccttcctgtgtccaagtgttctcattgttcaattcccacctatgagtgagaacatgcggtgtttggttttttgtccttgtgatagtttgctgagaatgatggtttccagcttcatccatgtccatacaaaggacatgaactcatcatttttatggctgcattgtattccatggtgtatatgtgccacattttcttaatccagtctatcattgttggacatttgggttggttccaagtctttgctattgtgagtagtgccacaataaacatatgtgtggatgcgtctttacagcagcatgatttatattcctttgggtatatacccagtaatgggatggctgggtcaaatggtatttctagttctagacccctgaggaatcgccacactgtcttccacaatggttgaactagtttacagtcccaccaacagtgtaaaagtgttcctatttctccacatcctctccagcacctgttgtttcctgattttttaatgattgccattctaactggtgtgagatggtatctcattgtggttttgatttgcatttctctcatggccagtgatgatgagcattttttcatgtgtcttttggctgcataaatgtcttcttttgagaagtgtctgttcatgtcctttgcccattttttgatggggttgtttgtttttttcttgtaaatttgtttgagctctttgtggattctggatattagctctttgtcagataagcagattgcaaaaattttctcccattttgtaggttgcctgttcactctgatggtagtttcttttgctgtgcaaaagctctttagtttatgcaaatttcaagttttaaatacgcattgcaaaaacactttacagacatatggaagtttcttaaattagtctttaacagctatttaatagtataaatctcttacgtgttgtaaagttagaatccactgagtagtaaggggaagaatgaggagacttctctcttggggtaagtgcatgtttcacaatctaagagtttatctattagaaaaaataaattttgactttgtagaatgtcaagaccagaccactttcaagttttagtatcatacaatatctaaagaaacatgcattatagagaaaagcttggatgatttctgtagaacattttacctaacaatacattaaaatcctttaatagattagtaaaggaattggtgagaaatgcattcaatataggaactttacttcttatactgagaaagattttaatcatatatggaagtagctcagatgaagggaagmaatggaaggctaatcaggactttacttgacagaaaaaaaattgttgagtttctaatacacgaatattcttgcaaatgatccagaagagaaagtgcagaatgaaaacaccagggagatgccaaattgatgtaattaaatttgaggaagtatttagagctctggaagactgagcagaaatgaaacaagtcagattcctttggtataaatacaatgttggcttaagagaaaataattgaagccacacctatacaatgatgagatttgaacaggggataacaatarggaggcacctgagcatccctgtagattctccattgaaatcaccaaattgatgcagacaaatgggctaaaatagttgattattattaacaggtttttttctttttgagagaaaaaaactcaaagcaggttatcagattccgcaaatattccatgtagatctgattgctatactttgactttttttawagtggatatggaaaagacytacgtaaagttaaggaatataatgagttggaagaattcacacatgaagaccatcccttttaaaagataaagcctgagagggaataacatctaatttcatacagtcttgaaagctctgtaaaaggtagatacaggcttatcaattcatggactagaacttggaatgcagcggttcttttgtcagccctcacctagacccaaccctggctctcccaaatttctgataaccttaaactaggtgcctggctctgtactagaaaggaagaaaggaagaaaggaagaaagggagaaaggaagagaaagaggaagggaagggaagggaggggaggggaggggacctaaagatactgctttttatgctcacgtttatggcagtttacatgaaaaaacggctcaactttatttctgcacttcaggacatccaggctaagagctttcagtttttgactcattacagaaactgttttgtttcttttctgtccaagatagcagatacatgtggcaagtctctctcaatcagtggccaagtggtcctcctgtactgtccctcagtttctgctcatctcacagataaccatctaactttctgagaagttaactcgtctaaactagaaacttccaaagtgaatttcatgtacaacaaattgcctgtatttcaagtgagactgttccagctatctagtcattttgttgggatgctatttttcatagacagagaattagtttttctacatagatacctcatatttaagtactttctataaaatgtcctgccatccyaaatagattatatattctatttcagggatcatrgcttgtacttatattyccaatgtttataacagtaaggatgtaatacctcttcttattattgttatttatgatgataatgtttggtgataacaaacaaaagaaggtcagctttctaagatagacagaaaatgagttaatccattttctgagttagggagggaagacaacatttaayaaacattgaccaggactattataggtattttacctaagtaattttatccctttaaggtagtacttttaaatatttaatgtgcctatgaataacctggggttcttctataatgcaggctctgattcagtaggtctggggtagaacctgagattctgcatgtctaacaagctcccaggtgatgctgatgttttttgtaaaggaaaaaatttaaaatctcaggaaccctaaacttcttatgcaaaaaggagaatgaagcctgtcctgccacaccctcttccaaatgaatagctgtcactaacattattctttagccagatccccatgggaaggtaaaaggcctcaagcatctaaaaggactgtccctatagatcattcaaaagtaaaatttttgctggcctctcatataaacaagggaatgccaattgtaacttcagggctacaatgtaagtctagctcttaaaactaaagtctgttggatttcacactgataaagaccagtatgagcttatcttcccaggtgcagaacaatgtcaagactcattcctccacctacccagagacatctgcataatttcttcttcctttactctctttttctcttcaaacattcattwatcttatgtaaatgtagatttactgggcactaacccaagtctcatgggaatgtagccatttgccttcctgctcacctgcccctctttctacctgccctctcccacttcaaggaaatttataaatacccacataaagcctctttggaaaaacaaaagtgtctgtggctcctatttttccggatgtacactatagctggctaataaaccttgatgattgagactcatttccaatgtcgtattagtcagcagatgacactttgarcaacaaggttttaaacaactctatgagtaatataattatgacaataacagcaatgatgacaacaatagtcatttaacatacaccatattacttgaacggaagttctacaggttaggtaagatagatggtaatgtgtgaacaaatgatactgataagttagaaaatcataaaataataaagctagggaaaattttttaaaaacaccattatgaaaatcagttaaacctgatacattaactgtctctaaaaatgctccttttctgttcagtgaatctctagctaggatagaatttgtttacaataagacagtattgtgacagaagacatttatcttttctttaaatccacagcagttcctatcaacagactacttaaaatcagcagtttttctcatgctttcaatggttagtctatctaacagcatatgtaagwgaccttttgataattatttaaaaggttcgtcagtaaagtctcaaatgcctgattcaggagagtcacgtatctatctgctctggaagcactcaagctgaactgtcagaaaggcaagcactttctttttggttatgtttgttgcaacgctgctctatttttaaatttgccacaggaaggacttctcaagttcaaattccatagatccaaagtcactaaatataccagcacctaacagcagatttacaagcactaacctctggaaatatatcttccccagaaaaagcaagtctgcctttgctgagtccaagaaaaccaattacccgaaagactctgaaaccaccacctgaaaatgctagaatagaggcytctgttgatttttatgacaaaaatatttttttgatcactagccgaacatcacccttatctgctctcctgtgcacatcaattaaatgaagagggagggaaaaaggaaaataaaaaattgtgttattaaagagtagccagtgaggaactggttgttttcaggcaatgaggccatagtgtcttagaaaacccttaagcagacagtccctgagaaasagtgtgttatccaatgttaagaaaatatctatgattgattctttactacttcatgatagggaagttatgccatgtagtgatggtgtggagggtgtttttggaagataactttgtgatatgctctgaggaatgacagatcttttatcctttcaatatagtaaaagttcttaaagaaaaacctgggaactatggagatctttttttttctgctttgaggagaatattaacccatttttgctgattttagtaacttcacagagaagtttttwaaaaaawttcatatggatgggggtctcactatattgcccaggctggtctcaaatcctggtctcaagtgatcctccagccttggcttcccaaagtattaaggctgtaggggtgagcactgcacctggctaagactccattcttaaagcattgtgaatgttttcattgttataatttatttataacaatataaaatataaattaaaaataaaattataacaatttatttataattattataaatamatttataatttaataaataaataattccctttccttgagtgacaagggaaatggttgaggtcatacaagtttgcyttgagtttatctcacataaacatcgataaactaagaaaagtctaatttcaatggaggattttccaaggttaatgaatgaagtcacctcatggactgggttctgtgtaatcacccatcttgtgtttgtattcaaacatattgaaccttgaatgtgagtgaactctatgccctctgacataaagatgtggtctggtctttgtgactgtaattgcaatcctgaccattagtttctatgacttgtttaagttaataatcagtttttgtgcaggagctgattgccaccttttcttttatgctgcaaacttgtttttataactatttgtcaaactgaagaaaccactcgagttatttggaaagaggacagaaaaaattctgccatatacaactaaatgagccacccatagttatatattttatgtaagtctttttttttttcagtaaaaactgtgtttgacagaaaatgctttgcttctaatttaacctcggactttttatgctatttcacagttgacccagaagagtgaagcttattttcaccgcataaatgtcactttaaacattttaggatacataaaattccttcctatatacccagttgtataatagaagagagagagtttgacagagagaaagagagaggtacaaagaactacagtgtataatttagtgcaacgctcaatgaagaataagtacctatgaaataaacttaggttcaattacaaataatctactctatcatccatttttttctcatcatgttactttcaggctactgttgtaggttttctacctttaacttctctgttaaaggcattagtatctgcataagtaccaaaatttaggaacscctatttctttgtcttatttgactagtcttcagtatttgrtcctattgaccatgatcttcttgttgagattattactactctgagcatttccttttggatgcatttctttatttgtctacattcatgaatactggaattactttttttttttttttttgagacagagtcttgctctgttgaccaggctggagtgcagtggcgtgatctcggctcattgcaatctctgcctccggggttcaagcgactcccctgcctctgcttcctgagtagctgggattacaggtgcacaccaccatgcctagctactttttgcatttttagtatagatggagtttygccatgttggccaggctggtctcgaactcttgacctgaggtgatctgcccaccttgacctcccaaagtgctgggtttacaggtgtgagccacaaggattaccttttttaatttctctctctctgtctctctctgtctctgtctctctctctctctctctctctctctcatgtcgtttcacctcctggtactgaatccatcaccctgtttcaacaacaatctatagctctctatgtcaatgactctaaaaatctatttttcttccccagattttgtttctgatatctgtgtatctcaacatagatttgctgcaatattttaatttcatcatgtctataactcaactaataattttgctcacccaaaccatatattttrtgttctttattttcatcactgaaataatcattaattaaatcatcaagccataaatttgagactgtccttgattccttcataattcttatctctcacattcaactggtcatgattctatgaattctacatgttaattatccctcaaatcctgctttcacagctgctgtagcctcagctgactatggagaaatacagacttctccctccccatccctcaccacagggttgaaaatgagactagaaaattgaaggcagctatagtgtctgatatgttagaagactcagtcatcatggaaattatgcttggcctgcattatggagtgcatccagttcttcctaatccattacatagaatgacattagctcttcaaatagamcctgccagatgctaaaagccattgtaggtttgtcacctatatttccccggagataattccttcttattcatagctttgtgtcctactactcaatctaatttacatagtccaactcccaggaaacagtagtaccttattcctggttctatacatagcccattgaattaaagtctgtaattaagaaccatagccgtatttatctcttacacggcatgttacagctcaacctgccctgaacaaaayaaataacactttaaattacaaattgcagatctgtgctcaacaaagaggagctcttttccagtgtatattattgattatgttttccttgggtaatttttgtctatcaactaactcattttgtaactggtaattcagggttttttttttcccccttaagaagtaaactcacaaagtgagtctgactgaatgtaggccataggttctttaatatgtaattattacaataagtagtgcatcactgcagtactttgcatgcgccagtgaatatgcatcagcaattaaggactccaggtcctggagaatgaaataaacattagcaatttttgcaatctgttgaggccaagaagaattctccaatagagtagtaaattttaaatggaaatgtttgtaattatttaatgagaaaacatgcttttttttccatttccagaatggaaaakatgttctttccaaactttaatacttcataactttagaaaataaataatttaattttaatatagtaattcatgaagttcgtatagttaatttatgttttctaatcactcccaatgatctttgctattcagtaaatactataatttattaaattattataaatgatataatttactgaataattttatatattaccaatttgactgattaaaataaaaagatacaaagattgggttgcccaaactatagacaaagcttctaatttaagaaagacattattctattctcagggaattttatttctcttttatatatataaacataaatgtatgatttatagatacatatgataaaaatcatatatatacatatatatatatgatttttataaaatcctatcctagttgggaaaatccaatattctcttttaatagtagcatctgactatttttattatactctatttttaatctaccacctatactggtaataaagaactttgtttcaggtyaatttaaatagattatagagcttttcttaccttaaatgtgtggtaaaattgctacagtatttctaaatggcctttccagcttgaattcattcttattttcctgttctgacctctagctaaycaagtaatataattaaaatctgaagaaatagcaaaatggtcagtttttgagcataacagttccatgggggaaatcacactttaatgtttaccttttgctaactcgagactcactagagttgagcacaggatggatcaacaaggaaagcctggtgattcacttggaataatctttagaatagcttaatatggatatttgatgaacactttgctgttgaatatgcactttagtagtggccctattttttgtgactgcagagttataaataaaataaaatgataygtacattaaaaaattttttaactcttttgtaaggatggggtcttgctatgttgcccaggctggtcttgaactcctgtcctcaagccatttttccacctggacctcccaaagcactaggattataggcgtgaacctccatacctgaccatatagacatattttcatcaccatagctactggtataagagttcgctgtagggatagacttgatcacttgggaaaagcctttaataaattwgtaggcttgcaaagtagaaggagccttagactggagccctggttacatgggaagagggattctatttggcactttccacgtaccctgggraaataacataaagacattaagaycactgcttttttataacaatggaaagtagagattagtcattcatcagatgatcactctaatgaacatctcgttaatgagaagagatagtgagatcaatactcaccctagatggaacctgacctggatttgataaagtttgagatattgagataaatacccacgacaatccaggaacctgacctagatttgatatatttgaggtagtgtgataaatgctcaaccgtgacaatctaggaaactgacctagatttaataaagttttcrtgagaaaataatgctttaggtgagccctgctggataaattggagttasctaacaagaggtaaatccctacagaaagaaaagcatagacaaatgcccctagacaaagaagagtggaaatcgaggggtgctgataggaaataatgctagagaaataaacaggggccaaatatttcagggccttaggctaaattaagtactttgactttgatcctatgataaaagaggaggcaggaattttgtgaaattagtaatttggaaatatcactttgtagagagtggctaggaacagaactaaagctacctcagttgtcactgagagataatgatcgtgtagagtggggttgtggcagtggacatagtatcttggaggtcaaaatactaggtcaaggatattaataaaatttctaggaacccatcagaaggagagagaaggagaccatgcaagagcatgaacaatgagagaggaatgagaaaragaagtcaaccctaactatttcgaccctatttgtaccttgtactcatattttcttaacatgcccttgcaactcagggaaaacattgcttacatagatttcatatacgtgttgtcctttattgaatatttatgcgtgacttttctcccttagaacacttaaagtgaaatattttctgagtttctcctgtcttatgctctctaacttagataaatggtagacacagagcaaaaatcmtttgacaattaagaaagttaaatttcttaatgttatgtgaactcttcttagtgctaaaaccaaagctgaatccaagtctacaaagaatatgtctaatcccaagctgtcaggcatttcaaatacatgcctttttttttttttctttttgagacggagtctcgctctgtcacccaggctggagtacagtggcgcgatctcagctcactgcaagctccgcctcccaggttcatgccattctcctgcctcagcctccccagtagctgggacttcaggcacctaccaccacgcccggctaattttttgtatttttagtagagacggggtttcaccatgttagccaggatggtctcgatctcctgaccttgtgatccacctccctcagcctcctaaaaggctgggattacaggtgtgagccactgcgccaggccttgttttttctttttaacttttgccaacctcttattatatgaaacacactttggcaattaatgaatagcttacattttgactttatgtctatatgaaattggatggtacattaaagagaaactttgtagatgtttctgacataaaagtcctttaaaaaaaggagatttggcaaaaatattaaattcattttaaatttctccatttgaactgaaatgatttgggagatagtaccaatttttttccactccaaattctaaacttattaaatctctgagtagcaaattataatggatcaaaaaatctctgttgcctatatttattttttcatcattgccagttaaagtatttttattactttaaactgtaatatgtgttattggtatcagatagttttaaggcaatttttctcttattttagttttatgttacaggaaaaccctaaaaaattgtgtgtagattcaatttttcttatttatatttatttaactcagacttaaaaaaattggaatattaaaatgattgttgagttcaacaaaattgtaaattctgtgtgtatatatatttgtgtatagtattcttttaaatccctaaagcattcttgtattttattttcaaattatctttatagaagcaatcatttgtaaattagttgggcatggtggcaagtgcctgtcatccaagctactcaggaggctgagccaggagcattgcttgaatttttggggctgcaccactgctctctagtctgggcaacagagcaagcctccatctcacaaaaacaaacaaacaaacgaacaaaccataatctaatttaattctaccaacaacctttgtaacaagcattttaatgatcattacagattaggaaattgaggctcagagagtaagcaatttgtctaaaaccacacaaarctaagtamtggagctggattaaaatgggagtcctcactccaaattctatttttattagtctacaaaccctacgtattggtgattttgttttatcatcacaagcaatgcattttatattcttttcctcttttacttatttaatttggaaggttgtccaatcttaatatttagtgtaaaagacagtaaaataaatgttttgattttcatgtggaattattgccttttacagacctcccgggagcattatttttcccacttattacattttccataaccgaaatagtcctaggttgaacttttcctcttcagcagtatgttttatgagatacgaaaatttatactggcatatactttcacagaaagctctatcctcccagaaataaactttgtccccttctcctcttaaaaaatacttttaacccctagaataggatagcttggtttcttatacgtttatccaaggcaaatgagagtcttgtgagaagtttccgtgtgagtgatcccatcatgcagggatcatcccttcatggagtaagaagattacaaaaaaggttgtgaggccaaagttgaatgcagtttcattaattgtaaacctggagtccatggcaggttaggtctcctcagcaccacaccctcccctactctgaaatgcttttatcatttaacataaagttctgacatggagattcatggtgggaagtattacatgccgtaatttgaagtgtaaaggtaatttgccatagatgaagtatagtatgagagcaggtaaaatagaaaaagttatcaaaataaagaaatgtggaaaaactacgtagaaagtgagaaatatttggtagtagtagaacatcatttaagcaactgagaaaaggatgaacagagttagagcattgaatttgatgccattactccagttgctagaattctgaaattatgatgatgttaccaatttaagtggdtgttacawaaattcacctcacatacaaccttagatgtattcgaggcatcatatatctagttattttaattttctctacttgccgtgccactgaggtaatcagacctatagatactacatataaatcatctttttaatccacaaagtgcttttgttatattaagtaaaatttttaagattatttgtatcaatgccaatattgaactatctctgggaaaaattaaattacgtagatttattttcaccttttaagtaattgtttttagaaatctttcaagagaagtatatacatcagcattaaatcaaatgttaaaatctgaagaacctctaaggcatgagctaattcaaaccctgtctccacaccccacctcagtgtatgcatrcmtgtatttctgtgaaaataggtcctggagaggtaatatgactttttttatgggcataaaatcagtttaaagcaaagtgaaactttaacttgagcctcttggcttccaatctagagtttcttctataattttgggcaagttatttcatctctttgtgcctccattgtcttgtcagcacattggagatactgataagakctttctcaggggatgaaaaacaatacaaatcaagtaattagaaacatgcccggcacattgcaggtcctcagtaatgttatttttataactcctacactattcttccatttttacacatatagtaaaagcaaaataacttttttgaagaaaaccactgtcacatcaaaaggaaggtgaagggaaagaagtcatttttctctgtaaagaataaaaatattgcagttgaatatgtgttcattttatcatttcagaagataggtttttttattaaaaaaaaaaaaaaaaaacaaaaaaacactgtttggctgggctcggtggctcacgcctgtaatcccarcactttgsgaggccaaggcgggtggatcacctgaggtcaggaattcaacaccagcctgcccaacatggtgaaaccccatatctactaaaaatacaaacaaaattagccgggcactgtggcacacatctgtaatctcagctactcaggaggctgaggcaggagaattgcttgaatctgggaggtggaggttgcagtgagccaagatcgcaccattgcattctagtctgcttgataagagcaaaaactctgtctcaaaaaaattataataaataaataatacattgattgtgataggccaggctgtgtggagcctaaagtatacagagttttgagggccttaagaaaaagtgaatatttatttagaaaacaaaaaccaactagatactaattttaaaatgctgtcaaatatcaaaatatagcaaaatccagaaaaataatacatttgtataaatgatgtgtcagatacaccctcataaaacttttttcttttctttttttctgtctttcactgcacactcttgatcacctctaaaatgacaacaagttattttgtaatgtcactttctatgtagaaactgagaagataattcagtctttgttttagcatagtttgtttggggggtgtttcagaaaggagagcacatataattaggacaggcaaagtctctattggttctatcatgatccgatgtcaataccacaagtwtgaaggtggtaaaaaatatagggaagtgactgtaaaacacctgaaattacccactaaacacaaactaaatgtatcctcaactcaacttccccttagctggatcccaaaactatttgtggcaggttttactagaataaatgacaatgtgaacacatttctagagtctcttatgggtcttagaaggcgtctgtacaaatgagatgcctgtaaatacaagcttctaatacctagagggacacaaagaaaatcttgagacagtctgaaaatcctaaatattctgaacgtagtttagatgttcaagggtttcccaaggtaaatgagtttagaatgtagtaaaagttgtctatctgatttaatagaaaaatatgaggaagcttagcctgaagcatgttgaggtcttggccatatataccagtaaaaatggggagaagcctaaagaagatagaatgggaccagctgaagctaactaaactggctttggtctggggtgtcagacaacctaatgcacagggtctaacaggagctaatttggacaggcctctatgaggaaagagaaatgaggatcaaacacagcccttatgagcgagcgtgggcagggaatgtccttggaataacagaagccccatttaaaaggaggctggtgagtgctttcagcagttccttggagttstgtgtactcctcctataacctcaatcaatccaattaattcctttctttttacttgcctgacaaaatccaactttaaacgaataaaaaaacttatatatttttttggtggtatccaaattgagaaggaagaaataaaattatcactgttcagtgatgacatactcttatatttagaaaatcctgaagattatacacacacaaatcttaaaactaataacagaattcagtagaatacaaaatcaacacacaaaaatcagtgtgtctttgtatacgaacaatgaacaatctgaaaagggaattgagaaaacaatttcacttaataatagcatcatacgaaatgaaatgcctaggaataagcttaacgaaagaggtgaaagacttttacctgaatgtcttttcctttgtagtttttgctgaaaactacaaaatattgctgaaagaaattaaagaagacataaaaaacagaaaagacatcatatgttcatggattataaaatttaatattatgaagatgataatactaaccaaagcaatgtaccagttcaatgtaatccctatcaaaataccaacaatgtattttgcacatatagaaaaaaacacatcctcaatttcatatggaatctcaagggaccttgagtagccaaaataatcttgaaaaataagaacaaatttggaggcctcacactttctaatttcaaaattcattacaaactgcaataatcaaatcagtgtgatacagacatatagatmaatggcatagaaaagatatcccagaaataaacccttgcatttacagtcaaatgatttttgacaaggctgcccagataattctatgggtaaaggatagtcttttcaacaattggtgctgggaaaacaagtacatggcaacgaatgaagtttgccccaccttgtgccatatacaaaacttaactcaaaatgaatcaaagacttaaacatagtgactaaaaatatagaactcttagaagaaaacatagagtgacacttcrtgacatcagatttggcaatgtgcatatgacaccaaaagcacaaaaaatggaaaaaaaaattggacttcatcaaaatttaaaacttctgtatatcagaggacattagcaagagagggaagaggcaacccaaagagtgggagaaaatatttacaaatcatatatatgatcagagattaataaccagaatatgtaaaggactcctaaaagtcaacaagaaaaaacaatttaaaaatgggcaaaatacttgaatagacatttctccaaagaagataaacagttcgtcaataagcacatgaaaagatgttcagcatcattaatcattagggaaatgcaaacataacctcaatgagatgccacttcacacccattaggatggttgggattaaaagaaaaaacaaaagagaaaataagttttggccaggatatgaaaaaataggaactcttgggcattgcagatatgaatacaaaatggtgcaacttctgtggaaaacaatgtggccatttcataaattaaatttagaattgtcagtcttcgcacagtggctcacgcctggaatcccagcactttgggaggctgaggccagtagatcacctgagctcaggagttctagaccagcctgggcaacatgacgaaaccttgtctctatcaaaaatacaaaaaattatctgggtgtggtggtgcgcatttgtggtcccagctacttgggaggctgaggtgggaggatcgcttgagcctgagaggtggaagttgctgtgagctgagattgagccgctacactccagcataggtgacagagtgagacccctttttaaaaaaattgtcatataatccagcaattccatttctgggcatataccccaaataattgcaagccaagacttgagcaggcatttgtacaacaatggtcataacagcattattcacaacagccaaaatatggaaacaacccaatgtccactgacagatgaatgggtgagcaaaacatagtatgtacatactgtagaatattatttaatcttgaaaagtaatgaaattctgatgcatactacaacttgaataaaccttgaaaatattatgttaagggaaataagccagacacaaaagaacaaatgttgtataattccacttatacgaagtatctagaatagtcaacaaaagaggtagaaagtataatagagcttactaggtactagggggaaggaagaatgggaagctattgtttaatgagtacagaatttcagtttgakgtgctaaaaagttctggagatggatagttgcacagctatgtgaatgtacttaatgccactgagttttataaatggttaacttagcgaattttatatatatattctttctctctctctttcacatgcacacacacacactctctctcttttgtttttctttacaccaggcattgtaatgtttccttcagtgatggctttatggtttcaaggatcatcacttactcacagcatcataaattagtataatattgttatagaagagagtacagtgtggcaattaagagcatgaagtctaggtcaagttgacaacttctccttaataacttggtaaccttacctgaaaatggagatgacaacacctacctacctcattgtggtgtaaaaattaggtkaaaaaaattaggtgaatatgtagaaagtgtttggaacagtggtgcatgatgcaaagtatggactttgttagtattttattattatcgttattagcatttctgtggccttgtaatccaaaataggatactctcaaaaacagtcaactcctagttctttttttttcttttatctgagtatcattttctctctgttgatgttattgactctcttgatatattttccccattctcctcttgccacccactggcttattttactccacactttgcttttgcctgtttatttttgtctttctttctttcttttcttttcttttttttatttgaaatggagttttgctcttattgcccaggctggagtacaatggtgcratctcrgctcaccacaacctccgcttccctggttcaagcaattctcctgcctcagcctcccaagtagctgggattacaggcatgcaccaccacgcccagctaattttgtattttcagtagagaggaggtttctccatattggtcagtctggtctcgcactcctgacctcaggagatccgcctgccttagcctcccaaagtcctgggattacaggcgtgagccaccgcacctggcctatttttttttctttttaaacattataggttcagtctatttacagtttcttcttccttgcactttggctctagtttccttgtagcctcagttccattggccccctctggttctgattttataagatggctgctctttacagaaactttcagctttgatcttgactgctaactaatgatttctccataaattctagttcaaattttcaagattgattaacacaacacaactttttatgtcaaacctcataaccatcaccagccagccaacagattaactcttcttgaattgggtacctgcctatgacctaaatagtgttgaagtgggagaaaataataccaaacctgccctcctgtggctgtyctctcagtgtgggctgcgagcagaatagtttctcttagggacagtttgtaagtatagcatttatggtaattaacatgtttagtataccaagaagcaaagatgaataatacatagtccctcctataatggagctcattacccaggaakagacatgtgtacgagcaatcatgcaatagaataactactatttatttatatggacaaaatattttttaaacacaaaggagaaaattcaatttgctgggtatagggaatgggacaggcttcacagtatgtggtgatatttccatggatatgttaagtatgaaaaatgtttcctgagacggagtagagcagaaaaagggatggagcaagggcattaaggcagattcagctctaaaaacagtcacagaggtacaaagatgagtggtgtgataaggaaatggagcttaaaactgtggctggaacaaagactaaaatgagtaagattattacagcagaatgaactgtaggtaaggaccaacstggggacggttttagactatgaattactgaaaagaaatatggtgtttgtttttagtcaactaggattttatcaaaggttatcagcaagtggggggcatgatcacttcggcatttgagaaagaaatgtgtttgcattaaggagaatgtctaagagcamatagagactggaagtagaaacctacaaggctactagaatggcccagttaagatataataaggcccgaactcaaaagagactgtttcaaaggtaaactgacagactagataattatcagggtcaagtgaccgacatgtaaatatttcaaccataatttaaagaaacaaaatgcctcagaaagcaacataattcattttaaaaaaaagctttagttttacgtgaagaagatttaagaatggttattttattttctctagatatatggctaaaattctaggagtgtgacattgggatgaacatttttctgccytaaagagggttagaagaattcttctgaattgtgtcttcttttagatttaagctaaatatcacaagagtcaagtaggataaagcttcttcatagtgtgcagtgttgaatcagataaattggatcagcagcagaactgaaaatattcttataaaatgtagcctgtcttatattcataacttcatatctccactgagggttttacaccagtactttaaaagtatactttgctgtgaaggcataatttcagtacaaccacatgtgtacrtagctgtccaattgcaagaacaatgaaacaccagggaccagagccactgcagtatacacgaaggtacattgtaagttaataggttaataaaactctaaaactgaagtcaaggcatactgcacagtagttatttctaaagttagtgtgtttccttaaaatttaatatgttcctcttttgtagaaaagaaacaaaaaaagaggatttaaatatattattctcaggcaactaattttttccgtcttctacctccaataatgtggtgacaggaagtgacttaaggtacagtctttaggatattcagtagaaaaagcttctttttattgttgtcattgtatgagaggtcttcaaaacctttactgaaaatgtgttttatgaaaaaattatgcatagaattcaacatttttgcacaaaaataaacttgtgctaacttgtgataacgtgcgtggacaggatctagtttgaygggttaaaaatcagagacatcagtttgaaaagagccctatattagtctgttctaatgctgctaataaagacagaactgagactgggtaatccataaaggaaagaggtttaattgacccacagctccacagggctggggatgcctcagaaaactcacaaccatggcagaaggggatgcaaacatgtccttctttacgtagcggcaggaaagagaagtgctgagcaaaaggggaaaatccccttatgaaactatcagatctcgtgagaactcaactatcataagaacagcatggaggtaaccgtcctcatgatttaagtacctcccaccaggtccctcccatgacatatgggaattatgagaactacaattcaagatgagatttgagtggaaatacagccaaactatatcaaacccctatgaaaggcaacataaactctgctaaaattgaagaacaaacatcatatttatggcaaagtttgagtggaagaatgatgaaatcactgatgctttaaaaaatattcatagagacaatgccccaaataaatcttcagtttacaaactgataacttattttaacaagagatgagatgatgttgaagatgaagctcacagaagcagcccatccacatccatttgtgattaaaaaaatattatattattcatgctctaattgaaggaaaccaatgattaatagcacaagcaatagccaacaccatagacatcttaattggttcagtttacacaattctgactaaaaaattaaagttgaaaaaacattccactcaatgagtatccaaaccattttgcccagatcagctgcagacaacagcagagctttcgatggaatttttaaataagtgggaccaagatcctgaattgcttctttgaagaattgtaacaggagatgaaacacggctttacaagtacaattctgaagacatcacaatcaaagcaatggctactgagagttggaagtgatccagtcaaagcaaaaacagaccagtcaagaacaagggttatggcaacagttttttgatatgctaaaggcattttacttaatgacttcctggagggccaaagaatgataacatctgcttactttgagagtggtttgacaaaattaaccaaaactttaacagaaatatgcccaagaatgtgtcaacagaatgtccttcttcaccattacagtgcttctgctcatttctctccygaaacaagggcaatgtttcaggaatatccatgggaaatcactgggcattcaacttacagtcctaatttggttctttctgatttctttttgtttactaatttgaaaaaaaaatctgttaaaggcatccatttctcaccagttaataatgtaaaaaagactggattggcatgtttaaattmccagaatcatcagttaaggatwgattaaatgcctgatatcatcacttagaaaagtgtcttgaacttgatggagcttatgrtaacaaagtttatatttaaaaaactcactctgcaataatagagggagtaggaaaattttaaaaataaaaattattatttatacctatataatttatactaataaatataaaacgttttgtacttttcaatataaactgtatatatggagacattttactgtttttcctattgtcgatgatgaatgtatttaaccataatttaatttaaataatctaattttaatacacttaatgtattgaaataaatcactgagtaaatgttctacatctttacagatttttttaaattccattttttatgtttaayatgaatgagtataatttaattaattttattttattgttttaatattttttatttattttatatatttaggaattataagtgcagatttcttacatgaatatattgcatagtggtgaagtgtgggcttttagtgtgcccatcacccaaatagtgaacattgcaaccaataggtaattttttcaatccttatctttatagattattaatgctgcacttgctttggctgcaagacccaaaagtcaagcggtcaaaaacaccatggaaatgtacaagcgtacatgggagaatcatatacatgtcctcactgaagccgtagatgacattacaagcattgatgacttccttgctgtatctggtatgtttttattcttttaatttgtttattttctcttgtcaattttataaaatagaataatactgggacaggcatggtggctcatgcctgtaatgccaacactttgggaagccgaggcaggtggattacttgaggtcagggattcgataccagcctggccaacatgatgaaacccccgctctactaaaaatacaaaaattagctgggtgtcatggctcacgtctgtaatcccagctactcaggaggctgaggcaggagaattgcttgaacccaggaggcagaggttgcagtgagctgagatcatgtcactacactccagyctgggcaacagagctagactctatctcaaaaaaaaaaaaaaaaaaaaaaaagaataatactaaataagattaattttatttaatccagtaaacatttaattgattgtatttttggatgcaatatgttgctatgtattagcagcagttgtgtcatccatggtctactctgggattatgagcctgacctcttgtaatctttttaaatttaacaatttacactgagtctataaaagaaactcctattcatggccaaaacatattagaaaataatacctagaatcttaggtttttcctagattttcaaataaatcctgatttccctgcgcttcttttccaaccaaatttttctcccctcatggaaaaaaacatattagtgagaaaacatcatcgatttgaaatgtgtgaaccacaaaatctgagacagatctcagtcaatttgggaagtttattttgccaaagttcaggacacgcacccatgactcagcctcagaagttcctgatgacatgtgcccaaggtgatcagagcacagcttagttttatacattttagggagacatgagacatcaatcaacatatgtaagatgaacaaaggttcagtctagaaatgtggaacaaattgaagcaaaagtgggacaagtagaaatgggaagggggcttccaggtcataggtagataagagacaaatggttgcaatcttttgagtttctgattagcttttccaaaggaggcaatcagatatgcatttatctcactgagcagagagatgactttgaatagaatgggaggcaggtttgtcctaagcagttcccagcttgacttttccctttggcttagtaattttggggctccaagatttattttcctttcacagatgcaatatgataattcaacaaccattatatgtatttgacagtgctaatctaaagaattaaacaaacaagtctaaatatctaactacaacagacaaggttgagattccatgtgaagcccagattattatctcatcacaaattagaataatatcccacaggattgtgaagatactcataaatcaatatcctcagaagcataattcaagttttgtttgtgttgtaagaacaaagaagtgaacacattttcgtcttttttattctctcaaaaagtaatcctctgtctaaaataaattatatatacatttttccttttttgwaagagaaggattttcttggaatgtgataatattctttcttataaaatgcaaattctcatgaatatccaacttcattttttaaagttacctgatttgttccagtctaacctattgacttcattactttcatgtatgtatacattctcataatgaaaaattattccagaaaccaactatattttcatgatacattagtgaaaatgaaatgtatgctaattacatatttttaaactactttatttttatagaatcaaaatctttggaaatatagaaaatgtatgggaaaaaaaattaatggcctttgattccactactcaggaataataatcactgctaactgattttttttcctttcaccatttttctaatatatatttatattttcaaatgtgtatcatgcatgtatatatgcatatttatgttacttgcctttttacacatatttggctgcatatttctgcatgattgtatattattcaagaacttattcatttatgtgctcttttggtaacatttaaacagtaattttaattattatgaacaacrttaagcatatttttgtctatttgctatctccttcatatagacttcacaaagtaaattcagtcaacaccttatattggaaaagccttttgtaatttgactgttgaatagtaggttctgtttctcggttcttttggttaaaaggcaaaggaacctacttacattcatcaatgtagaggtagtttagcatagtaatactgacagcacatagggagaatactctggacatgcaacaaggggaaccataatttaccaatctttgcatgattagagctgggggaggcctgggatccagggatattgtaggtccttaaagcaggaattaatagtttttccctttagtgctagattaacctgatataccgatattctggatctgcttcttttcatggacaacttaagcagttcaaaacataaacaagaaacagaaaactcatgtaaaggttacttaaataacaaaaacccttccttatctcatatacctagatgtttkatatacttggctttagggttactagccctagcaaacggaggacttgggtaggagcagttaagctatgtggagagggatattttcatggctaacattatttagaattgtccgtacaggaggataataaaaagtagactgatggttaatatgtttaattattatttttaaattctgtacagaaaacgcacattattttctatgcccatggtggactgctcatgattttctgcattttggttgccctggttggtaatatttctgttacaggaaaggggtcccattctagaccccaagagagggttcttggatcttgtgcaagaaaaaattgggggtaagtctgcaatgcaaagtgaaagcaagtttattgagaaagtaaagaaatgaaagaatgggtacttcattaacagagcagccctgagaactgctggttgcccatttttatggttatttcttggtgatatgctaaacaaggggtggattattcatgcctcccccttttagaccatatagggtaacttcctgatgttgccatggcatttgtaaattgtcatggggctgatggcagtgtagtagtgaggatgagcagaggtcactcttgtggccatcttggttttggtaggatttagccggcttctttactgcaaacctattttatcagcaaggtctttatgacctatatcttgtgccgacctcctatctcatcctgtgacttagaatgcattaactgtctaggaatgcagcccagtaggtttcaaaatcattttaccaagctcctattcaagatggagttgttctgrttcacatgcctctgacagttcaaggttattttatttatttatttatttattttgagacagagtctctctgtgtcacccaggcttgagtgcagtggygcaatcttggctcactgcaactccacctcccggattcaagcaattctcctgcctcagcctcccaagtagctgggattacaggcatgtgccaccacacctggctaatttttttgatttttagtagagatggagtttcactgtattggccagactggtctcgaactcctgaccttgtgatccacccgccttgacctctcaaagtgctgggattataggtgtgagccaccttgcccggcccagttcaaggttattaatgtgtaagcatctctgaattctgttcatgttccctcttggttgcatcttaaagcattgcatctccaaacattacacaacacaatttaaaacggaaaaagaagctggcttgcagctttaactttagagaagaaagtctttcccagatgattttcatcagtttctcttacttgtcataggtcaaaacttggttcctctctcaatcttgagccaattaccggcaaaagraaattagatttccaagatgagtttagagggtgctgataagtgattaacaactgactagaagccagagggagtggtagtcctaatttgtagcatttgtttatttctgtggcataaatacccccrcctttgcaggttttaagctaccaatgtgatgtcactgaactctgagttggtacgaaatgcatagaatcggctcttgtgagctggaataaacaggttctaattgaacactaggcttagaccagccacaatttaacctttattactagtcacttactacacaaacaaaatcagagatttgttagtaaaaaaagagaaatggccattaaacagtcaagcagacatgtttgcctaaaatactgagtggtttccactgctctctcaagtttctgtgccttcataagcttatcttatattagtttagccatgattctttaccagtgatctttttgtaacatcataatttttcaacatctgctcccacagattatggcatcttctctcagaattttcccagtcaaacaaaagagaaagaatctagctggccctctagatcttttttgtaccagcctagatgctgtaggtccaaaataaaaccaatgaatagatgggttacctttttttttttttttttttttcagataaytaatcatagtttgaatagctgtgatgagaattggcacaatcttgcatcttctgtaggggacagattttcttagaaaagttacagatgtgtttaatagcaaataacttatctggtacttgtgaagaatgattgatatggcttggctatgtccccaccaaaatctcatcttgaattatagttcccataattcccacatgttgttgtgggagggaccccrtagagataattgaatyacaggggtggtttcccccatcctgttcttgtgatagtgaggttaattctcacgagatctgatggttttataaaggcttcttccttcactgggctctcattctccttcctgccatgatgtgaaaaargatgtgtttgcttccccttccaccatgattgtaagtttcctgaggcctccctagccatgtggaactgtgagtcaattaaacctcttttctttataaatgacccagtcttgggaagttctttagagcagcatgagaatggactaatacaatgatcttttagagtgatatgttgttttgtattcagagacttctggttcctcttttgtcaggtagatcaattgacaagttagttcttagcgtatctgtgttgtgaattacttagggaaaattttactttcaaattttttataagcatttaacctctcatgggctttctttcaggagtcaatactaatactatatatatatatagagagagagagagagacagagagggagagactattttccatatagatagatagatagatagatagatagatagatagatatagggaataagggtccaaaacagatttccattttcttctgaatcatttgtgaaaacgtgtgaattctcagaatatcagctctctctacattaaaatgtaaatacaaataaaaatttaaaatcaatggtaaaggactcttagactttaaactatttttttgttattaccacagaggaagatcacatgtggtaaaatatttgcttataattatgttttagtatgattcaatggtccaatattgactaaagattcttgaaataagggtatctctaatgacaaatgtcttctgtttatccattgcagttatatatttaaaactgaaagtttttcaatgatcatttaaaaattattcataccatcaacaaatgtctcatgatagttaaacatatattttcagaggtcagtttgcataaactgactcatcatgagctacaaactttgatagaagggatgaatgatttggaccataagaactattcaacaattactaagaactgattaaatataagggtttgtaaaaatacaacctttcttttatttattccttcgtttatttatttaatattccataattatgagtgctaaatcccatgaaaggtactggaaattgaacaatgagtaaaaggtagtggaagagattacttgcaaaagaactgtggtggtggagatcaaatgaggattggtggaagcgattgacaatggtttttgrattttctgaaaaagagattgaccacttctaaattagaattagcaatgttattcccttattgtggagtgttctgattataatatcacattgacctttagtgaactgtagtattgaaggatagttgaagatgtgttttattctatattttaaatttttcttaaatatgttcacttttcccccatattcactgctactacgccagttcaagtaactttcttttccctaagttgctgtagaatcttaataggacctcttacttccatagttttgcctgaagtctcttaataggtatttgctgaatgtgtaaaagtatttattcccattttaaattctgtgtctacattaattttccagatttatttcttcttaattcctttaatgtgtttggccccaggattaatattttaaaaaatcttcaaattatgaaaaaataactttcagcattaatcatcacaatgttctttgaccttggcttagtaacaccaaggtaactttcaatgccatcaaaaatgcactaacaagtgtcacaccagactacatcctgccctggggcctaattgctgctgcatctccacatcacaggtgcacagcctacatcccccgacaccatcccagaaggttgcagtgttacattaccarctgaacctaatggtgccacagggtctctgttacctgagcccacacagagacctaaatcccagggaataggcagtcctgcacgtcagggaggctctccccaggacatagaaatccaaagcacatgcttccaagagcctgagagccaccttccctgatgacagtgaccttgttccctgcagcaattgggccatcatgtgcctgcacacaatgcccaggggcctgaggaccagcttgcttgtgacctactgccatgaacactgatccccaaacgtgccacttagggcttaaggactgccctgtctgggatgtgccaccatcacaacccagcaaacttggcccagcaataacagggccactatgtacctttgtgtaccacccaggatcctgagaactggtccatgcaatgtgtaccaccagaggtgcgtgtgcactccccagggatccaaggactgcttgcctggaggccccatctccagtaaagtcacatcacagctttcaggaacaactagagcataagacactgtgaagccatagatactactgattggactaatgctgaagaaatcatatggtgactacagtactgcattctcccagaaacaaagccaaagcaccctactcaagtttaacaatagactagataaagcaaaagaaataatttgtgatcttgaagacagatcttttgaaataagcgaattaggcaaaaagagaaaaaagaataaaaatgaaaaaagtttacatgacatatgggatatcactatgcaaacaaataktctattcctrttttagaaattccagaaggaaaagcagtgagaaaataaataggccacttatttaatgaaacaatagctgaaaagtttccaactcttgggagataatcatctagatatagggagctcaaatgttcccaaatcgattaaatccaaaaaggtcttctatgaggcacatgatagtcaaattgtcaaagtaaagacaaaaagggaattctaaaaacaccaaaagaaagcatcaagtcacatatgagggtatctttgtccgactaacagcagatttctcagaagaaacttacaagctaggagaggataggatgatatattcagattgctggaataaaaaaaagaaaaaactttcaactaagaatactataaaccataaagctattctttagaaatgaaggagacataaaattttcccagacatacaaagactgagggaattaatcactgttaaactgaacctacaagaaatgcttaagggactccaacctctgaaagcgaaaggatgttatctatcaattaagcaaaagcagatatgtgtctatatcattggtagatgttacctatcaattaaggaaaaacatgaaagtatacaattcactggtaaagcagatatgcaaatgagaaaaagaaaggaataaaattttatcactacagaaaaccaccaaaccacaaaaataataaaagaagaaaggaactaaggctatacagagcaattacaaaacaactaacaaaatgacaagaataaatcctcrtcttatcaataacaaccttaaatgtaaaccgtttaaattccctaattgaaatatataaactggctgaattaaaaaactgagacccaactatttgctgcttgtgaaactcacttctcatttaaaaacacacatagactataacagaacagattaaacaagatatttgctgcaaatgcaaacaaaaagtgtgcaaaagtagcaaacttatatcagacaaaatagacttttattaaaaataaaaagataaaaagacacagaggtcattatatagtgrttaraaaatcaattcagcaagaggaaagaacaattgttaatatatatccaccgaacaccagagcactcagatatatagggcaaatattattatagttaaagagagagatagagacaccaatgtaayaatagttgagaactttaacacctcaccctcctcaccctcagcattgcacagctaatctatacagaaagtcaacaaagaaacattgtacytaagcttcattttataccaaatgaacctaatagacatttacagaacattttttccaatggctacaaaatgtacattcttctcatcagcagatggaacattctctagggtagaccctatgttaggcccaaaacaactctaaataattttttcaaaaatgcaattataccatgtattctcaggtttcagtggattataattagaaatcaataacaagaggaacactggaaactgtaaaaatacataaaaattaaacaacattctcctgaatgacaaatgagttaatgaagaaattaagaaggaaattttaaatacttcttgaaagaaatgaaaacagaaacaagacataccaaaaaacctatggaacrcagaaaaaatagtacaagagggaagtttaaaggaataagcacctatataaaaaaaaaaaagatttcaaataacctagtgatacacctcaaaaaatagaaaagcaagaacacgccaaacccaaagttaatagaggaaaataaataataaagatcagcacagaatgaaacaaattagaggcaaaaaagcaaacaaaagattcrtgaaaaaagttagtttttgaaaagtaaaccaaatcaacaaactattatatagattaagaaaaagacctaaataaataatatcagaaatgaacaatgagatattacaactgacaccacaaaaatacagaggatcattagagactgttaggaacaactatacaccaacaaattaaaaaacataaaggaaatggatacattcctagacacaagtataaaataccaagattgaaccaaaaatgaacagaatcaaacagaccaataacaaataagaagattaaatcagtaacaaaaagtctctcaaaaaagaaaagtccaagaccagatggattcactaatgaattctagcaaacttttaaataactaacaccattttttctcaaactattccaaaaaattgaggattaagaaattcttcctaattaattctgtgaagctagcattaccctgataataaaacsagacaagggcacaacaaaaaaagaaaactatgggccaatatgtctgatgaagatagatttaaacaccctcaaccaaatactagaaaatagaacccaacagcacgtcaaaaacataatgaacctaatcaagtagaatttattccaaggatacaaggatagttcaatatatgcaaatcaataaatgtaatgcatcacattaacaatataaaattttaaaaacatattatctcaatagacagaaaaatcttttaataaaattcatcatccctttatgataaaaaattcttaacaaattaggcatagagggaatatacctcaacacaataaagaccatatatgacaaacccatggctaacattatactgaatgaagaaatactggaagctttttctctaagaactggaagaagacaaggatgctcactttcactactcttattcaacatagtactagaagtcctagcacataacaattaggaaaaagaaagtaagaaattgccatccacattggaaaagagggtcaaattgtccctctttgcaaacaacatgttctcataaatagaaaaatgtaatgactctgccaaaatactcttaaaactggcaaatgaattcattaaaatttcaggataaaaaaaatcaacatacaaaaataattagtattttatataccagtaatgaactaggtgaaaaagaatttaaaaatgcaatcctacttgcagtagctacaaaaaaagacacttagaaataaatttaamcaaggtgaaagatgtctacaatgaaaactacaaagcactgatgaaagaaatagaagaggataaaaagaaattgaaaaacattccatgctcctggactgaaagaattaatattgttaaaatgaccatttcacccaaggcagtctacagattcagtgcaatccttatcaaaataacactgtcattccttacagaaatggaaaaacatcctaaaattgtctggaaccacaaatgaccccaaatacccaatgcaataccaagccaaaagggtaaaactggcgatagtacaaaatataatatagttagttaaaatataatatagatagttcaaaatataatacacagtaatagtaacaaaaacaaaaacaacatggtatgggtataaaaacagacacacagaccaatggaataagatagagaacccagaaatacatctatatatttacagtcaactcattttcaacaaagatgtcaagaatatacattgaaaaaaatgacaccctcttcaacaaatggtgctctgaaaactggatattcatatgcagaagattgaaactagaagaccatctctcactayattaaaaaatcaactcaaaatggattagagaattaaatatcagactgaaactataaaactagtaaaaaaagataaaggaaatgttgcaggacactgatccaggcaaagactttatggttaagaccacaaaaacaaaaatagacaaatcagactatataaaactacaaagcttctacacagcaaatgaaacagtcaacagagttaagttacagcctatagaatgagggaagatatttaaaaactattcatctggtaagggactactatccatgatatataatgaactcaaacaacagcacagaaacaataatctaatttaaaaatgagtgatttatctggacatcgtttctcaaaggaaggcatacaaatagccaataaatatatggaaaaatgctcaaaatcactaatcatcagggaaatgcaaatcaaaaccacaatgaggtatcatctcacacaagtcagaattcctattatcaaaaagacaaaaataaataacaaacgctggtgttgatgcagaagaaatggaactcttatatactgttggtgggaatataaactagtatagccactatggagaagagtgtggaggttcctcaaaaaactgcaaataggacttccatatgatctagcaatctcactactgggaatctatcccaaagaagggaaatcattgtattaaagaaatatctgcaaccccatgtttattgcagcactattcataagagcgaagatatggaataaacctacgtgttcaacaacaggttgaattgataaagaaaatgtggtatatatacacatggaatactagtcagccataaaggataattaaatcctgtcattcactgtaacatgcatagaactggatgacattaagtgaaataagagaaaaataaagtcaaacaccatatcttctcactcagatatgaaagctttaaaaaaggaaaatagccacagttaaagtagtataaaattatatataacaaagtcccagaagtttatacattataaaagtggcaagtaycaaaattgtggctcawatagggaagctgttgcaccaggagtgtggcaacagaagtctttaagaccatactcaaactgaaagcaactttaaaaacaagagctgcaagtgttatcaggagttttcagcaaactatttaaaatagtcaaaaactgagcagttaaaaagtaccttctgaagtgaaygccgtttctaaatrggatcccaatgcctggtgggagaggcagcctcactctaccgtgcaggctggacaaaggtcccagccctgaagtcttagackctgagagtcaacgaaattgttaaaaaaaaaaaaaacagaaaacaaaacaaaacaaaaaaaaaaaacaagagctgctcctgcaccaccacactcttaattggacaaagattggatcagattgtaagaatttattatgctcaacatcactaatataattttawtagttatttaagaaacaaacccaagaaactcttccacagaatctaaatgaaaggaaatgattwaaaaaaaatgctaacaaggatgtggagtaaggggaattcttatgtactgttagtgggaatgttaattagtacagctatttattatggaaaatactattgaggtttctcaaaatgctaaaaacagagccaccatatgatttagcagtgccactactgggtatttatccaaaggaaaggaagtcagcatagcaaagagatatctgtactgccatgtttattacagcactattctcaatagccagggtatggaatgaacctaaatgtccattaacagatgaataaataaagaaaatgtaatatatatatatatwcacaacagaatattgttcagctatttaaaaaatgaaatattgtcgttggtaacatggatgagcctggaggacattatgttaagtaaaataagtcagacgtggaaagataaatattgcatgttctcactcacatgtaggagcaaaacaatgagctcatggaagtaaagagtagaactctggttattacaggctgggaacagtaagggagaaggaggatagagggaggttggtcaatgcatataaagttccagttagataagaagaatatgttttagtgttctatggcactgtagggtgaatatagttaataatttattgtatatgttcaaaaagctagaagagaggattttgaaagttctcattaaacaaatgataatgacttgaggtgatgaatgttttaattaccctgaatttataatcacacactgtatacatgtatctgtcacttggtaccccataaatatgtttcayttattatgtgtcaagtaaaattgaaagaaaaaaagagaaaaatgaacaaaatgtaataacaaaggcctttttgtccatgacatcatagtgagcatgacctttggcttctacaaagttttaatctaaatttgacaaagaaaatggaaaataaattkattttccatgttctttcataagctgatgccaaaaaacacataataatgttagcaagagcaaaatgttaaaattaactgcatcaaaactaagcactattaaatctcaatatgatatttatttaataggagttgggataaaagatgaccaatatagtatgtatctatgcaaatattaattatacaatataattataaccaatttcctattaccatacattgcacttatacattattcttcaacctatacctagtcaaaatttagtttgattaaaagcatcaagccatgaagtggttcaatacaaatatatcttttaaattggagattgttaatcatttcctgaaaaaatgattttgataaaattaaactgagtatctattatgtgcaagacagtatgctggggaatgaaagaaaatacaawgaagaaaaatacacagaatttgctttgagagaactcacaatctggtgtatatgaatcagatttcaaaagaattgtatttgtyacgtaaacaaaatcttttacaattaatgctgctgtactgtcaggatactgaggaaatatttttaaagaaacagctgttcagctggattattgaattgaacctttagaaaattggaaaagcctcccataaagagggaaaaactgtgaaaattcaaggtgggtttgagggacagcaagttggccagtataaaagaagcacagactacatcaggattggtactgagcttaaaaagtcaacagatggcttcatatagggtcctgaacttccataggaaaaggcaagtgctgtggtttggacattcracccctccaaatattacgttgaaactggatccccagtgttgaatgcagtgcctaatgggaggtgtttaggccttgggtgtggatccttcatgaacagcttggagcaatcctcttggtaatgagtgaattctcactctatttattcctgcaagggcaggttatttgaaagagcctggcaccccgcaccctttgcttcctcccttaccaagtaatctctacatgctggctccccatcaccttctgccatgagtggaagcagcctgaagccctcaccagaagtaggtgctggtgccatgcttcttatacagtctgcagaattgtgaaccaaataaacctcttttctttatagattatccagttttggatattcctttatagcaacacaaacaggctaagacagtaagccatctgaaattttaaatagtaacgttgtatactttatcagtttttagaacaccatctccagacgccaacttcttgtagaagtaagtgatgtagtgctaaataatccttaatggcccttagaaatgaaagtaaatccaatataaaacaggtgttccctcgttttctccattctatctccaaaaaatgaaagcacatgactgacacattcaagatgttacaataggaaggtgagaaccagtttgataactgcatcctagctcaagccgaataacctaggtttccatttaccgagaaaagaagctcttccttgtcaggacaggccagtgatgacttgcagccaggatcttctataacattgactaaaattaagagacagtgatttcatagctgtaagatttttttcccctgagtcatctgtgattacattttcatgttacagtatattgttcagggatcattgtggagactgaagagaaatgtacacatggctttatgtaggtcatrgtgaaagacagagagaaagtgtgtattcagaaatgattgaataggcttccccaaagtaatccattattgctttattggtaattatgttttgaattactgcctgtacttacatgactgaagagtagtttgggcatgtcaactggaatttatcacacatcatttcatgtactaacaggtaagttcacttaaggtgctttcatttgaataaacaataagtagactgcaggactgttctttgagtattatgacttagatctttagaaaagccataactgggagtccttttttgactgtcttaataagtcagatttgaaaatttttgctataactttaaggtatagctagagtaatgattaataatcttactgataaagtaaatagccctaaggatttgcattttagacttgcataacaatataatagtttctaaatacttcagatgcatgtgctatgtactgacaaaggctgtgaatgataaaatatactgtttataaacaatttgcttagaattgtctcagtgagtgtatgtgcattgttaataaaccatattattttcaatggccagatatattgacaaagactttcaacaaagcaatagagagtcaaaggaagtctcacaattttatgtgtattcagttatttaggggtgtatctcaactctaaccacctataatcagtataaattggatgaggaaaaatcgttaatatggtgaatcctttaggatattttatagattagatgaaggattacagggaaattttctccttgccacacagcacgttcctacctaccaatgagcccaagacatgttcctgggcawtgtgagagaacaaagatttcagctagagctgaaggggctttaggctggtgagaacagcatcaatcttgctatccaagtgggtctagataggaaatttgaaaacaggaatcatgtatctgattttaygagttgttgttgcaatagacttagggacttagaaagcatcctggggaattttaacaaaccggtaaaaacctttgcttggagaatggctccagagcctgtgctgtgaacaagttctacgtgtttttaaaatgcatctaggagttacattgtcctaaaaagtctaactcatagaagcagggagtagaatagtggttacyaaggactgctggtaaagggagaggactggggagatgttggttaaaggatacaaaatttcagttaaatgggaggaataagttcaagagatctattatacaacaagctgactatagttaataacaatatattgtcagtttgaaaatcgctgagagaacaagtaaatgttctcactataaaaaaatgattaagtatgtgaggtgatgtatatgttaattcgcttgatttagccattctataatatatacatatttcaaaacatcatgttgtacaccacaaatatatacaactaatatttgttaattaaaaaagaaataattttaaaagaaaaagaattatgttcttacaaactgcctatcgttcttactaaaatttcaccgctaaagtaattcttatagatttgacaggaagatagtgaattttctctttagagactacgtggaacatagaaaaagaaaaatctgggccaggcgcaatggctcactcctgtaatcctagcactttgagaggctgaggcaggaggatcacaatgtcaggagttcaagaccagcctggtcaacatggtgaaaccccgtctctactaaaaacacaaaaattagccaggcatggtggcatgtgcctgtaatcccagctactagggaggctgaggcagcagaattgcttgaacccgggaggcagaggttacagtgagctgagatcacaccactgcactccagcctgggtgacagagcaagactccatcttaaaaaaaaaaatctgtttttggagggagttatgtatgcttgaagatagataattctgtcatttcctacaaaaatctatgctctttgggaaataaccactcagactccctaaatgcctctttgaaaatgttaattatataatttatttattcatgtactcatttattaacaaatatttggtgagcacctactaggtgataggactgttttaaagatagaacarccagtagaacagacaaaactctctgcatccttagagctcacattcttttacaattggaagaattgaataaattacatattttaaatgttttgaatagtgtctaggacatattgagtggcctagtaaaagataactgttattactaacattattggcaggccagtgttaaaatttaaaccagtatgagaaagataaatctctttaaggagcacttttgttcaacctgtcccartaatagactatatagttaaccaaaataactgaagaattatcttaagagctagggtgcatgactatcagatattaaaagtaaaaaaaatctgataatttcaattattagatgtgatatacttaaaagagtatgctcatacaatacttctgggaatgtaaattgttacaatctcagtgaagaacaaaataacaatatgtggcacctgggttatgttgccagraatccccctctaggtttattgaagaaacttgtgcacayattcataaggaaaacccsgtacaagtatgatcattatagagttttttttttccatcaatggggaaatgagcaaatagcagcaaacacagtagttaagacaaatgagctagtttcatatgttaaaaagagaaattttcaaagtaatattgagtggatgagcaagttttatggacagtaggatgtcataaatgccatgtgtatcaaatacataacagtgattaactttagagagggaggtacgagactgaggaagagttcatataggacttcagtgttatctacaatgctttatcctktaaaaattagagcaaaatccaatgggaaaaaaagtkcatgttattattgaggtagatagattattttctatattttatgatctctacttttcttaaacatttataataaaaaatacatattgaataggagaagtagatgtcagggtgcaaagccaagtgacatagatgagtctgtgcctggggaacagagagatcatgccagaccaacacatatcagtacctgaaactcacctaagaattgtgattatcctatattctttcacttgactgtgaatctcagtaatacagtttaaaaaatgctttgtgaaaatgaaaaatacctaaacctttatcacccagggtcagactctaatagaataatactttctgaagttttatgtcatttttcattccagttttgttggtgagtgtgaggaaaggatagctagattaaaaaaatacttttattctgaaatatttcaagcatccataaaagattagagcatatagaatcacaatgtaatcttacggtgaagtcttactgagtcttaacttttctcatacttgttattacatgtataattgatgtcccctgtgttacctttctcaggtttttactatttttcttttttagtactaaagattttgatgaaagcctttgccccttcataagcaaatctgcatgacagacattttccatctattggattaggagatttagggcatcaaaataatcagaatctccctcaggcaatagaatattcttactctgagtatatgaaaactcaaagctaaagctgaaaagtttctcacaggcgcatgacaacaagatttaaatgatattctgttctgccatctttatagcaatcttgatagtatggggggaatgaatgcctttgaagccaagtgcccagtgaacactttcgtgttgacaagttaatcatttattgtgtcagtcaacaaatacttattgagcaattactattcactctagagatgaaatggtggataaagcctactggacttattcacaagagatctatagtctaatgggggaaacaagccctcacctgataattacagtgtgttaaaataggttctgttgggaaagacaccaaggctatctttctatcaacaaagtaattctgtgacatccagtctttgaaacctcatcattcttcattgttatttgaatttgtgatcactatttcatatattggcaattagtagctcattataaagacttacatgacaatccaaataagatgcaaaacataatccatgttcactgtgatagatttcattcatctctatagtaattacagatgtataataatcaaatttcaatctggttcttcataagtttgtaaaatgtgtaattaccaggaatttataaataagttaacactttacattcatttataaataattttgcaaatgcttgttttctctgtcagattttcttgtagggaatcagtggctttgagatttcaggctttcatcgcattagggcagtaactgccacatgctaacagtagaatataactattaaaattctaaaccagaaaaaatgatatatttgacacttcataaaatctgtcttaattataaatattaattttaaaatattcactgacatccagaccaactaccctacaatcccccataaccttataatttaatcaacttcagagactttcagttgtaggtgaaacatagttttcaggyacagttgtaatactgtatgtggaaaatggtcatgggaggaaagaaaaatacgtcctttttgtgtatctaaataatttgacatggcaacattaaattcccatgccatgatttaatatttacttgcaaatatgcattcactgtcttgatagtgatttatgtactttatgtttcatacctaaattacatataaatactcttcacctaactatatgggaaatttcatgaaggtagagatattcagccttggccttgtgacttgaccctttcttcttaaactagatcagaaaatctacttatttaaaattctgtaaggtgttttcaaccactgaattttaagctaacatcatattcaaagtatgtaaaactaccatggaataattaaaacttatctagggtggtaagccaattattattttattatcttctgtctgtcatatttagcaaaaacatgtgtggtgactggattaattaaaatactttattaaagcatgatatwtatttatactatcactatttcactaaataaatttataatttgctagtatcaattttttttggtttgaatagctgaattttttatggatttataataaatagtgtatgtgtgagttttgttttttacttttgtttgtggcttttaaaatctttttttcttaagaaatgcaactattggccgggtgcagtggctcacgcctgtaatcctagcactttgggaggccgaggcaggtggatcatgatgtcaggagtttgagacaagcctggccaacatggtgaaaccccatctctactaaaaatacaaaaatgagccaggcatggtggcgggcacctgtaatcccagctactccggaggctgaggcaggtgaattgcttgaagccgggaggcagattttgcagtgagcggagatcgtgccactgcactccagcctgggcaacagagtgatactctgttaaaaaaaaaaaaaaaaggaaatgcaactgttaatgtgtggaaccatttatcccaagatctctaggagttccatagatattttctcatttattgctccacttggaaggtatttggctagtataatcacacataatattaactgtcacagagaattccttaattgctcaaattctctaagacaataaataacaatgatattagttttatatatcctctagtctggtcagcctattgttctctattaaaattgattttccctgtcgtcccaggagttcaaggttagcctgagctacatagggagaccctgtgtcaaaaaaaaattgtttttcctctcaaattaatttctgtatcttttttaatgtcaaaatatggatgccatgtttagatcataattctaagtttttccatctggaacctttctaaatcaggaaaaatatttacctgactgttaagcctagttttttatttgttacttattcagctgttaaatcaaataatgaacaaaagctgaagtcccttcctctttggctgtccatgcaaacacagctggataattttgcatgatttaataaggcaatataaaaatccttttgacctagattatatatggttttggtggcaaatgaggctctttcctctcccaccagaagttagtargattctagaagaaaatttacatgtgggaatgggtagggggaaacaagcaaaacatcagattagtaaaaaatgaagtcaaagaaagagaagaaccgacaactgtggatttgtacagatggttaggttttacttcattgcagtgctttacacaatatatggtataccgcagatgcctaataaacatttgtttaattaaatctgttttactcaaataaacttgtatatgawttttacaggagtaacgtccaaagtgatcaagggcaaaatttactctgtttatgtttcagagatgcccaacataggctttagagcaaagccagatgtatgtatgtagcataactattctagttagactgcaaaaattaagcacaactatgcaacgtgattttctccttggtatagcactgtttccaaatcaaggcttcttctagctgtgtaattgcacagaatgatcactctgcacctttcaccaatgtaaaagatgaagctcatttcccacagtgctaaaggtttacgtgccaagatctttattacckaatgtaaaatctgatgtgttttaaatttcattttgtaattcactgaactcaaaattttctgcttaattagacactaacaagtgatacgaaatgtgggatttatatgtctttcaaacatttgctgacatgaacctaaattattgccataatagtagaggagaaaaacttgaatgtgccattggataagttgtatgaacaaaaggaaaatcctttacttttgccacactgttaatataacctggctgagcaccattgaattgtcatatgttttaggtagtaagtaaatattaagtttatctgccagtgacccacgtgtaagaagtcataaggaagtatatatttattataattccataaaaattcagtattttcccctctataaatattaaaatggtattttgtataggttccttactattatcctatgctcttttaaaacagaagtaatcaaaattgagatttcgttgtcattgtcagaaatatgatttacttttcaagcaggactaagaataatgagttaggcagctaaacttacattgtactccatggtgataaaatatcacatttctacttaaaaaaaatctcagtgacattttattacaggaaagaatttaaaatactgttgtagcacataaatttgggaactgaccctctgaacaaagagctataagcatagatttttgatagatagatttcctaaaaggacaatccaatcgctagtggacttttattatctatgtcttcttctggcttatgaytggtacaattctaattttctccctattttatttcttctgaaaaatgtccataaatacaaatgatatgttggaagatggtggagaattattttatttgtctggttattggcctgtggtgtattttacattgaaaactgaagaaaacatgattttctatttctgcttttctatcagcagtcaaatgatctttattgtcttaaatacaaaatatgccatgtcaatcagagtacagtttgattataattaaatgaaacattagccctatacagtgctcttttctaatcatgtttgttcctatcctttccactayagttatctcaatatggtgaaatgaattataattaaatgaaaaattagccctatacagtgttttcttttaatttgttgtttcctatctttttcattatatttatctcaatatgctgaaatctcatcctagaaaactactttctccattaaacctttcttaattatccagtcattttctatgttttatataggttgatgcaaatttaattgcagtttttgtcatcaaagtgatgacaaaaactgcaactacttttgcaccatcctaataattttgactgtgcactataacttttatcactttctgccttctatgatagttatttttatrtattttcttctctattatgttgaaagtcttggagggcaagaacgctttattatgtgctgaattatgtctccacccaaatttatatattgacatcgtaaccccctgtaactcagaatgtgactgtatttgtaaatagggtctttaaagaggtaattaagttaaaatgaggtcattaggatgagcctcaatccaatataactgatgtccttgcaagaagagggaattaggatacagacatgtattgagggaaaccctgtgaagacacagggagaagatagccatctgtcagtcaaggagagagacctcagagaaaacaaaccctttcaacaccttaatctcagacttctagcctccagaaatgtgagaaaatgaatttttgttgtttaagccacatcaatcagtgatactgtgttatgaatgcactgacaaactagtatagctattattcaccgttgttctgaacgacctagcacaataccttgtatccagtactgcttcaataaaggtcgttaaattgatttcctttgtcgtgtgttcactgtcaactaaaagttttgtttcagtgaagtaggagaatactaagacaattccttctttgatcctttacactgaataaataaatagcaaccatgctataattatcaagctttccttcccatcattacttctttattgtccttcaaacctgaatttatttgtgacaactttgaaattgcgtaagaatcttctggtttatgtaatgtctacttaatttaattctcgtatggatcatgtgataatatttctatattttttcttcattattctagtaatgagatagtgattatagcatttaatcaaactggaaataattatattgtcacactttatgtagatatatcgttttaaaatacaacttttagaacattattttgtgtacccaatagttcagtcatttccttatgacacctattaatcagattatactacggaattttaaaaaatcaaggttgacattttggtattagaatgattttcatgttcgatatggtgatactaaaacctgtttccttagagtaaaaggttttaatcatgcaatatatgacacatgacatatattgctcagctaaatgttcagttaactgaaggagaatgtgaaaatgatatagaaaataaaaataatatctttttatctatcactctatgctaatatggttgttaggacatttccttagattgttgtcattactgcatggtggaaatagtttctataaataagctaaacaaaatgacttccaggccaggagtggtggtttacagctgtaatcccagcactttgggaggccaaggcaggcagatcacttgaggtcaggaattcaagatcagcctggccaacacatggtgaaaccctgtctctactaaaaatgcaaaaattagcttggtgttrtggtgcacgcctgtaatcccagctactcaggaggctgaggcaggagaatcacttgaacctgggagacagaggytacagtgagccaagactgcaccactgcactccaggctgggtgaaagagtgagtgaaactctgtctcaaaacaacaacaacaacaacaacaacaccccaaaatgacttccagtatgtatttcctttttctacaataaagcttagctaaacttcccaattacgtagatacttttgtgttatgatattgataagtgagctgtaaggaatcacagctatgtcattgattactacattgatctttgtatctccagatactaacaaaatatataaacaatagaatttttttttcccttagccatagttcctttaaattaatgcctctttgattacaccaagttcaagcctatatctcgttatggctatatgtgatctttaaaataaagtttaatatcagcttyctttacatttattaatctgatttttttcagataaaatttggtttcttttctctcctcttataaaataatccyggagtttggctgctaaggcggtgggatgtataaagaactctgagagtttatgggctagccaaagaataattttattcttctaagtcatagtggtttatgcatatgccatgctactgtggtgaatatgttaatatactgataaatagatacatttaactagaggctgatggggtgtgcaatggcaaatatttggyacygattggtgggttggygatacaacatgaaatgtgggtaccattcacccattcccctctgcattttctgcgttcaatacgcaatgagggggagctgtagtccctcaactggcaagggaaatcacattctatcrtgtgtgctctctcaccaactatttggccttgggaaaattgcttaacatcccttgattccttcttctgtaaaatgggagtgataattcctaagtgacaggataatttttgaaatgtaatagacagtggttgtgaaagtgcataacagagtgactgtggcatagaatcctcccaacggtattggttgactctaaatcaaaattatttaaaaataaatggcttgatcccttttccattctgtagagtcattacatttcctatgtcctaaacttccaaactctcaacaatttctgtgtcaggtgagacaatttctcttctatcttctactcctttgctgctaccagtcttaagagtttggaagatattactgtgggtggcctattacccaatgtcatacttctttgctaatgcaagcacaaaacttagacacaatcttgtgaatatttttagtagaaataaaagaatgataagccatagcttctacaagggaaatttatgatattggaaattttactatgttttctactgtctctgtgaaagtatggaatgaacagggtctaataccctggaataccacctggcagtatctgctacacattactttaatcttcaactgrttaatcggaccaagttttcttttctggatttttaaaatgctggatttctattgagcaacaaattatgtcttcaggtctccgtgaagggactttttgcattaataatacwgtagtttggcccagcgcagtggctcacgcctgtaatcccagcactttgggaggtcgaggcgggtggatcacctgaggtcaggagttcgagaccagcctggccaacatggcaaaaccccatttctactaaaaatacaaaaattagctgggcatggtggcacatgcctgtagtcctggctactcgagaggctgaggcaggagaatcgtttgaacccgggaggcggaggttgcagtgagccgaggtggcgccactgcactccagcctgggtgacacagcaagactcagtctcaaaaaaaaaaaaaaaaaaaaaaggccggcrcagtggctcacgcctgtaatcccagcactttgggaggctgaggcgggtggatcacgaggtcaggaaatcgagaccatcctggctaacacggtgaaaccccgtctctactaagaagacaaaaaattagccgggcatggtggtgggcgcctgtaatcccagctacttgggaggctgaggcgggagaatggcgtgaacccgggaggcagagcttgtagtgaccggagatcacgccactgaactccatccagcctgagcgacagagcgagactcggtctcaaaaaaaaaaaaaaaaaaaatactgtagttaaatgttagccaacccttctccccaacaacaacaaaaaaattaaaagtgccaggtagatttgaaagttcacaaacagactcccaaagaattaaatgacaagggagacttaaattaccgctttcttaacctttttagcatattctttgggagagtagatggatgtaggttcaagaggatttttacagctcttatgagtttagaaagctattaaaagctcctgttttcagtgcattgcctttgttgcaaatcatccatctctttggtctgtcctgcattgtggttttgcaaaagaaatgcaactgacattataaagctgttttatatagtgcagcacactgtattattattaattgaagaagaaaacatgctttggttagaacattagtttcctgttttgtaattgtatcaccattgatcttttaattgttccagatgaatatttcatctccttgtctcattcctgtctccttattccttgtaaatttgatctagcaattagtaatattctcactacatttccctagatatgatctgtgcttttcaattcaatttggtatgttcacagtagttttcaattcttttttcaacacaattcatgaaagtcccctttcatgtcaaagaagaacaaggaagggataaacccaactgtttaggccagatggtgagaaatcagatgacaggaaaaaaatgcagaaccattcaactcctattttgtttcttccttctctatcaaggagaatgatctttaaactagatggagtataataactatgcttaagggaatcaaagcccaattggtggtatagtaaaattacctgctgctttaaatgacttcaagcctctaggctagacaaatcacattccagaattctgagagaactggaagatgttgatgtagaactattttcagttatttttgcagaaccacagggaataacaatggtgctggagaaatgaaaggaaaatccacttcctgttgtcaaaaaaatggggaaaatataagtgattgctatcattgttgaacttcaacagacttccacaatagaagtttaaatcatttatgagcrtgaacagcaaagaagatggtgacctgggcaacatagcaagaccctgtctctaccaaaaaaaaaaaaaaaattagctgggccttgtggcgtgcgcctgtagtcccagctactcaggaggctgaggtgggagaattgcttgagcccaggagttgaagattacagtgagctatgattgcaccactgcactgtagcctgggtgacagagtgagacattgtctcaaaacaaaaacaaaaagcataaagaagatgatgaattcactagaaattgggcctcctataataagtgtattttmttctctgggtttctagattaagagatgaagggaattatgcaaaaaaggatggtgtgtagaggattacaatgtgttaggtatagtcaagattttcttgtgggaaacattgagaaaagtaggaaatgggagtttgtaacaaatcaatttctgtttgaggaaaggaggctaaaacacatgaaacaactagggaaccactgaagtgttcatatgtacagagggacaataagaacaatccctggtggattgattaggaaacattaaaaaaagagagaatttgaaatgatggatagattctactcagaagactaaaatggggatgaagaaaaaggatatccaaaacaaagagactgatatcatggccactaatggtacttatgacacacttccttgcccttatgtgtgttcacatcttattgtaagagtgtcagtctaacaaagggaagcactttttctaatccttttaattactctatttataacaaaattagcctgcctgattttgaaattggctaccttttgaaatcctattttaattccttttgcctccttcagatacaaaaagacaaatttttccctaatccatttaaggatgtctrtttaccaaaagagcaggcaaaaggattctgaaataaaaaggacttcatataggagatctgaaattagtactaatttctcatgggcaaatatgtagggttttttcagagaatattaattttaaaaataaaatggtcattacatttaattctgtgcatttctytgggaataaataaatatgttaaaagttcataggcttcttccactccatctggagaaattttgaaagaaattttgtaaactgtttcagctggattatatggttctggagaacaagaaatgttacctttttcttcttgtattttctacagtaccttataacctatctttgtttgcaataggccttatcaaatatgtgtagaatgaataaaacatgatatgctattataggccgagactaaaagatctatccctagcaatagtggtgtacaattttttatggaggagatggattgagagcaacataaatatctatataaaatagattaaagtgcagcggctatggttgagtttctagatgtctaaggtcctggaacagctcttcaattgcatttcttctctgttaccctcagccatttacttgagggcctaaagggctttgaggaatttcaagatatcagtaacataagatttggagaattgtatcatgtgggacaagctggattaaaggattggtagcaaataatgaaacatgtcagcagcttaaaatgaaaagtgaaaaggtttatttctcactacrtcatatattcgttgttcattggaggtcagcaaggggtgtcagcatgtattagtcacgcagagacccatactgatgaagactatatcttgaaacttgcttcctcatgcatagaggccaggtaaagagaagatgcgaactacacacatgcttctgctaggaattgctattttggctgcatttaatttcccatggccctgctaccacatgagttcaagtgggcagagaaatgtcatctgagagaactgacacatttgagaactgccctaatgatacyrtagaaatgttccccaaatctcctgttgcctcactaataaattatctctggttcatgaacttatataaattctctgataatagggttacagatttaacctgtataagatcatagaaaaataagctcatgcattgcttacactatctttaaatagtcttctttttatatgttggaagatgatctgtttcaggttaaaaggcttcaagcattacaaattgagagaacaagttcttgtctcttcttcatcatatttatttttaaagattgatgtcatattgctcctcaacttttgtcttacaaacttgaaatgatgtgtattaaacaaatgtgacatacttgctatgtgaaaaatattatgaaaaaatattatataattcattctagtagggtaaatagctaaaattcagaaaatataaaattaagaagttaaatggtaaaggcttcagaggttatggctgtgtccaaagtcagaaaagagaccccacaaaatgaggcaccaaagttagtctagaatttgaatagatatgtttatccatataaatgtgttaaacaaaggggtcatccgtttttctaattcccactcgatagaaactatcgaaataaattggctttactctatgctgacaataatatgccttcgccaacattgtttactcaaaaaatggaaaccagcattccctatgcccagagtgttgcaggcatttttcaataaatagaaggccttttggccaagttttccaagtttttgggacaagttggaccagtaggtgatggtagtctacgtctgactttcataatcccttgccccagcatcctgtaattgccagtcattaacaaagaatccagtgggtttggagactctggctccttcctgaagtatctagttgaatctcagcacagcaaagttcttcataacttgcatgagataagtatacctaaagcctcatgaaagagtaaaggagagggaaggcttcatttaggaagcttctttagctctgtgtgtgtttgtgtgtgtgtgcacgtgtgtgtgtgcatgcacaagtgtgtgtgtgcatgygcaagtgtgtgtgtgtacataaygttggggagtatcaagaggaagaaatagtgactagtttttattctttaagcgttaaatttcctcccctttataatttctgtaattcttccagttggccattcctttattttttcttcttccatgatatctattttcatgagttacaacccaaaaacacacagaatacttgagctatttagctgtccttcaatcaattcctaacgtccttttatccaaggaatatttagaaatgtaactgaaactctctcatgaactgtttatggacaagagatgaattgacagctgcttttactctgtcccattgattgtttataaagctaggttaatagcttctgagtaaaattttgataatctgacctctggattttttcaaactctcgagtagatatcagtcagttctgatgagtgatctaaccttggttcgtcaatgcaccctgtgtatgtagtagtctttgattcactacgtctgtcttctcggctccaaagatcaaattaatttttcctggataaaccacaatgactgaaatccctctcctcttcaactttcaataggaacttcacttacttctcaatgatttataatccattattccctatctacccttttatctttgacacaccaaaaaaaaaagtctacttttatagatcatatgtccttgcatgtaaagttcttaaaatgttttttaggtcttcttaattttatctttcccctaccttgctctaggcttttttggagaggcatgatcaattaaaaaaaaatctctagctcctatgatgtttcatatgacctcttcccatgtgccagttactcatatataatctattagacagctgtttaaaatatttttattattatgatgcctataacttaatttgaaaaacttcaacttaaagacagtgatatttaagtataaatggtttatgctgcactgtagggacaatcatttggttaatcaggaattcacactggcattctaatcaggaaatgctcactccataggaactactaatagccattccattatcattatctttgatcaacaccaaaggcatttacaattagcaaaatgaaagaagtgggttttcattggtgaaattagtggcctgttaattagtataatggattttagaagtgggctctcactggtraaataagtggaattcaaggtatatagattagttagactatcgcaaagatagccttgcctaggctttatctctaactcatctatgtccatgcatgagggagatttctaggttcttatcgctaactataaaggtaatgaaatcatttatttggaatattgctatagttatttcaagtgatttatcatacaaggtatggtctaattgcatcaaaagacagagatctgtgaatttgtcaatttatagaaagattgtataagtgacttttgcttgcttgctaataaatattaataagtatgtggaggggtggcagaattcgaagggaaactttttaaagtataattttgtgtcagagctatgggaggatgagcacagactgactgctgatggcagtgattttctacccatatacacaaatacttctgttggatgaggttggtttacggcacttaccttgctaattcctggtaaaatgtttctgaagattttccagatggattttgagacagccaccaagctttttaaagagtatttaccaaaatctcttttcaggtatttcttaagtaaatttaacgtttactttagtctcttgttatcaaaataaatttgaacacactggtgaagaatagtttgtgttgtttaactgttggcaggagattgcaaggttttttgttttgttttgtttttaaatatttaattgacaaataataaattgtatatattcaggatttaaagcatgatgatttgataacatgtagatgtgaactgattaccacaatcaaattaattaatacattcattaccacctgtaattagcatttgggccaggcggctggggagtggggacacttaaaatctgcccttttaggccgggcacagtggctccgcgcctgtaatctcagcactttggggcgtctgtaatcccagcactttgggaagccgagacgggcggatcacgaggtcaggagatcgagaccatcctggctaatacggtgaaaccccgtcactactaaaaatacaaaaaattagccgggcgtgttggcgggcacctgtagtcccagctacttgggaggctgaggcaggagaacagcgtgaacccgggaggcggagcttgcagtgagccgagatcgcgccaccgcactccagcctgggcgaaagagtgagattccgtctcaaaaaaaaaaaaaaaaaaaaaaaaaaaaaaaaaatctgcccttttattaaatttcaagtaaacaacagagtattattactatcgtcaccatgctgtacattagattccctgaacttattcgtcttataacagaaagtttatgccctttgggcaacacctcatttcctttatcccatcccatggcaatcgctgttctactctctgcttctatgaattagacttttttagattccatgtataagtgagatcatacaagatttgcccttctgtgcctagcttatgtcacttagcataatgtatttcgggtccgtgtatgttgtcatatatggcaggattttctttttttaagactgactgatatttcattttgtgtgtgtgtgtgtgtgtgtgtgtgtgtatttgttcatccatgcgtctgttgatgagtggttgtatccatatcttggcttctgcgagtaacactgcaatgagcatgggagttcagatttctctttaaaatactgattttaattcctttggctatatacccagaagtgggattgtgggatcatatattagttctatttttagtttttttgacttctatactgttttccataatggctgtagcactttacgttcccacgaacagtgtacaaagcttcccgtttttccatggccttgcccatacttcttatctcttgtctttttggtaacagccatcctaatakgtgtaaggtaatatcttatcgtggctttgatctgcctttccttaattagtgatgttgagcattctgtcatatatctgttagccatttgtcttcttttgagaaatgcccattcatttttttgtacattttaaaaattgtcttatttgtattttgctattgagttcagtgagttcattatgtaatttggatatctgctccttaacagatgtatgatatgaaaatattttctttcattccacagttgtctcttcactctgttgtttccttgctgtacaaatgattttcagtttgatgtaatcccatttttatattttcgcttttgctgcctatacttttggggttatatctgaaaaattactgcctaagctaacaccatagagctttctcctgtgttagttttaaagtttcagatcctaactttaagtctttaatccattcaaagttgatttttgtatatggtgtgagagaagggcctaattgtattcttctgcagttttatcagtgccatttgttagagagactgttctttccccattgtgtgttcttgacacctttgttgaaagtcaattgactgtaaatgcatgggtttattcctgggctgtctcttctgttccatgtgtttttatgccaaccatgctgttttggttactatggctttgtagtatatcttgaagtcagatagtgtgatgcctctaggtttgttattttactcaggattcctttggctattcatggtcttttgtggatccgtgtcaattttaggattgctttttctatttctgtgaaaaataccattggaatttgtatagaaattgcatggaatctatagattattttgagtagtatggatattttaataatattaattcttccaattcatgtacatggtacatatttccatttatttgtgtctttttcaatttatttcatcaatgttttataatttttagtaaacagatctttcaccttcctggttaaatatatttctaagtatgttcctctttaggatgctgttgaaatgacattgttttcttaatttatcttttggatagttccctgttagcgtagagaaacacaactaatttttgtatattgattttgtatcctgtaactttactgaatttgttttttatttctaacaggttgttttcaagtgtgaaaaatttaggtcttaccatatataaaatcgtgttatctataaacagtgatattttaacttcttcctttataaattggataccttttgtttaaaaacaatttcttgcctgattgccttaaatacaacttccagtactatgtttaatagaattggcaaaagtatgcacacttttcttattcctgatcatagaagagaagctttcagcttgtcctcattgattatggggtttgtgggcttcttttatatggcctatattatgttgtggtacattcctcctatacataatttgctgagtatttttatcatgaaaagatgttgaattttgtcaatgattttctgtatttattgatataaccatatagtttttgttttccattctgttaatgtggtgtagcacattcattcattgacataggttgaatcatccttgcatctgcatcccagggataaaccccactttatcatagcacatgatcccttcaattagcttttgaaatcagtttactagtattttgttgaggatttttatatgtatatttatcargaatattggcctatatatgtttttttcttgcagtgcccttttctgactttgttatgtgggtaatgctagccttgtaaaacgagtttggtccttagcttttcttttttgggaggttttcggttactgatttaaaggagttgcagttcatcatgttgtagtcactatcactcaggttttatttatatagtttttctgattcccagtaagggttattcttgaaccaatcccatgttttctgattgcatatctttctctgttttatacttttcacattatcatattgcttctcagaagggactacactatgtccatgcatgttttcagacactcctttattctttctctttttctcttttttatatcctaaaatatacaartttcaaatatataaaataaaaaatgaaattttgtaaaccartgcattcacttatcctctttggctatttttaaaactttaaactgaaattacttcctcaaagaaaatttggaacagttttaattgtttgaacattttgaaaaaaaatgtctagcagtgtagtttgcttcttgaagaagaaaaataaactgaaatattttaaaatgatacttcatgcttttcctttccaagtataagaacacaaaattttggacacagattcttttwtaagttccaggagctttggttgcattagcaacatggtttttgtttatttgtttattttattttgcttaacttggtctccaagggtgctaatatacttatagcaaccacaaggaaaatagagtaatattacttccttggagaggtagttctcattttttacctttttcatcatttaataaactaaagtggggaaaaagtattgtagtacagtatgacgaggaaattagagtagtctttaatatcatagtgactttttcagatagatcttatttttttaagtttttttctcttcttttaagttaatctaattcttggcaatggaaactagtgttcattagccccatctggcttagtcttaacgatttctaagggtgagtggggatgagaattgccattggtgttagagtaatttcagggacaaattaacatattcctgatctataacatatgcaagaattccgtgaactgcagagttcctccaataaaccagtgtccatgtctccaatatcatgtacattacatctctatctctcaaagctgaatagaggtgtaggargtaaagacaacaaataaagaccctttttaaaattttactcttttatcagccagactaaaatgtaagggaacctatttttgagattgtagttgataattttttaataagtaaaacttagttaaatgaagatcgccagaggatgaatatttttattttgccctcaattctatgtaatgccaagctgcagctcatggccacaaatcatacatgtacatctataataatgataaaaaaaaagccaagttttcttggccacttcatctgtgttgggtgcgatgctaattactttatcaaaatcaggatatttaattctctcaggagtacaaataaacattcttgttttccacaatcttgagttgaagaaactgcttctccaaaatattaattaatttgcccaaggatatacaataataagtagggaagactttgcattcaagctgtgcaaattcagaatctgtcctcttaactattagaataaccatcaagtctgttgaaaaatatagttagcctccaagtcttcccccagctactgcagactgtttctgacagtgctgtctcattggcttaggaaaacgtccttctttatctccaacctctcctgtgctccacactggatgctggtcatcatgagagtgctattccattgggcttagctttcctgggatttccatcagtttaggatgaaacaamccctggaccaggccctcctccttaattcccacattgcacaaaggaaagtggtgcaaaagcttttttgtctgtgtttaaatatcatcaacaatcccaactgagctgtgtttttataccaaatcctactaatttatttacaatttcttcttcagttgactgaaaaacaaaacaaaacaaaacaaactaggcctgtacatttgctgaagtttttgactactgtgatgtccattttcctgtgaaaaatgttcagacaagaacacacatatatatttacttaaaaaaaagcaatcgtatacaggtaaactgaattgttagtgcatactttgtacaaaggaaatattatcttaagaatattattattataatatattggtttracgcatcagctcagaaatctcctacttaaaagcagtgcggccaatgataaactgaaattcccctaagctttggtttcttcatctatccaatgtctgtaaaaactgtggagggatagtgtcatgattaaatgaggcattttatttaaagcctcagtaaaatgccctacactcagtaagccttagttattagaggtactggtagttaaagatagtcatactcaatttacatttagaaaacaaaacagttaagttttcagtcagaatttcgtgttacattgtttttggtttttctccaaaaacaatgaatacttgttttcaatatgatatgctcaactgtgttggttttccagcacaaagggacagtctgcgttagacataaaattaagttccagtcttagatgttaaaaattgttagcattttgaagttctttcaaactattaacaaaaatcttactttcagctagaatatatcttcctcccccaatacatacaaaaacatacacataaatttagacctaatttggatgaaaaataacatccctattgatatttattttctcatgtctctctttttttttctttcaagcatgtaaaaactatcatcctcatatctttctaacatgggtatacaaatacctgtgttgctgtgctgtttaaagataaaatcaaaatggaccaacgtggaccaacacatgtcgttcctaccatgtcgtgattatataacaactattacttattatttttagtgtttgatattttaatgcaagaaacaacgcggtggctcacgcctgtaatcccagcactttgggaggccgaggcgggtggatcacgaggtcaggakatcgagaccatcctggctaacacggtgaaaccccgtctctactaaaaatacaaaaaattagccgggcgtggtggcaggcgcctgtagtcccagctactcgggaggctgaggcaggagaatggcgtgaacccgggaggcggagcttgcagtgagccgagatcgcgccactgcactccagcctgggcgacagagcgagactccgtctcaaaaaaaaaaaaaaaaaaaaaaagaaacaagggaataaggtttttgctttgtttctgtatacccaatacctaaaacagcatatacttataataattagtaagtatttgttgaatgaatggatgaataatgaatttgttcatttatttttagttttgtcaataatatctgatttttaaataatctacagcwaatcaaattaatgggaaacttgcattaaaaaactgtaaagtgtattttatttttaaataccctctcagtgctatgaatttttaatacagtaaccctgaatttgtagtgaaaattgctctctcacaaacacacatatactcatatatacagacatatacctttacgcctaccaatttatacatataaactttgtgaactgcatggaattttttctatgttctcttctaattttggtgttctcctttatttactcactgtgtatgctttgagaatagtttttaatctatgaatttgttagaagtcagttttcattcatgaattagtatgaaattcaaaggttatgacatgcctctgcaataatacttaagtatacttagaaaatatttaaattaggccaggcatggtgsctcacgcctgtaatcccagcactttgggaggctaaggtgagtggatcacgaggtcaggagatcgagaccattgtggctaacagtgaaaccccatctctactaaaaaatacaaaaaattaaccgggcatggtggcacgcacctgtagtcccagctactcaggaggctgaggcaggacaatcagctgaacctgtgagacggaggttgcagtgagccgagattgcgccactgcactccagactgggtgacagagcgagactttgtctcaaaaaaawaaataaataaataaattattttgccaacatctgaaaattakgtaatatcattggagtcattgtaaagtctctgatcacagaggctaagtttctgttttataatgacatatatccagtgcctatttgtcgaaagaataaatgactagttaaataagtgaatgaataattaaaagagcaaatgaaaagtactgaaagaaatacactgacacagaaatacatgattgattagaggagctgggaacatcaagttagcaaataaataattttacttcttttcataatttccaagaaaagtataaatcttaaatttaaataagtaagtcatagttaggaacatactgttctatcttgccacctccagaattatagtttgaaaatgactacaactgtgagatatatagctaaatgagctatagaaatagagaagaaattgaatttctctagtttatttactcaaacaaggagtaaatagctttggaaatgaaaactgtcttgaaacagatctattttccatttgggattgttttctaaatcagcttcagttttagcctgtcatttccagattgatattagatttcagttcattagctttacttaataatttgcataatctgggctgagttgaaagttctggggtgtgtgtgtgtgtgtgtgtgtgtgtgtgaatgctttggtatttttaattatcttgtggtgaagtctttctgttgatctcttgatgagaatgtgcagaaagatgttcgattgatataagtatcttgtagggcacataaaacacaaaccagataacaaattcagctaaagtatttcgaaaaagaataaacaataytcaaaaatgatgcagttaaaaacacacctaaaaaacactgtcataataagcatgcctttccttggttccgtactcttgtcttaccacaacacttacaatatagtatgagatcaacatatgtgttgaattttatttaatttcaaagtacttatgattcacaattttaatacacttttgaaagaaaatataattatttgtgactaaggggtgctggtagagacatttaaaaaataaatgggctaatagaccatgttatatgattataatatttaatattgtaaagatgtcacatttccaaaaatttgtgtattgatttaaagaattttaaattaatatcacaatatgtttttgatttgtgtgtgaaaagtgattggcttattctaagattttatatgaaagtacaaagagtcaataaaagccaaaaatctcttgaggtagaacaataatttgaacatatttgccctaccagccagcatgagatttaaggaagtgtggtactggcatacaaattgaggatatagacttcaatatgaatatagataatgaaagagaattaagagccaatatatagatacaagtatatgtagagacttgatagataatagaggtggttcttatgagatgttgggaaagggtaggctttacaataaatgattctagaaatattaaaaaatgtaactagatgcaaatctcaaaaactgtacaaaaacgaattctacataaagatctaaataaagaaacaaaatctatataatattaggaaataaaaaaggtgaatatctttatgaccttgggttaggaaaaaaatttcttaaccagacataagaattattatctataagggggaaaatggtaaattcatctaccttaaaattgaaaaattctgtttagcaagaaatcacaggtgtacagctatgaattatatataactaaaaatctgcagaataccaattactaaatattatcattattctgcatgtctgggagtacagtagatgggccagtggatgttgggtgaggaataaaatgacatagatatttctaaataattatatatttcatgaaatttattttaattacattatatttgcaaaattactarttacattgttgaaataaaattgtaatagcgttaagctttattactaataatgatctaaaggattaaaagcatgattattttccaaattttaaaaaattagctatattttttcatcaaaaatttaaatttcatacagtgaaatttgtttacatatgaaattagtttacacatgtttaaaataatatagtccttaaaatatttcaattatttattcaattaaaaataccaattatgtatttcaaaattttcaataaaaattatcttaataaagctgaacatgcttaatattcttgaagattttattaaatctgattaaatattttcaagtgtaaaatctgtttgcaattcaaatgtttagtgtccatctcattgtcagtgtaaagatatacttcacacatactaccaatagacactcacatgtacataaatttaagattcaggtccattatttaatactgtaagatcattcttagcctgcatcttgggcatactgcacaactttttgaatacctagaaacaacaaattggaacatagaacaaagaataaaagtgcatkctggagcattgctggaaaataatgctgcattatgtaagaatctattgcattattgctacttgaaaggaagatttgactatttggttaatttgtttcttcttttacctaaatgctttatctattcaaacactttatgaacttaraagcagtgtctgactcacacaagtcttgaaggcattcaaaattaactaccttttgtttcgagaagttaaggcaagatatgagaagtatttccctggggcctgttgatgttacttatgagagtggatgtttaaagttaggagttgcactatatcagctgtgaatgtagatcctggttgagaattgcccataatttatctaacaaatattttatgtgagtatttgtgatatgaagggcctcctgatgtgtgaagttatagtttgtattgccctaagatccaggcaagaaatgcttctgcagacctataaagatgactataaactataccttcccctccatcaacacattcctttgtgtttgctggagttgatggggttgtagaatgcattcatattacaatacgatatgtgtttctgtactctcctgccatgagtttgagtgaattttcagagtgggtcgtagaaatattcctggaagccatttctacatcattcattgaaattactgtcaaccacataagtagaactcactaaacctaaacttaatgcattcccaaatttacttcctctaagccagattctgtcaaaaacaacmccttctgtccaatttttgcatgatagatacatcaacattttaaaagctctgaaatattatataaaagattcaaaagataaacccaaatacaaacaagatttcaaaaatttagtcaaactattgataaggcccagaaatgccattttagttgaaatgttctaaattcaaataacacaaaggaaaatttgtagaaataaaaattgatgtatatcaaatatattatctttcatcatctttacttttattggttaaataacagagtactgacattaatgtcatagattatgaaatataatttataaagatgaatgataaaatcaacaaaaagttatctgcaagccaattgtaataaaatatcagactatatcaaagcaggaatttatttggagaaagagttaaatattaacataaataatggatacattttgaatgtttgatagtcagtgacaaggaatgtgacttaggaggacatgagaaaaatatctagatttcttgctaatttgacaccaaacacaaatatcaatgaaataacacaaagaaaaatctgccactctaaggagtcattratatcaaactagttagagaataatcaattctaaggatgcttaagattagacatagcagaagacagcttcaaatgttctgatatttttcagctcatttatgacagaacttggtagagaggttttatataacattgtgaattataaaatgaagatgaaatatatttttctgcagtatgttataaaataatacatattaaaaataaaaagtaaatagttttcattatttaacaaataagataaatacataacaaaaataaacactaatggaaacaagttttaatcaactattttagaaaaaactcaattgccttttaattatctcagtacaaaatttggaaaatcatttttgaaggaaaagccaagaagaatgctgttgcaaaaatgtaataaaatatactattgaaatctgttgtcaattgtgttctgtctctcactttttaattttattttcagtttcagggtaaatgtgcaggatgtgcagttttggtacataggtaaacatgtgccatggtggtttgtcacacctgtcaacccatcacctaaatattaagcccagcattcattagctattttttctgatgctctccctccccacatcccccsttcctgctgataagactcatgtgtcattcccctcyctgtgtccatgtattctcattgttcagcttccacttgtgagtgagaacaagtggtgttcggttttctgttcctgccttggtttactaaggatgatggcttccagctccatccatgtcccagcaaaggatgttagctcattcctttgtattgctgcatagtattccatgatgtatatgtaccacattttctttatccagtctatcattgatggcatttgcgttgattccatgtcttttctgttgtgaatagtgctgcaatgaacatatgcatgcatgtgtctttataataggatgatttatatttctttgagtatatacccagtaatgggattgctgggtcaaatagtgttttttgtcctaggtctctgaggaatcgtcacaatgtcttccacaatgtttcaactaatttacatttccatcaactgtgtaaaagcattactatctttccatagcctcgccagcatcttttgtttcttgactttttaatgattgccattctgactggcgtgagacgatatctcattgtagtttagatttgcatttttctaatgatcagtgatattgagcttttcttcatatgttttttggccacatgaacatctttttttgagaagtatctgttcatgtcctttgctcactttttaatgggttcattgatgagatataattaaactaagtatcttctgcacagcaaaataaattattatcagagcaacagacaacctacagaatgggaaaaaatttttgcaacctatccatctgagaaaggtctaatatccagagtctatacgaaacttaaacaaatgtacaagagaaaaaataaatgaccccaatatcataaagcatttcccctatgttttctactagtagttttatatttttggggtcctaaatttaagtctttaatccattttgagctgattttgtatatggtaaaagataagagcttagttttgttcttctgtatgtggatatccagttttcccagtgctgtttattgaagagactgtacttttccaaatgccttatgactttggtttggtcaagaattcaaaagcacagacaacaaaaacaaatcaacaacttaagttacatgaaactagaagacatgggtatccaagtctcttctacagcagtggaaatagtcaagagaataaggagacaacctacagaatgagagtaaatgtctgcaaactgcacttgtgacaaggggttaatatccagaaaatataaggaactcaactgaactcaatagcaaaaaacaaagcaaaacaaaacaatctaattaaaaattgagcaaaggatctggaaagagttttcccaaaagaaacaccatatacaatcatatacaaatcactaacaagtatatgaaaaaatgttcggcatcactaatcatcagggaaattcagtcaaaactacaattagataccacttcacctcagaatggttattatctaaaagacaaaaaatgacaactgctggtatggatgcagagaaaggagaacacttacatactgttactcagaatctaaattagtacagccattatgaaaaacagaatgtaagtctctcaaaaaattagaaatacagctatgggatcatccatcatttccactattgggtatacatccaaaggaaaagaaatcagtgttaaagatatctgcactcccatgtttattgcaacaccattcacaatagccaagatttagaatcaacctaactgtccatcagtggatgaatgggtaaagaaaatgtgttatacatacacagtgggatactattcagccattcaaaaaatgaaatattgtcatttgcaaaatcatgaatgaatctggaagataaagtgaaacaagccagtcacagaaagacaaatactgcatgatctcactcatatgtgaaatctaaagaagttgatctcatagacatagtgtttgccagaggctagggagtgtagaggggaaggaatcaataaagagacgttcgtcaatggctacaaagttacagttagatagacagaataacttctgttctattgcacagacgggtgactatgattaactatattgtattgcacatttcaaaatagctagaagagaggattttgaaagttgtattagtccattctcacactgctataacatccctttactgggtatatacccaaaggattataaatcatgctgctataaagacacatgtacacgtatgtttattgtggcactattcacaatagcaaagacttggaaccaacccaaatgtccaacaatgatagactggattaagaaaatgtggcacatatacaccatggaatactatacagccataaaaaatgatgagttcatgtcctttgtagggacatggatgaagctggaaaccatcattctcagcaaactatcacaaggacaaaaaaccaaacaccgcatgttctcactcatagatgggaattgaacaatgagaacacttggacacaggaaggggaacatcacacaccagggcctgttgtggagtggggggaggcaggagggatagcattaggagatatgcctaatgtaaatgacgagttaatgggtgcagcacaccaacttggcacatgtatacatgtgtaacaaacctgcacattgtgcacatgtatcctaaaacttaaagtataataataaaaaargaaagaaatacctgagactggataatttataaaggaaagaggtttaattgactcacagtttcacatggttgaaaggtctcagaaaactataatcatggcagaaggcaaaggggcagcaaggaccttcttcacatgtcggcaggagagagaagcatgaggagcaargcaggaagaacctcttataaaaccatcagatctcatgataactcactcactatcacaagaacagcatgggagaactgcccccatgatccagttacctcccatcaggtctctccctagacatgtggggattatggggattagaattcaagatgagatttgactggggacacaaagcctaagcatataaaatgttctcaccacaaagaaatgataaatgtataaagtgttggataggctaatactctcattttattattacactatatatgtgtatcaaagcagctcactgtactccataaatatctacaatttgtatgttaattaaataaataaataccaaaaacatggagaaagtttgcaaagtgggaggcaagtgtcagatctcttttctaccaatgtcattttatraaacttttttttatctcttaggctatatgaatgattgcataacatattgagatagtgttgaagttggtttgactttaaacagctgaggtaaaattacatgagttactaccacactatatttttgtgttttgaaagaattactgtagatttctaaaacaacttactaacctactaccagcaggaacttgcatactggaataattagattatttcatgtaagtatttcaaaatgttttataacatctctgaaacgctagactttttgagtttttatagttaattttaataattcagaggtatccaaattataacaaattgtgagactttatctcaattttgttattgtagagaactttaaaaatatttttataagaaaacttaatacataaatataactttaaaaatatattggcatatgccaagaagtgctactcaataaaaaatctctaaaayaaaatgagaaaaccagccacagtccccaaatttggctttaacctttgttttctcattcatgcatctactagtacagcagattcttatatccctgattttcctcccccttcaccatatggctgatcatctgttataggataatacagaatgttccagagtctacaggggagatgtctttgctgtagaacacactgcccaaatctcaacaaacctggacgaaatggctcttcctgtgtaaatcacacttttctctcctaaaaaaaaaaatctaaattcattctactttgttctgttcactagaataaaagcacccttctttctgccaaggtacttggccaatttcaagcttctatgatgtgtatataggctagcatcttattctttctttagcttttctcatgtgattgagagattagttaaaagcccakggaggatgctttcaaaatacaaaacaatctgctgttttgcccataatgaactaaatagcaaatgcttataatacttttacacacgtcagtgtgaaattgagcaagaaacaaaagtctaacccataaaagatttggaatattttcaaattgagtgtatgagcattttcagcaaccaatatatatttgtaagttttggggggttttgtttgagttaggtagaaagcaatcttgagtataatcagtgtaaggacagcatgggaaagcrttttatttatcacccagaattgaatagtcaaacaacaataaaaacaaccaaaatttaaaatgacttctgagcatgtcttaagttggagcattttcacggtggagccgacctttatatgtgatgtcactaggtaagcatatgttgttaattaaattataataaattatttaatgtattcagttttacagacaactgaagaacattcagcagtgaaataaaaagctgtatttaattcactggcgtgaaaattgttgatgtaaaataaaacaaaacataaaagactcatatccacatggaaaattaatggaaaattagcttagaaagggattttgcaatattttagctgtgctaaaaagaagacaaaaacatctcaatatgctgaagaacttttgaaaacttaaatttaagttagaaatcaaaacagtcttgagcaatttgaaggaatgcctactatagctgtattctttatgaatcattgtaaaaataagaaagatataataatactagatatgcattgatatatgttgtaagacatagatatacattrtaaaaatatgatagagataatactagaaataaagtgtcaaattattagaagcattctagaatttttaattgactttataattacaaaaaatgctacttttttcaatgacagttttcaaggaacagagaaccatggacaataaacaatgggggatgttgcatatttccaacgccatttcctctccagaatttatcattattagcagtttgatgatgaccgttttttctccttccattttatctggatccttaaattttcagatggaagaataacaaacaatccattttaagctggtaaaagttaagttgatggcaagcttctctcacttttttcttccagtacaagtttcttgaaattgtcttgctcagaytttagtccttcagatatacatatttttttacctcatgcagtctattcttttcaagagaattaatgacattttaattactaaatgttcagtgctggtttccacctccctttcacatcracacggctgactagtgacctttcttgctttctctccttcattctgcatgataataggctytcttggctttcttcctacttctacctacttatctgtctcttttgctggcttgtccaactctaatatattcttcctttttctttattagtctacccattctccttgagtaatacaatkaatgcctcaggtttccaccaaaatccatgtttataactgctttagaatgcttcattcaaatgcttccatcttgsatgattccaactatccacttttccatgtctagagccaggtggccaagagcttcaagagacaaagcacaacaggcagattgacattgctataaattaatgcttgccaatctcatttgaacctcatcttatctacaaatcctatagatattttgtctattctgatcatgttgactccttgcaattacaatttcaaaccttctccacagtcttcaaacttcctgttcgtgcgttcccctttcatgtttgacagatggccttgtctcttaatttacagattaaaaacaacagcaaacagcaatattctcaataaaatctagcacttataatatattctgcattcttccagttccaatagaggaattgttgttcctcctatccaaagcccatgtttccagcttactctggtcctgatttttggtctcaaaaatcttactttattcattatatttttatatgtcatgtgtgttttactacttaaagtggatccttctcaaaatattttaaacatgcacaagtctccctcacttaaacaaaatttcctttagatgtaagctatctcattgtctttctccttttattttatagtcaaacttcatagaagaaaagatactaccctcatttcctctcttcctgttttatgttttcaattaagtctcgtatctgcctccattcagtgctaccctgcttttaaactcatctccagattttattgattctacttcctagatatctttctcttctgttcacttctctcattttttactatcatcatagttaaagcttccattatccttcaccttaatcacaataacagccctcaactggtgcacctacatccatttttgcttatctgtatttcagtgtctgtagtgcagggtatactaaaatgcaaatttgaacttctcatgcacagacttcagtctcacctctttatgcaccccttgcaccctctgcttaatataagtagatatctcactattttttaacgataaataacatacatttaacatagtttgcaaacaatttcagggtccaatatcctactatacttccatatttttcttgtgccactcttgttctctgggttacagcgaaaaaaatcatttacttccacaagactccaaaaatgctcctactttaggacctctgcttattctctaccctttgtctcagatatctcttctcccaccttacaacttctgttcatcttttatatctcaagcttttcaaatattctgcactcattgaaaattccttgacagcttccagtaatgttttttcatactttcaaacatatgtttgtgttactatttaagtgttttccttcttgaatatgtgagccccaaaaggtcagagactgtttctagttttgttcaccattgtactccctgtgtcaagtacaatacctggcacaaactatttaataaatattaaatgaattaatagatgccaccatgcatttgtgcattggatccaggtttttattgactctcctttcatttatatttcttttttactgttttatttattttttaaagttttatgcaaagcatattcattacagtactatttataatagtcaaacaaaatatatatcaaaaaatatgggaagattaaattgtggtagatttatacttaaagtcataaaatatgcatataaaactattgaaaaaataccagaaaattcgactgtgattatctctggactgtggcrttataagtgcttcttattatttatttttcagctttattaaggtataattggcaaatattttttatatttacagtatataacatgatgtttgatataygtatacattgtaaaatacttactacaatcaagctaataaacatatacattacttcacatagttattattttcatgtgtgtgctgagaagttatgatttctctcttagcaaatttgaaagatacaatacaatatcattaattatagccaccatgctgcacattagatctccagaacttctttatgctacctaaatgaaactttgtacaccttgaccagcattttcccatttcccccacccatgactcccttttaaattttatattgatgtacatatcaaacttttaaaaaatctgtctaaataacattaatatgtagttcaggaaatactctgtcctttaaaagatgccttgttgtatgtactgttcctacacagagtcctgcaacaatttagtcagataacaaattggtgtaatctctctgtacacttactttttgaaatacatcgcaattaattcctttttcttttgggagttcggagatcatagattttggatatttcaacrtctttactgattctatcactgtttaaagaatttaactaagtgacctaaacatgctccttcggacagcyaacaacaaataagaatttcttgatttgcttcaaaattaaaatcgctattttctctattatagtataatagttatacgtttagtaaatgcttgttgattaatgtctagtaacaaataagttttataaatttaagggtctgttacttactattacgctaagaagatcctcctactactattaaattttctagttggggaaaaaaaagaaaatatgtacattaacagagactaataattacttttgcttttcaaccactatggaggtagtttttaagtttacactcatatcaccaaagtaaaatgatgcttccaggttcaaataactcaatgctaatttcacttaccatacgctatgatacaaagtccaagagcaggacaatctaagttctgatttcacttctctgctattgttttttctaaacccttttatgcgggttggcttcatcttaatagctattagcatgatggttatagtaatctgatatcacacatacacaacaaaagttttcagagggagaaaagagttgccttattttgtgcctctccctaagaacctgggcatggtctcctctctccttaatgagaactgtagcacttgcccgttcttaaaccagtcactggcaaggaaaaggggactgccattttttgtcttgggcaagtcagatcatactccctgggagtgggtaagagatatggtttgtagcacagcatattggaggatattagatatctgcacaaaaatcagtcattgcatagaaaggagcaagtagaggatgttgagtggtcagtcaagaattatttgttatgaccagcatgaattcactcattaattcttcatggaggacctactctcttgtgttttaagtgctgtgatgagtcagtgcatgaatgcacaccaaagggcccagtcaccaccggagggatcaaaaaagactttcccaaaagaagcactgccttgactgagacctaaattctaagtaggagttaaaggaacatagagttgataaagaatgctatagacataaaacacaatgagaaagaagattctgccaagcctgacatttatttcttcagttagtaaaaatatctattgcatgcctaytgtgtgctaggtcagattccagtcttgagattagaatccctgccatttaggatttacagtgagagaaacagtcaatcaacaggtaaataaaaaataatataatgtcaattagtaatgaatgccatgaagaagaagcaggcaaagagccaaagagcaatgggaggtgacactttacatctattcttttcaagcattgacatgcacatgaatcacctggcatattactaatatgtagattttgattcagtaggtctaggataagatctgtgataaattctttatttttaataagctcctgggccatgtcaatgctactagctcataaatcccacttgtgttgtgaggatttagagtgagagttgaacagagacctcagtgaaatgaaagagtgtgctcttgctggggaaggaaattccacaggagagggttayatgcaaaagctcaacatagaaactgacccagaaggtcagtgttgctggacacaatgagtgaggggggaaatggtagtaaactaagtcagaggggtctccagcagtcagatcatgaggaatttataggtcacgttatggattttcaatgacttactgtgatgagaggtccttgcagggrtgaaagtatattggtcggagttctccggggaaacagaaccaatagattgtgtgtgtgtgtgtgtgtgtgtgtgtgtgtgtgtgtgtgtgtgtgtataggtgggtgcgtgtatgtgtgtgtgtgggtgtaggtgggtggagagagaaaaatttattttaagggattgacttgtacaatttcggagactggcaagcccagaatatgcagggtaggctggtagcctaagacccagggaagagttgatgttgcagctccagtgtgaaggcaggcttttggccaaaatttctcttccttggggatgtcagtcatttttctagagccttcaatttattggatgaggctcattcacatcatggagggttatctgttttactcaagtgtactgatttaaaaactaacctcaatttaaaaataaattcacagcaacatccagacatgtttagccaaatatctgagtactgtggcataaaattaaccatcacaaaggacatgtagatatgttgtctcattgtactatctccattcaataaattttgttcacatctataatgtatttgggtgaaactatatgatttctaatattcctttcagttttaraatctcacaattctgtgggatccctatcagataatctcttggaccatgtgcagattgaacaaaattctggttaggaaccacactaatgcccagtgatgttctgagtatccatctgatgtttcctttcccatcaggagatggcaagtcaccagggtcttgtagcaggtcagtccagaatgcacaggatgtgcttcctgagtctgattctcaaccagtagaccagtgacatgagatttggctgtaaaaattaacttgcctcagcattgcagaggcaaggaagtaaaaatttgccctcatgtacagtaagattgaaaaacacgcttcagtgcaggtcttaaccagattctcactgcaatgtatcctaatgggactttctaatgtgatatagaaattttatggcatgggtcaaagtgctgggtaatttctgaaagatagacctaatgtattttgtcacatcaaaagtgatcctaagtctgaacactgattcaaacatttgaaaattttataaccaactacaagtctcagaagagattttcttccctttaaggacactcacagtgatcccccaagagggatatttcatggtgtaccactcattaggtttggtgatcagtcactgttacactaaatcttaaaatgagttgtcacacactatgttctatgtgtggttaagttttacaatgtatctattgggacattttgttagctyctaacaggcaatttatttgtggtatagctgtagctttaaaatctgttttaatcattaggcagtctcttgtttctgaaattttgctatcatttgtctatgtccgcaccctatttcatttactctcattactaattaccatatggaactaaggaagaaaatcagcattaccactttacaagttcatatttgtaatctagctgaatagagagcttatgtttaaaagttgagatcttatttttttttaatgaggctggccgccaacttcagaaaaattctccattccaattagcctrtragagacaaattgttaattccagtttaataatcttattttcctgaggtgtttttgtttttttttttattttttgagacagtctcactccgtcacacaggctgaagtgcagtggcatgatctcagctaactgcaacctctgtctcctaggttcaagtgattcttatacttcagccttccaagtagctggaattacaggcaygcaccaccacacccagctaatttttgtatttttagtagagatggggtttcaccatgttggccaggctggtctcgaactcctgacctctagtgatccacccayctctacctcacaaagtgctgsgattataggtgtgagcctccgtgcccaaccctattttgctgtttgacagaaaatttttgattttgtaactgcctgagatacagttgctccctgtggaggaggaaatagcaactatgtcaagggaataaagactcacagaaagaagcaagtatgagtgacaatattgtggaaaagattgagttgatccagtagcattaaacctagcaggaggaagagtagttgctgaataacaactacatttagattctttagttgaaaaawttagacttattatgatcttactggaaataattttagttgaaattttccattgtaaaataatacatgttcattggaaaaaactgaaacaaagtttaaagttccctagggatttatttcatggaattttgcctaacgaacatactttccctttcccgtaactcttgggagtatctaaaatagacatattaataaagtcatttaatttaaaaagtaataagtaagttttaatcaaatgccaacaatacaatttgtagatggaacctgagtggtcctgwgaccaagctattaaatatccattcctcttccctactgtctttgaaacttgtttctttcttacgcttatttgtaaaaaaaaaaaaaaaattggaaagtgactgctccctctgttcagaccacatggtttgcctcttttgccagarcatcgttctctgttctgactttaagctctcccaaagcctacattagacctatttttgacgaggctgcagcaagggagggaatggctgattctcctgatctgccctatcagtataggggattatttcatttctttccagawtagagggtatacatgagtctcataacttttgtagcttactttagtcatggaaatgatttttcatatattattgtttttctggtaatttctatgcagttttactggtaaagttttctgcatgttattctactgacaacttagcccagagtgatctatttgggaagtttctcaattttgttttagtctgttggcattgctataaaggaatatgtgagagcgtgtaattgataaagaaagaggtttaattagctgataattctgcaggctgtacaagaagcatggcactgatatctgcatttggtgagggcctcaggctgcccccacttgtggaggaaggtgaaggggagcaggcatcacatggtttcagaaagggagagagatgccagcctctttttaacaatccrttctcaaaggaactaatagagcaagagctcagtctttactttgagaagggcaccaggccattcatgaaggttctgcccccatgactcaacacctcccacaaggcccaacctccaacattggacatcaaatttcaacaagagatttttcagtggataaatagctaaactcggtcaaatttgaaagaatatcatttcgactatatcatttagaagtaatagcaatgcagaaaagaagatgaacatggaagctaaaagaattttgataggaaatatcaatttaataaactgcctatcgttcattcctcctccaagaatgtaaatgaattatttcattttgaactttaattttagaaaactatccttaaaaacacttcagaaaataaaaaggtttataggagataaatgttacttttaagttaaaaaatatcacttaaatttataatgatactgtgaactgagacagttcatatcctgattcttccatttcaagttatgtgataccttgatgatactactccatcattaaatatcagtttcctcataaatgaaatatactattagtatctatattataaagttgttttgacaatgaaatgmaataatttgtgtaagattgtaagatgcttaacatatacactgggagctaataagtcctcaagaaatgttgtattattatttttagtatcattgtcaggtaaatgctgacttgatattgaactatattcctatgacaaaataggtaataaagagaggaaagaatgatattaataaatggaataggaagaagatgaaggaatgcaagtatgtaggcaaactaattagattaaaattataatgatattacttgtgggagggaaatggcaggcaattttatacactaagaataaaaaaaggttattgaaatccatatgtaaaggtaaaagactccaaattaatctgtgcttccaagaaaaagcaaactaaatcttatgaagaattgtgtaacatgatattgaatcctcttttccaccccaactttaagtcttttcctgtcaataagtagcatgtgaaaccattttgccccatttctgctcctttataagtacattttctgagggataaaaaggttatctatatggagggaatttatataaaataagcctttatctttttctagaattaataattggagacacatggctgggcgtggtggctcatgcctgtaatcctggcactttggggggacgaggtgggtggatcacaaggtaggagtttgagaccagcctggccaacatgatgaaacctgtctctaccaaaaatatagaaaattagccgggtgtggtggcacgcacctgtaatcccagctactcaggaggctgaggcaggagaattgcttgaacctgggaggcggaggttgcagtgagccaagatcacaccactgtactccagcctgggtgacagaaggagactccatctcaaaaaaaaaaaaaaaattggagatatacaaggatattacytcagcagtagaaggaagagaagagcactctttgaaatgaggaaatatttgcagtacttttgaaatattactaatatattccacttgatatatatatatatatatacatatatatataacgtgagtgcaaactgaagctctacatgtgaaataatgatatctccttattatataagatgctgattataagcaccgacacctaataatcccttaagaagtgtcctgccaagagtcttattgacgcactacccaagaagcagggatggatccgaaactacttgagtcctcttctactcatcagttgttaatttcgtaggaaatatattacctaatcactcagaaacatacttccaattcactttttacttctttttattatgcaatttataatagctatgaataaatgaactgttttaaaataatatgctgcatgtaagtttctactgcccatgcaattcaaatatctgtaacttctttaccctgaggagtcacccttccctttcgggctcatctagcatggtctgactatccataactcatctattatgagtacacaatgctcagtctttatcagataccctccaaaaatgtttccagtgattcctggggaaatgcgcacatcctgcaagcatgtctactttgtacttgtattctcttgttccttccctcaactccaggctcctctaatgaccagtttttaccagactataattattttcccatgctacaacttctctgtcttcattacttcaaccataagtagagatcgaagcagactctaacattgaacacatttttgtgttttttcttttttcctaaaagactgagaaaaacttcaggaattaaaaaatctacaagaataatgttttaagccaataaccacaacagtagtctaaaacaagcctttattataaaaagtgaactttcttgagagaaaaaaaagatttgtgagttccaaggagccagagtttaaactataagtaataaagcaagaaagaatgcataatttgatttcagaatagtttttgcaccactcaggaagaagatgaaattttaactagttggtaagtgagagatgataccagagattttatgggattccatgctgcctaagcccttcagaaagtcctaatgctcagtcgctctatgggctgcagcatgggaagagaaaagtcatcagaaacactagagagaaaatgcaagaaagggacttgcagggatgtgcatgctatagaaagttaggaggggtaggagggcagggggaaaaaaccttctagaacaagcatggttccctggctttagattacccatagccaagaagtctaaaccaatataactcaagtgcagtccacccatcgcaacttacatgaactgttttattttttaactagttcattatcagaatgtgtcagaatataggtcaatgcaccagttaatttgtgaaaaaagtcttgctatcaggtaaagtagatggtatagtaagtgctgtacttaatttacattctggcacaagtttctcagcctgagggcagcattaaattaaactgtttaaaacaattggacagaagagygtgagtgaaggcttgctgtaccagctattaaactaagcataaaagccatcatgattaaaacagtatagtactgacacaaaaataatcaaatagatctatggaaaacagtacagaacrtataatcagatccatttggaataggaattttaggtagcattttggataattctagaaaaataatatatttgttttggcaattggctgtctattttggaagaaaaaaatgttagatctgtcatttacatcataacaaaaagtgagttccatttaaaataaagaaccaaaattttgtttcaataacaatataagaaattaaaaaaataaataaataattactaaatgcagtcattcattacatgatagtgtttaagtcaatgatggaacatatatatgacaatgatcccataagattataaaactttatttttactgtaccttttctatgttttcatatgtttaaatgcataaacacttaccctgtgttacagttgcctccagtatttagtacagcaacatgctatgcaggttttagcctagaagcaacaggctataccatccaggtttgtgtaagtacacactatgatgtttgcacaatgacaaaatcacctaacaacatatttctcagaatgtattcccaccattaagtgatgcatggctgttattttgtttttaaagaaaagaaaataaagtactggtgaggatgtcgagaaactgaaacccttgggtattgccagtgggaatgaaaaatagtacagccactgtaaaaagcatcatagattactrtctgatcagaaatcttacttctaggtatatgattgatcattgaataattcaggggttaggattgctgacccgtgtgcagtcgaaaatctgcatttaactttcaactccctcaaaacttagctacacatactcactgttgactggaatctttactcatagcagccatttaacacagattttgtatgttgtatgtattatatactgtgttcttaaagaaagctagagaaaagaaaatgttattaaaataataagaaagaacatatatgtactattcattaaatggaaatggactatcaaaagtcttcatctttgttgtcttcaggttgagtaggctaaggaggaggacaaagatgaggagctggtcttgctgtctctgggagaagatgaggaagtggaaggggaggcaggagggacaggaatggtcagtgtaagttttattgaaaatatctgcatataagtggactcatgcagttcagacccatgttgttcaagggccaactgtgtgagcaaaataattgaaagccaggacacaaaaagatatttgcacaccaatgttcacagcagcattatgtacaatatccaaaagattatcaccgcccaaatgctcttcacgggatgaatggttaaacaaaatatggcttatcatacaatggtctattattcagcttttaaaaagaataaaattctgattgcttcaacatgaataaacattgaagacattatgctaagtgaaataagccagacacaaaaggacaaatattgtctgattctactaataagacacacctagaatagttaaatccrtagaggcagaaaatagaatagtggtcaccaggatctggggaggggagaatggaaagttgttgcttaatgggtacagagttttagtttaggatgatgaaaaagttctgaagaggaatagaaatgatggttgtgaaacaatgtgaatgcacttaataccactgaattgtacacatccaaatgacttgcatgataaattttgtgttacgtatattttacctcaatagtcaaaagaaaatataagtttaacactttttaaaagtgaagaaattatattaaatgaaatacaaatctagaatttacaacacagtgatttcatttatggcgttgagtatatcaataattctttcctttttagagctgagtagtatgccatgatatgaatgtaccaaaatttgttcatacacctgttgaaagacatttggattgtttacagtttgtgtgattataatagagctattacaaacattgacatacaattgttttgtgtgatcaacatttttcactccctaaggtctctctaatcccaggagaggggtttctgggcttatgataaacatcttccctgcatrtctctagagaggctatttggccaaggcttaactacagctgatctaagttttggtaaaatgctmtgagatattcctggaacatgagagtgtgggaggctttgaagagcctaccccctctacctatcttccaaggaggcygccatgagacagttactcatcacttcatgggttttgaagaggcctgaggctctctgcctctctgttatttgggcacaactgcaaagtataaagctgcttatctgcaagatgcaattggatctgcagcagcaggttgctcccactactgatgatacatcatcacattactcgctatttttgtttcagtgtcatcctttgagataaggggcttgggtatctggcatttttgctcattttattttgctaagtaataaactgtctaaatataacataaacttttttttttaaccagtcaaatgtgtcaggctttgattgctagaactttggcttgttttcgtttttcagcaattatgaatggagctgtgtttatattcatgtacatatctttctgtgaacataaattttatttttctaaagtaaattcccaggaatagtattgctgaggcatatgggaagtgtaaacaagagagtgcccaacagcaatgtaggagtgttctagtcactgcacattctcaccagccttttgatattatcatgaatttttaaattgagttgtttgttttctttttattgagtttcgagagtgctttatatattctggatacaagttctgtgttagacatgtggtttgaaaatattttctccaattttgaagtttagcttttcattttcctaatagtgtcttttgtaaagcaaaagttttacattttgacaaaatctaactgatctgtttttaaattattgattgtgcttttgctattatctctaagaactcttagactaacaccaagttgtaaaggtttttttgttttgttttgttttttccattttttgagacagggtctcaatttgatgcctaggctggagtggggtggtacaatcaaagctcattccagacacgacgtcttgggctcaagagatcctcccacctcagcctcccaagtakctgggactaccagtgcatgccaccacacccagctaatttttaaaaaatttgtagagatgggttttcactatgttacccaggctggtcttgaacttctgggctcaagcagtcctcacacattggcctgccaaagtgctaggattacagacatgagccaccacccctggctgattttttcaaaaagttccatggcttttcatttcatatttacatcataatgttttttgagttaaattttggataaagtgaggtttaggtcaggttgttgttgttgttgttttgtttgtgttttttgtttgttttttgagatggagtcttgctctgttgcctaggctggagtgcagtggcgtgatctaggctcaccacaacttctgcctcccaggttcaaatgatccttctgcctcagcctcctgagtagctgggattacagtcatgtgccactatgcccagctaatttttcttagtagagacgggatttcaccatgttggccaggctggtctcaaactccaggtcaggttgttttaactgcatataaatgttcaggttttccaacatcatttgttgcaaagactgtcttttccccattggattattttgcacagaattcacttggccatatatttctagactatcttctgctttattgatcagctgatctataccacattgtcttgataacagtagctttacagtaaattttaaatttaggtagggtgattcctccaattttattcttctttttcaaaaccctttcagctatgataattcctttgaatttccatattaatcttcaaattggcttatctatatctataaagttctgctgggattttgtttggaatttcaataaatctaaatttgggaagaaatggcattttactatgttgagtctttcaatctatgaacatcatatgtctcaatttatttggccctttgatatcttttaatcagcatttgttgttttctgcatacagattctgcacattttgccagatttataccaaatttttgaggtgttgtaaatggtatttcttttaaactttcagtttatagttacattcatattgtgcagaaataaaattgttttgttgtatgttgatcttgtatcctgttgatgcagggcaggtgagccccaaaattggggcttagtccagaagggttcttgactttgctcagaagataattcaagagtgagctagtggtgaaagaaagcctatttattgaaktgtcagtgtaccgcagaatgacagctccttgtggagcagcactaacccagagcctgagcatccacagtagcagcatgtggactattggctagyagtatttatacccacttttaattacatgcatgttaaggagtgggttactcagaactctctagaaaayggccagtaacttctgggtgttgytgggcatttgtaaactgtcagggcactggtgggagtgtcttatgctgatgagcagtggggacacctagaggttggttctgttgtcatctactgattcttgctggtttcttcacttcatcctgttgagaccaggaataagtcctgctggtctcctacctcactataaccttgctrcactccattgggttgacgagtcttttgtggatttcttgggatttctatgtagatgatcatatcacttgtaaatagggacagttatatttcttcattttaagtttttatttcttatattttaaaattgttattgtagtagttagaatttctagcacaagattgaatgggagaagttagagtgaacrtccttgccttgttcccartcttaagagaaaagccaatattcttttatcattaagtatgatattagtcacaggtttttcttagatgttcttcaccaggttgaggatgttccttaccattcctactttgctgagaatttctatmatgaatgaacactgaattttacatatttttcctgaaaaaaagaaataattattacatttttcattagactattaatacagatttcattgatgccaaaatattggccagacttgtacccctagaataaatcccatttggttgtggtacagacwtacatacacacatgctaatatatgatgtttatatttttttatcctcttcctcctctcctccgccttttccccctttcttcccctcctccccctcctccccctcctctccctcctctcattcctctccttcctcctccttcatcttcatttttatactatctttggctttgatatcagtgtaatgctggtctcataaaatgaaatggaaagtgttacctcttctattttttggaggagattttgtagagttggcattacttctaaatgtttggtagaaactaacaatgacatcatcaccaaagatgacatttttgagaagatttaaattatgaattcaagtcccttcatggttttaaaaatattcagagyatatatttcttcttaattgaattttggtaatctgtgtctttaaagtrtttggttctttttatttaagaagtaaaattatggccataaaattgttctagttttctctcagtatcctcttaatgcctatgatgctatggtgataattccctatttcattcatattattgtaatttggctttctcctttttttctttgacaatcttgctagagtcttatcaattttagtggcatttaaaagacttttcagttttattgctgcaataataagttacagtcttagttgtttaaaataatacacatttattatcttacagttctgcagtctagaagtctagttacacaggactaaatcaaggtgtcagcaaggctgtgttccttcctagagactgtaggggggaatctatttccttttcccacttttgtgtgctccttggctcttggcctctttcctccatcatccaaaccaacaatggctggttgagttctcacaactcatcacgctgacctactcttctgcctctctctttcacctgtgatgactatggatccatccagataattcaggataagctccctatctttaggtccttagcttaatcacatctgcaaatccatttttgccatgtaaggtaacatattcacaggtcctgaggatgacaatctgggtatctttggagccattattctgcctactaaagtatctacaggtatttaatattatattaagaggctttgtttaccttctatggagaatgcttatattgttgttttatcaggcaatcaacatgcttaagttcagttgataattacatctagcatcctattgtctgtggttccaatgtcagttcaatttttaaagcatttgctgtgttattccaatgtgtccaatgttagtggttattagtctctgacctgagaggtggtctgttccttcgattaggctgattacattcagatccacataagcatggtttggagttgatgccaggggttcacaatcaacattgcagtgtcattttccctagcacttctttctccctcatcttcctacttctgatggttccctggccctggccggatctccagccaaaaagctggggctttagttacctggttctgctaaggactttcacaactgatgccaagtggcagtgtaattgcccaatgggtttatcttgtctgctgcccagaaaagctgctctactgagacagtgttattgcaatagagagtttaataaacatagagctagctaaacaagagaccagagttttattactcaagtcagcctccctgaaaatttggaggctcagtttttttttttttcttttttgagacagagtctccttctgtcgcccaggctgcagtacagtggcaygatctcggctcactgcaacctctgcctcccaggttcaagtgattctcctgcctatacttcccaagcagctgggactacaggtgcatgccgccacacctgacaatttttttttgtatttttagtagagacaaggtttcaccgtgttagccaggatggtctcaatctcctgaacccgtgatccgcctgcctcagcctctgaaagtgttgggattacaggcatgagccactgcacccagccagaggctcggatttttaagagtagtttggcagacacagggctaggggatggggaatgctgattagttgggtcagggatgaaattataggcagtcaaagcttatcttcttgcatggagtcagttcctgggggccgtgagatcaggtaagttggtttaccagtctgggtggcaccacctggtccatcagaaggcagggcctaaaaaatacctcaaaaatcaaccttaagttttacaataataatgttattcacaggaacagagaagttaggaatcttgtggcctctggctgcatgatttctgagaaataatttctaatcttgtggctactttgttagttttacaaaggaagtctgatctccaagcaatgaggggttttgtccaagaaggagctgttatcatctttgttccaaagttaggccataaactaagtttctcccgtagttagctaggcccacacccaggaatgtgcaagggcagcttgggggttagaagcaagatggagtcacttaggtcagatttatttcactgtcataatttttgtaaaggcaatttcaccaggaagacacaagagaaataaaagtaatataggttcatcccaccctcttggggtcacagatttattatcattactaggtttcaggctgccttgacaaaaagtctaatggaaaaaatacagtacacgaaataatataaatgggatatgaatagaatataaagaatgccaattgcacataaatatactaatatgaaatttctcaatgctactgaagttgaaaataaaaatatagaagaaatgtaactatcatacaaacccatcaggcaattacactgccacttggcctcagttgtgaaagtccttagcaaaactaggtaaccaaaggctttttggctggagaactggccagggaaccattcagaaataggaagatgagggagaagaaagtgctggggaaaatgagatgagagtgagtgagatgtgagtgcagttcaaatttggaagcagaatcagaaattttaaactatcctgtggaccatgcttatagataacatccttgaaagcatgaagagtttggccctgtcgggatgcttaggaagtaggagttagcatttgctttatgacatggtaaaaggattgaaagtttttggattggctagcagccaaaatttttatattttaatttttgagtagtttcttataaaartggataatcccaattttaactcacataattatgtatctaggagtccaaaaaatcagtcttgtcttaaagtcttsaaatacttaaaactacttgaaatacttaaaactaaaaatacttaatacttaacatacttaaaaacctttaaaaacttaaaactaatgatgaaaatattattttcattaattacccttatgttttacrcttgattaacaaattgcttcgaatctagaccatttttatatagcatctgaaagatacgtttttatttcctaacttgttttcttgccttctaaaacaggtctctcttatttctctctggtgttatattcatttgtctgtctcaatctctktatcccagctctccttatccataaaatggggataattataataacatttaccttattgtgttgttacatgattaaataaaatgacacgtgtcaagcataaaaagtgtcttgcacatagtaactgttcactaaatatttgttatagctacttacgtgatcatcttgtcttaactcacacaactamaactaccactattaatcattattgcaatcaagcattggttagatttacttaaagactatcacaygaaggcaattgccttcactatgtgaaggcatagtctttaagtgtatgtgagtgtatgtgtgtgtatgtgtgtgtacacgtgctattgaatccactcaaaagctatagatgatatctactattgttaagttccatttatattggaggcaactgagatatggaragaacaaatacctggcycatgatcacaattttggcaacygctaaaaccggaaaaatgtttgtagtcttatgttactttatcttcaaaaaagttagacttgtgtcwtgaagagtgagttggggttaaagtaattggrttaatcagaaatctttacaaatctatttcagcaacatttacttgaaaaagaagaaataataagttggagcaaagtaacatctctagcttgtgaggaaatgaggcagcattttaaatattgctacaacagggtctaaagtttagcacaattttcttctattgctagttcttcyttgagatgttatatcaatggagcaagatttttcttttaagtgtaaatattctagggaacattttcttacctattgtaaaatgcaatttcttgttatattctgtgatgttctttgatatcatccttatcttcttattcactgtgaaatgaatacaacgttatttctgaaaaagctgaaatgtaaaatgcttagtgttttgctgtatggtgaccccttaacatcagtatagtaaagtgaggtctaaagccttactatattatacaagggaaacagaacaacaaactgatatttatatagattagatttgctttcagtttacaggttatttctccmagctatatttatgttagtactccaaacaaagtgtttttattttctggaaaaaataccaaaactcttctagcatgtgacttaaacataactgcaaaatatcaaatgagaaaataaatttaaattacatgagtttctaaaaatggcttgtccttttcacatatttggctgggattttttagacaattatctggggtaagtggggatgttaactgctttcattactctctaaactgcagaatggaagttaggaatgatagaagatttcactttttgaaggtcagttaaaaaaataattattgaaacaattacctcaaaaaaaattatgaacttagactaagatctctgatggagaatatgataacttaattttattccccagtaggcaatctgaaaatcaaagccaatattatgttctattgataaatgaaacccattttgaagttagaattttcagtattttactgtcatttgtccatccagtatgtgcattttcatgtagaagatcaaaagaaatgcatgtattcttgctagaaaaatgtctgattaatattctttattatgtggtattattttaaaagatatattgccggactttgagtcattaaatggtttttctaagatgatggtgttctccagaatccagattttctggatgagtgccctttggtaatgcagtagttactaccttttgctgaaggttataatttatagaaggcaaaaaatcatagcctttcctggaattgaaaaagctttccaaaggcactcatttgaaatattttactaacattatttatgaagctaaaattaacaataaaaaagcatttttaatttcaagtattgaaatgccaaaaatcaaacaattggaaaacaaaatgacaatttgtttcatgtaattttgaccacattataatgtctgtaaaggatccarcaccgtgcctgtggtatttgacgtgttcgttcccttactcttctcccatcttgtttctttgttggttggcatctacatacattacagatttccartcagcaccaagaaacaccaaaaaatggataatgcagttttcagtgatttttcccgtaatctgtggattcagcactcaatgtagatgaatgtccccccagcacctttamtttstaatttatgtccctcatctctcattttgctcggcattttttcctcatttttttaagcattctcaytttattgggcatatattttctaggatttttacatttgctttttttatataattactccaatgggtgtcattatttcttcattactttctaatgactaaaatttctaattctaactttttaaaaatgtraactagtaaatctttcaaaaagaaagagacatatggatttactcttagccaatctcatctgattattgtgggttctgccaaatatgaggaatataaaagcagattaaatgagagtagatcaaaaggtcattaaagtttaattttatttatttatttattttttaattttattattattacactttaagttttagggtacatgtggacaatatgcaggtttgttacatatgtatacatgtgccatgttggtgtgctgcacccattaactcgtcatttaacatcagatatatctcctaatgctatcccaccccccttcccccaccccacaacagtccttgaagtgtgatgttccccttcctgtgtccgtgtgttctcattgttcaattcccacctatgagtgagaacatgcagtgtttggttttttgtccttgcgagagtttgctgagaatgatggtttccagtttcatccatgtccctacaaaggacatgaactcatcattttttatggctacatagtattccatggtgtatatgtgccacattttcttaatcmagtctatcgctgttggacatttgggttggttccaagtctttgctattgtgaatagtgccgcaataaacatatgtgtgcatgtgtctttatagcagcatgatttataatcctttgggtatatacccagtaatgggatggctgggtcaaatgatatttctagttctagatccctgtggaatcactacactgacttccacaatggttgaactagtttacagtcccaccaacagtgtaaaagtgttcctatttctccacatcctctccrgcacctgttgtttcctgactttttaatgattgccattctaactggtgtgagatggtatctcattgtggttttgatttgcatttctctgatggccagtgatgatgaacattttttcatgtgttttttggctgcataaatgtcttcttttgagaagtatctgctcatatccttcgcccactttttgatggggttgtttgtttttctcttgtaaatttgtttgagttcattgtagattctggatattagccctttgtcagatgagtaggttgcgaaaatattctcctattttgtaggttgcctgttcactctgatggtagcttcttttgctgtgcagaagctctttagtttaattrgaycccatttgtcaattttggcttttgttgccattgcttttggtgttttagacatgaagtmcttgcccatgcctatgtcctgaatggtaytgcctaggttttcttctaggatttttatggttttaggtctaacatgttaagtctttaatccatcttgaattaatttttgtataaggtgtaaggaagggatccagttttagctttctacatatcgctagccagttttcccagcaccatttattaaatagggaatgctttccccattgcttgtttttttcaggtttgtcaaagatcagakggttgtagatatgtggcattatttctgagggctctgttctgttccattgatctatatctctgttttggtaccagtaccatgctgttttggttactgtagccttgkagtatagtctgaagtcaggtagygtgatgcctccagctttcttcttttggcttaggattgacttggcgatgcgggctcttttttggttccatatgamctttaaagtagttttttccaattctgtgaagaaagtcattggtagcttgatgaggatggcatggaatctataaattacctggccagtatggccattttcacgatattgattcttcctacccatgagcatggaatattcttccatttgtttgtatcctcttttatttcattgagcagtggtttgtagttctccttgaagaggcccttcacatcccttgtaagttggattcctaggtattttattctctttgaagcaattgtgaatgggagttcactcatgatttggctctctgtttgtctgttattggtgtataagaatgcttgtgatttttgcacattgattttgtatcctgagactttgctgaagttgcttatcagcttaaggagattttgggctgagacratggggttttctagatatacaataatgtcatctgcaaasagggacaatttgacttcctcttttcctaattgaataccctttatttccttctgctgcctgattgccctggccagaacttccaacactatgttgaataggagtggtgagagagggcatccctgtcttgtgccagttttcaaagggaatgcttccagattttgcccattcagtatgatattggctgtgggtttgtcatagatagctcttattatttttagatacgtcccatcaatacgtaatttattgagagtttttagcatgwagggtttttgrattttgtcaaaggccttttctgcatctattgagataatcatgtgktttttgtctttggttctgtttatatgctggattacatttattgatttgtgaatgttaaaccagccttgcatcccagggatgaagcccacttgatcatggtggataaactttttgatgtgctgctggattcggtttgccagtattttattgaggatttttgcatcaatgttcatcaaggatattggtctaaaattaccttttttggttgtgtctctgccaggctttggtatcaggatgatgctggcctcataaaatgagttagggaggattccctctttttctattggttggaatagtttcagaaggaatggtaccagctcctctttgtatctttggtagaaatccgctgtgaatccatctggtcctggactttttttggtttgtargctattgattattgccacagtttcagagcctgttattagtctattcagagattcaactttttcctggtttagtcttgggagggtgtatgtgtcaaggaatttatccatttcttctagattttctagtttatttgcttagaggtgttaatagtattctctgatggtagtttgtatttctgtgggattggtagtgatatcscctttatcattttttattgcatctatttgattcttctctcttttcttccttcttagycttgatagcggtctatcaattttgttgatcttttcaaaaaaccagctcctggattcattaattttttgaaagtttttttatgtgtctatttccttcagttctgctctgattttagttatttcttgccttctgctagcttttgaatgtgtttgctcttgcttttctagttcttttaattgtgatgttagggtgtcaattttggatctttcctgctttctyttgtgggcatttagtgctataaattttcctctacacactgctttgaacgtgtcccagagattctggtatgttgtgtctttgttctcgttggtttcaaagaacatctttatttctgccttcattttgttatgtacccagtagtcattcaggagcargttgttccgtttccatgtagttgagcagttttgagtgagtttcttaatcctgccttctagtttgattgcactgtggtttgagagacagtttgttataatttctgttcttttacatttgctgaggagtrctttacttccaactatgtggtcaattttggaataggtgtggtgtggtgctgaaaaaaaatgtatattctgttgatttggggtggagagttctgtagatgtctattaggtctgcttggtgcagagctgagttcaattcctgggtatccttgttaactttctgtctcrttaatctgtctaatgttgacagtggggtgttaatgtctcccattattattgtgtgggagtctaagtctctttgtaggtcactmaggacttgctttatgaatctggktgctcctgtattgggtgcatgtatatttaggatagttagctcttcttgttgaattgattcctttaccattatgtaatggccttctttgtctcttttgatctttgttggtttagtctgttttatcagagactaggattgcgacccctgccttttyttgttttccatttgcttggtagatcttcctccatccttttattttgagcccatgcgtgtctctgcaygtgagatgggtttcctgaatacagcacactgatgggtcttgactctttatccaatttgccagtctgtgtcttttaattggagcatttagcccatttacatttaaagttaagtgttatgtgtgaatttggtcctgttcattatgatgttagctggttattttgctcgttagttgatgcagtttcttcctagccttgatggtctttacattttggtatgtttttgcagtggctggtaccggttgttgctttccatgtttagtgcttccttcaggagctcttttagggcaggcctggtggtgacaaaatctctcagcatttgcttgtctgtaaagtrttttatttmtccttcacttatgaagcttagtttggctggatatgaaattctgggttgaaaattcttttctttaagaatgtgaaatgttggcccccactctcttctggcttgtrgagtttttgccaagagatctactgttagtctgatggctttccctttgtgggtaacccaacctttctctctggctgcccttaccattttttccttcatttcaactttggtgaatctgacaattatgtgtcttggagttgctcttctcgaggagtatctttgtggtgttctctgtatttcctgaatctgaatgttggcctgccttgctagactggggaagttctcctggataatatcctgcagagtgttttccaacttggttctattctccccgtcattttcaggtacaccaatcagatatagatttggtcttttcacatagtcccatatttcttggaggctttgttcgtttcttcttattcttttttctctaaacttcccttctgacttcatttcattcatttcatcttgcatcactgataccctttcttccagttgatcgcatcggctcctgaggcttctgcattcttcacgtagttcttgagccttggctttcagctccatcagctcctttaaggacttctctgcattggttattctagttatccatttgtctaatcttttttcaaagtttctaacttctttgccattggtttgaatttcctcctgtagctcggagtagtttgatcgcctgaagccttcttctctcaactcatcaatgtcattctccgtccagctttgttccgttgctggtgaggagctgtgttcctttggaggaggagaggtgctctgctttttagagtttccggtttttctgctctgttttttccccatctttgtgkttttatctacttttggtctttgatgatggyaacgtacagatgggtttttggtgtggatgtcctttctgtttgttagttttccttctaacagacaggaccctcagatgcaggtttgttggagwtkgctagaggtccactccagaccctttttgcctgggtgtcagccgtggtggctgcagaacagcagtggctgtagaacagcggattttggtgacccgcaaatgctgctgcctgatcgttcctctggaagctttgtcccagaggaatacccggccgtgtgaggtgtcagtctgcccctactggggggcgcctcccagttaggctgctcgggggtcagacacccacttaaggaggcagtctgcctgttctcagatctccagctgcgtgctgggagaaccattactctcttcaaagctgtcagacagggacatttaagtctgcagaggttactgctgtctttttgtttgtctatgccctgcccccagaggtggagcctacagaggcaggcaggcctccttgagctgtggtgggctccacccagttcgagcttccccgctgctttgtttacctaatcaagcctgggcaatgacaggcgcccctcccccagcctccctgtggccttgcagtttgatctcagactgccgtgctagcaatcagtgagactctgtgggcataggaccctctgagccatatgcgggatataatctcctggtgtgctgttttttaagcccattggaaaagtgcagtattagggtgggagtgacctgattttccacgtgacgtctgtcacccctttctttgactaggaaagggaaccccctgaccccttgcgcttcccgagtgaggcagtgcctcaccctgctttggctcgtgcatggtgcactgcacccactgtcctgcacccactgtctggcactccctagtgagatgaacccagtacctcagatggaaatgcagaaatcacccatcttctgcgtcactcacgctgggagctgtagaccggagctgttcctattcggccatcttggctccaccacaagtttaattttagttgtctttcattcttattgtgttgaggaagtaggggaataaagctattttttttctattcatcaatgcaactttctttggtgcaaacaatatgagaaaaaacttgcttgtttcatataagtgaatctgttttatgttgtaatctattaacatagaattcagcctttaggttttaaaagtaaaatgccaagcaatttgtactgctccaaaatatatttacagttattttaattgagaatattttatgtaggttttatttaaaaagcttgaggtcaagagcttttgaagaactttaggaaaaaaaaacctaakccatattatacagccatccctcggtatccatggggggttggttccaggaccttctgcagatgccaaaatccatggatgttcaagttccttatataaaatagtgtactattggcatataacctatgcatatctccctgtatactttaaattgctacagggttacttataataactaatatactgtaaatgctgtgtaaatagttatactatattttttaggaaatagttacaagaaaaatgtctgtacgtgttcaatacagaagcagccatggatgcagaaccccaggagaaagagggttgactgtataggttttcaaacaatgtactattaatattttacatactattycagtagtttcagtgtgaataattatggaaaggatggattaagtaaatgtaattctttttctgcaagagtttctattttagatagcaytgaacaagtctaaacmtctttctcttatattttgctttaccaaaattctccagaaatcagaagtctagccttatttctaatctggcaaatacacagcygtgaatctactctttgtatacattagaytgccatccacccaaatgttatctatttccagctacatgtatatwgaacatttgcacacagtgtttttatattctggaaaaatataagaatgttttgaaagcatacaatggatatgtctgcaagagagtaaacgaagaaaaataaattcaagatcagactttctaaaagcaatctgttctttacaaatgtttgcattatgtaattcacacaaataactggaattggaagagttcttaattatttagtcttggaatagcaaagcaatatttagaacttttgcttaaaaattacttcgtatttgcaaggctaatttcaaaataaattgaaaatgtaattttattaattttaccttgctaaatttgtacaaatgracttcctttcccttttctccagagaaatttttatttattccttatatttcaatttaagcattatttcttcaggaaagcaacttaccagtcttgaacagatcaatctatcataacatttttatctttcttttctgtcaattgtcacattacaattttactttcttgtattagacagcaagcaccatsagaaaagcaaccattagtgttgattttttaaaattattttaaaatgattaaatattttgtaaagacagggtcttgctgtgttgctaagtctggtctcaaactcctggcctcaaacaatgctcccaccttggcctcccaggtgttgagactacaggtgtgagcyatggcacccaaccctaatatttattaattactctgttttttgtgcctggcttggtgccagagaagtacatagtaggaactcacttacagttattaataaatgagaaaaatggaataaaatcttgatataaacatcacattgttggaatttatacaaaaacatctacttagagaaacagacatgtttggagggaacaaataataacaaatgtttatttagcacttattgtgtgccaggccctaatctaatctctttaattatatttaytcaactgataaacaagaaactgtacacaggaaagttgagtaactcatttmatgtcgtagagctagtcagatgagggtgccccaggatttaaacctacataatctggctccagatttgatgcttttaactactaccctattctcaagtttcaaacaagaatagtgaagtggttaaaagcatataatctggagtcagatgggtagtgtatagttacaaaagtcactaaagattggtcattttgatcatcgtaagagcttgargccctaaggaaaatttgacagattttattttgtcagcatttaaaacttgatatgaagaagataacataaacattaagtgaaaagataagctgcagacacagagaaaataccatgcatayagcacatatggtgtttaaagtgtttcaggttttatatacaaaatattacaaatcaataaaaaaatttcactagaaaawtaggcaaatctgaaatagaaaatgaatatattaagaaatgccctgatttatataaataaacatatatatgctcaactgtactaataatcaaagaaaaattgattatattacaaagatatcatttttcctgacagtcacattgagcccattttggctcgcattaatttcaccttcaaatatctaaagtggagatataattgcaaaagctatgtgaacaataatatttattggaatactgttttaatagcccaagctggcaataacataaatgctatcaatatgagaaactgataacagagtatggttctgagacattaagaagcttgcctgaggttataaaggattgtgatattcaatgacacattcatgtgattttataggaatgaaataaaaaggctttgtgatttaatgggaagaatattaattcttatttcagttgtaatacagattttctttgaggtattgaccagcttctacttctaaaaacctgtgatttgatttttttgttgacattttataaacagcccttatatatgatctaatagtccttcataacctagtgtaacatattgatgaactcgtttattgttgaggtaaaaatgaatctattttgtgatttttatttttccctccagtgacctaatttaaaccatttatataattactattttgatttattagccggatattcctctgaaatagtctattatgctatatctaatgtgtaacatacatgctatgtaaaaagttatattaccatttttatttgcttcatttttcatttgcttaattattttatttatcataaggaatctttgagatcacaagtcagagaatctgaaarccaaaatctacagaaatatgcacatgctaacctctgtatcataatcctcaggtaacaactactctctacaaaatttgtgattaaaattcaaatctttattttttatcatgctaacctatcagcttttttaatgtgtgttcttcatagggtcattgttgtgatgatgtaaatagtatcctttttttaagaaaaagattagaaaatatmaatttataatctcattatacaaatacaaatagtactatttgatatattgtactttatgaagtatttctttataagtattttatcttataawgttataattagattacaaccattatattaaaaatgtgtatcatgaggaatagaagatggctgaataggaacagctccggtcttcagctcccagggagatcaatgcagaaggygggtgatttctgcatttccaactgaggtacctgactcwtctcattgggactggtyacacagtgggtgcagcccatggagggygacccgaagcagggtggggcatcacctcacccgggaagtgtaaggggtcaggtaactccctcccctagccaagggaagccatgagggactgtgccttgaggaacagtgcactctggcccatatactttgcttttcccatggtctttgcaacctacagatcaggagattcctttgggtgcctacactcccagggccctagatttcaagcacgaaactgggcagctgtttgggcagacactgacctagctgcaggagtttttttcatacctcagtggtacctggaatgctagcaagacagaaccatttactccgctggaaagggggctgaagccagggagtcaagtggtctagctcagcggatcccacccccatggagcccaacaagctccatggcttgaaattctcgctgtcagcacaggagtctgaagttgacctgggatgctccagcttgstgtgggtgagaggcatccaccattactgaggcttgagtaggcagttttcccctcacagtgtaaacaaagccacctggaagttcaaactgggtggggcccaccaaagtgcagcaaagcctctgtagccagactgcctctctagattcctcctttctgggcagggcatctctgaaagaaaggcagaagccacagtcaggggcttataaataaaactctcaactccctgggacagagcacctgggggaaggggcagctgtgagcacagcttcaccagacttaaacgtttctgtctactggctctgaagacagcagtggatctcccagcacagagcttgagctctgctaagrgacagactgcctcctcaagtgggtccctgaacccggtgcctcctgactaggaaacacctcccagcaggggtcaacagacatctyatacaggagagctctggctggcatctggcaggtgcccctctggaataaagcttccagaggaaggagcaggcagcactctttgctgttctgcagcctccactggtgrtacgtaggcaaacggtctggagtggacctccagcaaactccagcagacctgcagaagaggggcctgactgttagaaggaaaactaacaaacagaaagcaatagcatcaacatcaacaaaaaggacacccacgcaaaaaccccatccaaagatcaccaacgtcaaagaccaaaggtagataaatccacaaagatgaggaaaaagcagctcaaaaaggctgaaaattccaaaaaccagaatgtctcttccaaaggatcacaactcctcgccagcaagggaacaaaattagacagagaatgagtttgatgaattgacagaagtaggcttcrgaaggtgggtaataacaaactcctctgagcaaaagaagcatgttctaascaaatgcaaggaagctaagaaccttgataaaagattcccctaggtctccctaggaactgctaactggaataagcagtttagagaagaacataaatgacctgaaggagctgaaaaacacagcatgagaactttgtgaagcatacacaagtatcaatagccaaatccatcaagtggaagaaaggatatcagagattgaagatcaacttaatgaaataaagcataaagacaagattagagaaaaaagaatgaaaaggaattaacaaagcctccaagaaatatgagactatgtgaaaagaccaaacttttttgattggtgtacctgaaagtaacagggagattggaaccaagttggaaaacacgcttcaggatgttatccaggagaacttccccaacctagcaaggcaggccaacattcaaatttaggaaatacagagaacaccacaaagataatccttgagaagagcaaccccaagacacataattgtcagattcaccaaggttgaaatgaaggaaaaaatgttaagagcagccagagagaaacgtsgggttacccataaagagaagcacatcagactaacaggggatctcttggcagaaaccctacaagccagaagagggtgggggctgatattcaacattcttaaagaaaagaattttcaacccaaaattttttatccagccaaactaagcttcataagtgaaggagaaataaaatcctttacagacaagcaaatgctgagagattttgtcaccaccaggtctgccttacaagagctcctgaagaaagcactaaacatggcaaggaaaaactggtaccagccactgcaaaaacatatcaaattgtaaagaccatcggcactgtgaagaagctgcatcaattaatgggcaaaataaccagctagcatcatgatgacaggatcaaattcacatgtaacaataactttaagtgtaaattgactaaatgccccaattaaaagacacagactgacaaattggataaagagtcaagacccataggtgtcctgtattcaggagacttatctcacatgcaaagacaaacaaaggctaaaaatagtgggattgagaaagatttaccaagcaaatagaaagcaaaaaaaaaaaaaaaaaaaaaaaaagcagggattgtagtcctagtctctgataacccagactttaaaccaacaaagataaaaaagacaaagaagggcattacataatggtagagggatcaatgcaacaagaagagttaaatatcttaaatatatgtgcacacaatacaggagcatccagattcataaagcaagttcttagagacctaaaaaaagacttagactccaaaacaataatagtgggagacttttacaccccactgtcatattagacagataaacgagacagaaaattaacaaggatattcaggatgtgaactcagctcaggtccgagcagacctaatagacatctacyraactctccacctcaaatcaacagaatatacattcttctcagcaccaaatcatacttattctaaaattgaccacatmattgaaagtaaaacactcctcagcaaatgcaaataaatggaaataataacaaacagtatctcagaccacagtgcaatcaaattagaactcaggattaagaaactcactcaaaaccgcacaactacatggaarctgaacaacctgctcctgaatgactaytgggtaaataaattaaggcagaaataaataagttctttgaaaccaataagaacaaagacacaacataccagaatctctgggacacagctaaagcagtgtttagagggaaatttatagcactaagtgcccacaggagamagcaggaaagatctaaatttgacgccctaacatcacaatgaaaagaactagagaagcaatagcaaacaaattcaaaagctaacagragacaagaaataactaagatcagagcagaactgaaggagatagagacacaaaaaacctttcaaaaaatcaatgaatccaggagctggttttttgaaaacatcaacaaaacagatagaccactagccagactaataaagaagaaaagagagaagaatcaaatagacacaataaaaaatgataaaggggatatcaccactgatcccacagaaatacaaactaccatcagagaatactatagaaatacaaactaccatcagagaatactataaacacctctatgcaaataaactagaaaatctggaagaaatggataaattcctggacacatacaccctcccaagactaaaccaggaaaaagtcgaatctctgaacagaacaataacaagatctgaaattgaggcagtaattaatagcttaccaaccaaaaaaaagcccaggaccagacagattcacagccaaattctatcagaggtacaaagaagagctggtwccattccttctgaaactatttcaaacaatagaaaagawattatcataaaataactcattttatgaggccagcatcatcctgataccaaaacctggcagaaacacaacaaaaaaaagaaaatttcaggccaatatccgtgatgaacatcgatgtgaaaattctcaataaaatactggaaaactgaatccagcagcacatcaaaaagcttatccaccacaatcaagtcagcttcaccccaggatgcaaggatggttcaacataagcaaatcaataaatggaatccatcacataaacagaaccaatgaaaaaaaaacacatgattatctcaatagatgcaaaaaaggcctttgataaaattcaacaccccttcatgctaaaaactctcaataaattaggtattgatggaacatatctcaaaataataagagctatwtatgacaaactcacagccaatattatactgaatgggtaaaagctggaagcattccctttgaaaaccagcacaggcaaggatgccctctctcactactcctattcaacrtagtattggaagttctggccagggcaatcaggcaagagawagaaataaagtatattcaagtrggaggagaggaggtcaaattgtctctgtttgcagatgacatgattgtatatctagaaaaccctgtcatctcagccccaaaatctccttagrctgataagcaacttcagcagagtctcaggatacaaaatcaatttgcaaaaatctcaagcattcctatacacctataatagacaaacagagagccaaatcatgagagaactcctattcacaattgctagaaagagaataaaatacctagaaatacaagttacaagggatgtgaaggacctcttcaaggagaactacaaaccactgctcaaggaaatcagagacaacacaaacaaacagaaaatcattccatgctcacagacaggaagaatcaatatcttgaaaatggccatactgcccagggtaatttatagattcaatgctattcccattaagcaaccattgacttttttcacagaattagaaaaaactactttaaagttcatatggaaccaaaaaagagcccatatagccaagacaatcctaagcaaaaagaacaaagctggaggcataatgctacctgwcttcaaactacactrcaaggctgcagtaacaaaaacagcatgatactgttaccaaaacagatatatagaccaatggaacagaacagaggcctcagaaatarcaccacacatctacagcyatctgatctttgacaaacctgacacaaacaagcaatggggaaaagattccctatttaataaaagctgttgggaaaactggctagccatgtgcagaaaactgaaactggattccttccttacacctaatacaaacattaactcaagataaattraagacttaaaggtaagacctaaaaccataaaagycctagaagaaaacctaggcagtaccattcaggacataggcatgggcaaggacttcatgactaaaacaccaaagcaatggcaacaaaagccaaaattgacaaatgggatctaattaaactaaagagcttctgcacggygaaagaaactaccatcagaggaaacaggcaacctacagaatgggagaaaatttttgcaatctatccatttgacaaagggctaatatccagaatctataaagaacttaaaygaatttacaagagaaaaacaaccccatcaaaaagtgggcaaaggatatgaacagacacttctcaaaagaagayatttatgcagccaacaaacatgaaaaaaagcttgttatcactgatcattagagaaatgcaaatcaaacccacaatgagataccatttcatgccagttagaatggcaatcattaaaaagtcaggaaacarcagacggtggaaaggatgtggagaaataggaacacttttatactgttggtgggagtgtaaattagttcaaccattgtggaagacaatgtggcaattcctcagggatctaaaaccagaaatgccatttgacccagcaatcccattagtggrtatatacccaaaggatcataaatcattctactataaaaacacatgtacacatatttttattgcagtactattcacaatagcaaagacttggaaccaacccaaatgcccatcaatgatagactggctcaagaaaatgtggcacatatacaccatagaatactatgcagccataaaaaaggatgagttgctgtcctttgcagggacrtggatgaagctggaaaccatcattctcagcaaactaacaaaggaacagaaaaccaaacaccctatgttctcactaataaatgggaattgaacaatgagaacatatgggcacagggaarggaacatcacataccctgttgggggttgggggcaagggtagggatagcattaggagaaatacctgatgtagatgatgagttgatgggtgcatcaaacaaccatgtcacaagtatgcctatgtaacaaagctgcatgttctgcacatgtatamcagaactttttttttttttttttctgtgagatggtctygctctgtcacccaggctggagtgcagtggcgcaatctctgctcactgcaagctccacctcccgggttcatgccattctcyttcctcagcctcccaagtagctggaactacaggcacctgccaccactacrcccggctaattttttgtatttttagtagagatggggtttcactgtgttagccaggatggtmttgatctcctgacctcgtgatccacctgccttggcttcccaaagtgttgggattacaggcgtgagccaccgcacctggcgtatcccagaacttaaagtataataataattttaaaaaatgcgtatcgctgttttagtgccataatatttgtatactaaaagtattgtttcatgttgcaatttaattgtggctttcttctggatgagtaggttagcttttgatacaatttagttttgtaacaatcacttttaagattttaaactataccattaactgaataaattatatttttcttaaccttttattgttctaaatttgttttttattattaaataccatacttcaataaagtatttctcaatatccagaattattttacgaattccaaaaaatgaagttactagatcaaaacacaaacttttccttgctttgatatatttttattaatttaatattgtactagtttttctacatccttgctctaactggatattaacaggttgaacattctttaaaaatatttcacagattaatacaatgattttatatatatatttttattatactttaagttctagggtacatgtgcacaacgtgcaggtttgttacatatgtatacatgtgccatgttggtgtgctgcacccattaactggtcatttaacattaggtgtatctcctaatgctatccctcccccctccccccaccccacaacaggccctagtgtgtgatgttccccttcctgtgtccaagtgttctcattgttcaattcccacctgtgagtgagaaaatgcggtgtttggtttttttgtccttgcgacagtttgctgagaatgatggtttccagcttcatccacgtccctacaaaggacatgaactcatcattttttatggctgcatagtattccatggtgtatatgtgccatattttcttaatccagtctatcattgatggacatttgggttggttccaagtctttgctattgtgaatagtgccacaataaacatacatgtgcatgtgtctttatagcagcatgttttataatcctatgagtatatacccagtaatgggatggctgggccaaatgatatttccacttctggatccctgaggaattgccacactgtcttccacaatggttgaactagtttacagtcccaccaacagtataaaagtgttcctatttctccacatcctctccagctcctgttgtttcctgactttttaatgatcgccattctaactggtgtgagacgatgtctcattgtggttttcatttgcatttctctgatggccagtgatgatgagcattttttcatgtgtctgtaggctgcataaatgtcttattttgagaagtgtctgttcatatcctttgcccactttttgatgggtttttttttttcttgtaaatttgagttctttgtggattctggatattagccctttgtcagatgagtagtttgcaaaaattttctcccattctgtaggttgcctgttcactctgacggtagtttcttttgctgtgcagaagctctttagtttaattagatgccatttgtcaattttggctcttgttgccattgcttttggtgttttagacatgaagtccttgcccatgcctatgtcctgaatggtattgcctaggttttcttccagggtttttatggttttaggtctgacatttaagtccttaatccatcttgaattaaattttgtataaggtgtaaggaagggatccagtttcarctttctacatatggctagccagttttcccagcaccatttattaaataaggaatcctttccycatttcttgtttttgtcaggtttgtcaaagatcagatagttgtagatgtgtggtattatttctgagggctctrttctgttccattggtctgtatatctgttttggtaccagtatcatgctgttttggttactgtagccttggagtatagtctgaagtcaggtagcaagatgcctccagctttgttcttttggcttaggattgacttggcaatgcaggctcttttttggttccatatgaactttaaagtagctttttccaattctgtgaagaaagtcattggtagcttgaggggatggcattgaatctataaattaccttggccagtatggccattttcacgatattgattcttcctgtccatgagcatggaatgttcttccatttgtttgtatcctcctttatttccttgagcagtggtttgtagttctccttgaagaggtccttcacatcccttgtaagttggattcctaggtatttcattctctttgaagcaattgtgaatgggagttcactcatgatttggctctttgtttgtctgttaatggtgtataggaatgcttgtgatttttgcacattgattttgtatcctgagacattgctgaagttgcttatcagcttaaggagattttcgactgagatgatggggttttctagatatacaatcatgtcatctgcaaagagggacaatttgtcttcctcttttcctaattgaataccctttatttccttctcctgcctgattgccctggccagaacttccaacactatgttgaataggagtggtgggagagggcatccctgtcttgtgccagttttcaaagggaatgtttccaggttttgcccattcagtatgatattggttgtgggtttgtcatatgtagctgttattatttttagatacttcccatcaatacgtaatttattgagagtttttagcatgaagtgctgttgaattttgtcaaagaccttttctgcatctatcgaaataatcatgtgttttttgtctttggttctgtttatgtgctggattacatttattgatttgtgtatgttgaaccagccttgcatcccagggatgaagccaacttgatcgtggtggataagctttttgatgtgctgctggattcagtttgccagtattttaytgaggatttttgcattgacgttcatcagggatattggtctaaaattctcttttttgsttgtgtctctgccagctttggtatcaggatgatgctggcctcataaaatgagttagggaggattccctctttttctattggttggaatagtttcagaaggaatgataccagctcctctttgtatctttggtagaaatcggctgtgaatccgtctggtcctggactttttttgttggtaagctattaattattgcstcaatttcagagtctgttattggtgtattcagagattcaacttcttcctggtttagtcttgggarggtgtatgtgtagaggattttatccatttcttctagattttctagtttatttgtgtagaggtgtttacagtattctctgacggtagtttgtatttctgtgggatcggtggtgatatcccctttatcattttttattgcatctatttgattcttctctcttttcttctttattagtcttgctagcrgtctatcaattttkttgatcttttcaaaaaaccagctcctgaattcattgattttttgaagggttttttgtgtctctatctccttcagttctgctctgatcttagttatttcttgccttctgctagcttttgaatgtgtttgctcttgcttttctagttcttttaattgtgatgttagggtgtcaattttrgatctttcctgctttctcttgtgggcatttagtgctataaatttccctctacacactgctttaaatgtgtcccagatattmtagtatgttatgtctttgttctcgttggtttcaaagaacatctttatttttgccttcatttygttatgtacccagtagtcattcaggagcaggttgttcagtttccatgtagttgagyrgttttgagtgagtttcttaatcctgccttctagtttgattgcactgtggtttgagagacagtttgttataatttctgttcttttacatttgctgaggagtgctttacttccaactatgtggtcaattttggaatagatgtggtgtggtgctgaaaagaatgtatattctgttgatttggggtggagagttctatagatgtctattaggtctgcttggtgcagagctgagttcagttcctggatatccttgttaactttctgtctcattgatctgtctaatgttgacaatgggatgttgaagtcttccattatcattgtgtgggagtctaagtctctttgtaggtcactmaggacttgctttatgaatctgggtgctcctttwtatggtgcatatatatttaggatagttagctcttcttgttgaattgattcctttaccattatgtaatggccttctttgtctcttttgatctttgttggtttaaagtctgttttatcagagactaggattgcaacccctgcctttttttgttctccatttgcttgatagatcttcctccatccttttattttgagcccatgtgtgtctctgcaygtgagatgggtttcctgaatacagcacactgatgggtcttgactctttatccaatttgccartctgtgtcttttaattggagcatttagtccatttacrtttaaggttaatattgttatgtgtgaatttgatcctgtcattatgatgttagcttgttattttgctcattagttgatgcagtttcttcctagaattgatggtctttacaatttggagtgtttttgcagtggctggtaccgttgttcctttccatatttagtacttccttccagagcccttgtcgggcaggtctggtggtgacaaaatctctcagcatttgcttgtctataaaggatttatgtcatagtgcagatatcactcatatgctgaaatggcttattgttgttccacctctgtttacaagagcaaaaatatgataaatgacttcaaatgtccatgttaccaatagaaaactgggtacatttcctctagttagakaaacacattatacacattgcaaaaattcatttgtctaatcactaatctttcttcagtgcctactgtatagtttgaagtgcccagatactgaccctatagatgttaagacagttccaaccgtaaggaagcttaggggaaggctagtacaaaatacaaatacaactaacagaatataagccaagatagtactgtgagtccatatagaaatacaaaaaaaaaagtttaaaagaaaataagtagcaaggataaaaatcaagaaacacatggcagtgagaagaaattagaaccaaaggtatcctgggctccaatgtggagtttttgcttgtgtttacctccatgattcaaaattttctcagttatggagggatattggagcaaagcacactgtatgcaactaaagggtagagttacaatttttaaaactggaagtccttgatagaaaatcaaacaacatcaacaaaagtatatattgacaaaagggcctttgagagaatgacactaaaaagctaaaatttaaagaaattaatagacaaagtaaatttaaatgaaatatcagaatattagttacttgaatgatataaatgaggaattcatgaaatatatagcacaaagagaaaaaacagatttaaaatatatatgaaaaaataaagtatttggcgaagagattgagaaattataacatgtatcaaaggaatcccacaaagaataagcatttttttttaaagacagaggaaatatggctgataattttatagaattgaagagtgggatgatctttcaaattgaaagacttcattgagggccaaacaggtcaataaacacaatccttaactggttatatcatggaataarsaaagaagttaatggtaagaggcaatttaaaagctactagaaagaaaaacagattgcttgcataggaaaaaaaaaagattggcttttaacttcttaagaacaaagcaattaagttttatgtgaaaatcactrccagcctagaaatgtacttgtagctaagctatcctttaagagtgaaagcaaaatagagacattttcaaatattcaaaaaatgaggagtttacaatccacaaatacaaagtatttcttcagcaagaagagtaaattaaaaaagaaagcacggtaatcaatagcttttgaaagtgtatcrgtaatatacttcacttctacctytaaataaatctacagttttattttttaaaaacaagttaaattggacaatactttaacagtataattaaaacaataacygagtascctatgacacagtcattccaagtatacacccaatagaaagcatatatgtgcaccaaaagacaagtactagccaaaagttggaaaaagaacaaatacggaaatgaccataatagctctaagtagtaaatattcatcaacagttgaattaataaataaactgccttgcatttacacagtggaatactacaaaacaatgaaaatraatgaaacagtcatatgatacaaattattctcacaaacataatgggttgaataaaaaatacaaaaaatacattgtagatgattaagtgatataaagtacaaaatgacaaaaarcaattttatgctggtagaagtcagmatgtggtcatccttggaaaaagagcagtgggtctgkatggggaacgaaggagcttctggggagctggtaatgttgtgtattcttaatctcagtcctggttccatatgtgtggttggtttgtgaaagtttatagagcagtacagctgtgagatgtatactttatgaacattgtatacattaaactttgataaaaagcatgtgtgtgaatatatatgtgtgtgtatataygtgtgtgtgtgtatatatatatattctttayatgaagaatgtagcacattaaaactacamatgtgtatataggtwaaactaaaattctaggaaaaagaacttgggagaaggaagaggaaggttccattagtactttaaatatgctaagattcttgtcttatttagttggtaggcaggacatactaaaatttaatctctgtcagaaattatgygtatctgagtgtgtgtacagttacacaaytaataaaaggaaaaaagagagcacatgaaaatcaaaaaagcaagaaataagatcctcccctaaaaacaataaagaaggaattctaaacagaacactaaaacaagatcatagagatcagtttaaatatgttcaataatcatactcattgtaaatttattagttttctaataaaatattaaatgtattatattagattaaaaaaactaactgctaatcttataggaaaatatcttttaaaaagacagaaaaattaaatatagatatactatgcaaatactaaaacttgtgtcaaaatattaatttcagaagaaagaatttaaggcaaaaacatctatagaggatttttttaaataacaatatattttcataaaaagaacaatccacacagtatataattcacaattatttgtagatagcttcagaacaaagcagaaccaaccaaatcatagggagaaatagataagttcaaactcatgatggaaaaatgagttttaatttttaattttttatagagatgggtcttgctwtgttgcacaggctggtcttgaactcctggatttaagtgatcctcctgcctcagcctcatgatagaatatttgagtacaatgctatcagaaattgaaagctcagataaaaattttaaaaaggatatataagatttgaacaagtcatcccaaagtcttaattaatacccctgtagcaaacagagactgtatcttctcttcacacacacagtgttatgaaagttgactacatattatgtaacaaaggaagaaagtctcttcaagtttcgaaaagtgaggtcactataaactacattatctcaacacaatacaattaaattagatatcagcaataaaaatacagaaaattatgtgtgaaaacaaatttatttataaatatctaatatgtaaaagaaaaaataatgaaaaattagaaatatattgcaagacaatgagaattcatttcacaacctgtggaatgcaactgaatgcgtctaaatctgcaatgactgtggaaattayagtattaaactttttaatttaaaactaagaaaaagggacacagttatttaggcatttatctctgaaaactgtggaaagaacaacagagttaatccagaaaaagtagaagaaaataaaaataaaaagttgtgaagaaattaatgtaaaataaacaaaaatatatggagtacttaaagctgattctttgaaaatttagtaaaataaacaaagcccttgcaggactgaataatttttttttaatacagggaatatttaactgtgaaggagaactcatacwgtaaataaagtagtgcataaatagaatttgagaatactgtgaaaaaccttaggaatgcagcttcaataaactggaaaatttagatgaaatgaacaattttcatgaaataaaatattcttaaataaatatacttaataaaatagacaagtaaagtagaaaacctgagtaagttgccaagtggtcaataaattgaactagtagtaataacaacattaactcttccacctttggccctggccaaagacaccagacatggatgtttttcccaagcaaattctgtaagagttaaagaaagaggaaagaaacacaaaaagcagctcaacagccaaagacaactttattttttagaataaacctgagaggggcttctggccgatttcagtgaggagcattctctcttacagactgagagtatttaagtgtttagggcaagagggcttatcacaggcttggaatgttttygtgtcggggagaagtttattgtggggttgtaatgtctctgatcagaggggaagttaccttggggctaaacatctctctgggcagagaggaggttacctcagggctggcatgtctctggtttgggagggatttatcttagggttggaatgtttctggttcgagatgtcatttgtggtttatgttcatgctgaccttagccattaggctgatgccctttggatttaggtggtttttgatcaaggggaactttaaaatgatagtgcttgtccaagacagtgatgctcctgctctgtcaaattctaccaaacattcaagaaacatattattcccatattttacaaattattttaagactaaatacgatataaagaacatgattaaatttgttagtataattttaacatccacagcagtcaggagaagaaaaaaattataggccrgcttcacatataaacatatatgtaatgggaaatcatgaaaaacaaagcaaatcttatctgacagcgtattttaaagtttttaaaacttttaaacatcatgaccaagtagaattatcattcttaatgaatatgtatatacatatatagcctagtagccctagattttctgtacaggagaagatgagagttggagttggacagggagtggctgtaaaactaccaccaggtgtagtagtggttgattaatggattgaaggagttaaagctgcccccctacctcctgagctattcttggcatagcaaacttctttttaaaaatgaaatttggctgggagtggtggctcacgtctgtaattccagcactttggtaggccgagggaggtggatcacttgaggtcaggggttcaagaccagcctgaccaacatggcgaaaccccatctctactaaaaatacaaaaattaaccaggtgtggtggagtgaaactccatctcaagaaaaaaagaaaaaaaaatcatctttctcaaaatacaacagcagttcagtgactagattgatatggaaaaaatcaaagcgatatctgcaatgttgaaaaataaacatagcatttctctagaaccaattcatcctacagttgcatgccagaagagggggtagatacaattcactgtaagagtctatcaacaatagaaaaacagcctcttgttttgaaaaaaaaatagcttcttgttttgaaaaagaaacaaaaagatcatcaatgatgcatataatagacctacatgaaagacagaatatttatatccttttgttagaaacaaatcatgatttgagaatcatacatgctcctttattgtgagagatatggagaaactggagtggtcatagaaaaaaatattaagtgataaaaaactgatgattcactgagacatctgtaagaaactgggcctatttcatttagcaagagctactgaggaaatattaatatatattttcaaatcttattagtttcattttgagcaatttgtgatcagcattaaaaattgctgcaaaagtcattgattgtaactaaagcagaataagttacttacatgcaaacttgaggattataaagtaaagaatatatttgtgcaatgtttacttctaaggatccgttgagaaatatcaacattgaatggtgtgtttatagactgtatgaagtcaagactccagaaatggcaatttgtaggaatttcatttggaaaaaatacaatccatgtccaaggtatttctacaaagaattgatatcagcaggattcatttcaaccctgtaattctgaattctttttttcttgtgtgtgtgtgtatatatatatatatatatcacatttattatgaagctcttagaaatttaaaaacacacttttctttttttttttttttttttgagacagagtcttgctctgccatccaggctggagtgcagtggcacagtctcggctcactgcaacctctccctctcgggttcagccatttctttgcctcagcctcccgagtagctgggactacaggcgtgcaccaccaagcccaactaatttttgtattttttttagtagagacagggtttcactatttkggccaggwtggtctcgatctcttgacctcattatctgcctcccaaagtgctgggaatacaggtgtgagctactgcatccagcctaaaatttcactttttatggatacataatattttacatatttatggggtacatgtgatattttgttacatgcatggaatacacaattatcaagtcaaagtttttgaagtgtccattactgtgaggatttattatttctatgggttaggaagtcctttcttatagctactttgaaatatagattatattgttgtaaagcatagtcactctactttgctgtcaaaatataaaatttatgccttttatctaattacatgtttgtacttattaacctacctctcttcaccctccgctaccaacccagtcaaccttcccagcttctagtatctatcattcttctctctaccattatcagrtcaatctttttagttcccacatatgaatgagaatatgcaataatttgtctttctgtgcctgggttatttcacttaacataatgacatccatgttgctgcaaatgacaggctctcattctttttatggctgaatagtattccattgtatacatataccacatgttttcttatccatttgtctgttaatggacactaagtttggttctatatctttgctattatcaatagtgctacaacaaacatgtgagtgcaggaatccctttgatataccgatttcttttcctttgaatacatacccagcagtgagattgctggatcatattgtagttctatttttagtttgtttgagaaatctccatattgttttttatttatttatttatttatttatttatttatttatttatttgagacagagtcttgctgtgtcacccaggctggagtgcagtggcatgatcttggctcactgcaacctctgcctccccagttcaagcgattctcctgcctcagcctcccaagtagctggtactacaggcacatgccatcacgcccggctaatttttgtatttttagtagagatggggtttcactgtgttagccagggtggtctcaatctcctgacctcatgacctgcccgtctcagattcccaaagtgctgcaattacaggcatgatccactgtgcccggcctccatattgtttttaatagtggttgtactaatttacattcccaccaaaagggtatgagcattctcttttctccacatccttgtcagcatgtgatattttactgcgtttttaataatagacactctctgttcaattgggtagaaaaataaaaataaaaaaatagccatcctaactggagtaagataatatttcattgtggttttgatttgcatattcctgaggattagtgatgttgagcatttttccatgtacctgttggccatttgcatgtcttcctttcggaattatctattaatgttctgtgcctacttcttacttaatgggattcttattttattgttgaattgtttgagtatcttatatactctggatattattccattgtcagatagtttgaagtattttctcccatacaggtggtttctttactcttttgattgtttcctttgctatgcagaagtttttgattttaatatagtctcatttgtctatttttgttccatttgtctgtgcttttgaggtcttagccataaaatcttttcctagacgactgttggaagtgcrtttcctatgtttccttctaggagttttatagtttgtagttttacacttragtatttaatccatcttgagtttatttttgtgtacagtgagagataggggttcagtttcattcttttgcctgtgactgttcaatttccccarcactatttattgaagaaaacctcagttttccagtgcatgttcttggtgctttgtcaacaatcaattggctgtaaatatgtggatttatttttgagttttctattctgttccatttgggtatgtgtctatttttatgccaatgccaagtgttttggttattatagccctgtaatataatttgaagtcaggtagtatgatgcctccagctttattatttttgctcaggattgctttggatattctggttattttttggtttcaaatgaattgtaggattgttttttctattctgtgaaaaatggcattagtgtcttcatagggattgcattgagtctttaggttgtttatggagtatggtccttttaacactattatttttttctgatccatgaacatgggatgtctttacatttgtatgtgttctcttcaatttctttcatcagattcttatagttttccttgtagagatatttcacytcattggtttattcctatgtaatttttttggtagctagtggaaatgggattgctgttctgttcttctgtttttgtttttgttttgctttkcttttttttgctatttcattattggtgtatagaaatactactttaaaaaaatgttgattttgtatcctgyagtgtaactgaatttgtttaacaactctaagggttttttggtggagtcttttgacttttctmaatatgagtatcatgtcatctgcaaasagggacaatttgactttctctttttgaatctggatgccttttctttctcttgcctgattactctggctaggactttcagtgctttgttgattaggaatggtggaagtacatatccttgtcttgttccagttcttagagaaaaggcctccaaacttttccccattcagtataatgctatttgtggatttgacatatatggactttattttttgaggcatgtttattctatgcctagtttgttgagaatttttttatcatgaaggtatgttgaattttatcaaaagatttttctttgtctataagatgagcatatgagttttattccttattctgtagatgtttcatgtttattgatttgcatatcttgaacatccttgtgtcccttgggtaaatcccacttgatcattgggtattatttttttgatgtgctgttaaattcagtttgcttgaactttgttgggkttttttgtgtttatgtttatcagagatattgacctatacctctgtgtgtgtgtgtgtgtgtgtgtgtgtccctgtgtgcttttggtatcagaatgataccggctttatagaatatgttaggaagaaatcagtcccctacaattttttggagtagtttgggaaagattggtattagttcttgtttataggcctggtagaagtcagcagtaaatcagtccagacctgggcttttctttgttgggagactttttattactgatttaatttcactacttggtgtgttcaggtttactatttcttcctgattcaatcttggtaagttgtatgtatgtttctagcaatgtatctacttcctctagattctctagtttgttagtatacagttttccgtgatagtctctgatgatcttttgtatttctgttgtatcagttgtaatgtctcctttttatttctgagtttatttgggtcttctcttttctttgttagtctagctcgtagttttttttttttttaatgttttcaattttgtttatactttcaaaaaactagtgttacatttcattcatgctttttattgtttttctagtttctgattcatttagttctgctctgatctttattatttcttgcctcctgctaatgtttggtttggttcattcttgatttttcactttgttgaggtggattgttagattatttacttgtaatatttctacttttgatgtaggcaattatttctataaacttccctcgtagtactactttagctgtatcccacagattttgatatattttgttttcattttcattagtttcaaaatttttaaatttcttcattgacacaatggttgttcaggggcatgttatttaatttttgtatatttatatagtttccaagtttctttttggtattgatttcttgttttattccactgtgatctgagaaggtacttgataccattttgcttgtttaaaatttgttgagacttcttttgtggctcaatagatggtctgttctagagaatattctgtatgattatgaaaataatgtgtawtctgcagttgttggataaaatgttctataaatatctgttaggtctgtttgttctaaattccactctaacttcaatgtttcttttttgattttctttctagacgatctgtctagtgctgagaataaggtggtaaattcccccacagttattgcattggagtctttcttttcagatttagtaatmtttcctttatgaatccgggtgttccagttttgggtgcatatatatttagaattgttatttcctcttgctagattggtccttttatcactatttagttgtctttgtttactgtttttggcttcaagtctgttttgtatgatatgagtatagctacctctgctcactttgaattctgttagagttaaatatctttttctatttatttactctcagtctataggaatcttttcaagtaaagtgtgtttcttgtaggtggcatgtagttggatcatttttttaaaatccattcattcagtctatagcttttaagtgaagaatttaatccatttatgttcaaagtaattattgatatgtgaggttttattgctgtcattttgttaattgttttatggttggtttgtatattctttgttcttgattttcctcttaatgtctgtcattgcagttggtagttatctgtagggatagtatttgagccctatctttttccacatttgtatgtttgcttcaccattttttatacttttgtgtgttttcatgtagataaatgtccttttgcttccatgtttaggagttctttgagtatttattgtatggtcagtctagtggtgatgaattatcttagttttatcttgtctgagaaagactttatttctccttcatttatgaaggataattttgttagatatagtatcttagcttgcagtttttctttcagcattttgaatacattatcccattctctcctggcctataaggtttctactgataaattttctcttgttctgatggaggtttcttataggtgactagatgcttttctcttgcttttttttaaaaaaaaaaattctctatttttcatggattttagaaattttaactatagtataccatgaagaagaactttttgtattgtgtctgtttggtgaytgctgggactctgtatctggatgtttaaatctcttgctagatttgggaaattttcmtctattaattcattaaataggtttttaaactctttctctctttgccttcttggataccaataatttatatattttatcacttttttttctgtcccatatatcattaaggctttgttcattctttttttttaaaaaatgtgtctgagggttatttataaaacactgtcatcaagttgtgaaattattttgtctgcttcatctagtctatggttgaagcttttaaatgtattttgtaattcattcaatgattctccatttataggatttctgtttgatacttttctacgttatctrtcactttgttamatttctcattcttatcctgaattgtttttctgattcctttgttttgtttttttagaattctcttatatctcactgaaattatttagaatcaataattgaatttttactaggattttatgaattccatctcctttggagctgtcatatattcttgctttttcatgwttcctgtgtccttacattgatatccgtgcatctcatgtagcagttgcttcttctaactttttcaatttgctttcacagggaaggactttttttgaggaagaatctgtggtgttggttgggtggggaactctggtttcaattctaggtacatgaattagtgtagtctcccttgatttttttggctacaaacagtgccagtgatatctgagacttccttggtggcttagggtccagttaytgaggaaagctctggtgcagttttgcttgggactcagaggtcaagtggaccagtctttgagctcctgtggttgcagcagtgggctgagagtgcctgctcatatgccccataatgtcatacaggtgggccaatttttgttccttcaggtggcttactcaaagcccagtagtggcagctgtgaactgagcaggtargtgggttcttgggtccatgggcagctaatatggygtaggcaatgcgagtggcagtggtgtgacaaccctctaggtcccttgtggtrcatgctgtcattggaagtaactgtaatgttctgggaaggtcagtgtccaggcctgcaggtggtaatttgtggtagtagctgctgtgtgggtaggcctaacctcaggtccccgagaggagtgktcatatgtcatcagtggtgaactaractgggagattccctggcccctggactgtatgctgtggcwtggggatgatggggaaacctgggctaggctggcttatcttcaggcccccagatggcatgtacaggcactggccatggtagtcaggagcggggtgatccccaagtcrttgtggaatgcttgagtgggaggctatagtagctgccctgctgccctgccagtgggggttgagggtggtaccagcttcagtgatgatggcctaggacagcaggtggggagcatgcatgccacctgcaccacagccttggtggcacccttgctcagccttgggtggagaagcctgtggtcacttgtgtctaaaccccaggcagtacccatcacttctcttgcacctcagcttcagcaccactgggcttcaggtagtgtgcagtttgctggggatggtgctctagaatggcaccttgctggcacctcagtcctaaagatggcatcccataccctggttgcaactccatcagagtgtagtggcccaaggtcacttgtgcctaagccctgggagcagcagcctaatgcttctcttgcacattagcctcagcattcctgggttccaggacagtgtgcagtctgttgcaggcaaagttctaaaatggcatcttgctgtagttgcttaggtcacaaggaatgtgaaggaccatgaccatattcaagcttcctccatgggaagctgccataatacaatcttcttgcaactccctatgttagtttcatggcctgagagtattgaggactctcccgtggctaggactataggagtctatgatgaaaatgcaggctgctgagcatctctcacctaccgtttccctctattggggagtctctctaggctctcagtcaatccaggctgaacaggctgcttgcttccttctcccattccttactttagatattgcctgtcactattttgttggattccagtgttctctcttggatgatctaatatctactgggtattttagctctttttagtggagaaagcaagtacaaaatgctccctagtcagccatcctgaagcctcccaaggtgcccatttcaaaacccatttttgaactacctaactaacctacctaaccagagcatttgttttaaacatactaatatatttaagtgttttaataatccttttgtttcaccaataaacaaacaaaaaagaagaataaatttaggagaataaaataattactaattcttctcttaaaagatatatctgtaaggaaggaaggactggactgattatatcaagtagtagaatttatctgtgaagatttaatgcacagaaaatattgtcctatattcttttctgtatctccccatttgatattttaaaagtcttttttggcaaacaaagtkgtacctattgttgattgtggatatttaaacgtgggaaattgtgatcagacataaatctctcaaggaaagaccttgtgtcctctctgttattaagaatccacactttcctttgtgggacactcaggaactgacatttatgtctaaccttctggataatggatttacatggctgtttaatcttctaaggaaatattaagactcctgagattgtatttycatgcctttataaatcatacattagtggtattaagacacaagaaaataccttttcaagctctattgcttgtaccaactataaaattaatagttaataccatgttaccatattttgttttataaaagtgacaaaatattaagagagctaattcccacctgtttttaaggccaatttgagtcattataaatattcagagacatttcagaacactgtttgaaaatatagtaattctctaacaatgtaaaacagtttttctttgtgagtgtgaaaattaactatgtaaccttctagtgcagggctttttaaacttgaatgtgatacacatcatctgagaatcttttaaaaatgtaggttcttatccagtaaatccggagtggtacctgagattctggatatacaacaagttctcaaggggtgccaatagtgctgacccatggaccagatattaccagcaagaatggagagtagaggtttgtaatgtaggctctatggattaccaccaagacttgtgctaactacataaaactgtatacaatgtgtgtgtgtctgtgcatttacaagatagagtactcataagttgtatcctgtttcaaagacttgtgacctgctactctgaattattagcatttcctcaacatgttacttatattgcaattcctgtgatataatcactgaaaattttataaaacttgatgtatgttatctttcttttggatacttaaaattaatataaagtgttaatcacttcaagaaatcctagagttattacacctatgtgactttcacctaagtgtttcctaaactatttggtaattgaattcatttttttttcaagttttaccaaataatattccaggaacaataaaaaagatactggctcacattaaataaaaattaatatttggggccaggcgcggtgactaatgcctgtaatcccagcactttgggaggccgaagcgggcagatcacaaggtcgggagatcgagaccatcctggctaatacgataaaaccccgtctctactacaaatgcaaaaaattagctgggcatggtggtggacgcctgtagtcccagctacttgggaggctgagaaggagaatggtgtaaaccagggagacagaacttgcagtgagccgagatcatgccactgcactccagcctgggccacagagtgagactctgtctcaaaaaaaaaaaaaaaaatagtatttggctctctgatttcccttctactactttttaagctatctttctgtgcagctcacatttgttccaccaacctatttaataccttggcctctcaaccttgtggcctcttcatttttaatgatctttttcttcaacattattgtagtcagccattcctgtgcttattattccaagtatatttttcttttccagaatctctcttttaagatgctattttctgaccaccactttattatctttctgattatgtattctctaatccttcatgccaaattagctttttatcttgctggaayatcgaatgcatgtttttcattcctcacgtttttgtttcctgtcttactcagcttagatttcatgttctattgtgataattactcttgtacttggatccacaattttgccrtaggaaacttctaggcccaaagttataccctttcaagtgatggctttcatcagcgactgacggagatggggataggtcatctccttgccccaatttggtagaatccttacaggcttcagagctcctcggaatgtcatttgagggctcagtgggtcaccttctctttttgcacaattccttcctcatttccttttgggtgtgtttcctggaggaactctgcatatagttcttcatacaagaagctgtgtctcagaaccaatctaaaagacactcatgtaaaattgaactccaccatrtttgttgttagttattttcctcattttattttatttacagtatttatcactgtctgaaattatagtccttatctacttgctggtttgtcatcatttatttttaataaaatgtagactctcttgcttaggaactttgtctttcatgttcagcactgtgtctcaagcacccacattatctttatccaatggtaaaccttataaatatttgttaaatttatttttgaattccatatttatataaaaaattacctcatggtaattatcatattcataattactatattgacaatagtttctaaaaatatttatataatatagtaatgataaaaatgttatctcctgatagtgtttatgtaccagaaggaaaaacaaaatcaaagaaaaacacaaaatcaaaataaattaaaggagtatactgaatagctccattacagtaagcatttagataacttagtcctaaacataacttgctttatattatttttcttaatattctggtctatactttaagaatcaatgattttaccaaagatgtgaggaaaaaatgtgaacacaggacrcattatttactcaaggcctactttatgccagaaaaataattttaggcatattaacatgtctttcttaattttcaaacactgttagcaaataggacattattattttcaaattgacagaagaaattgaagttgagagaagctaaatatktgttgaatgttgaaattcaaattaatctaatcacagctttgccagttacatattatgccatcttgggtaattcacttcactctttagatctctatactcttctatatattgagagggctcaattgcctttaagagttccgctggtttaaatgcttgctaatggtgtaagttttaagagacacaggcactttatgaccaacaccaggatgagaaagagccttagaaacacagcacgcattccaaacacgaacagtacatctctggcagatggagccttgtgtctggtaatgggagaagtaggcaaaagatgggaagatgatctgtgatagggtcctgacaaagattatttatgattattctagaaggcaggggaaacccagtgacagagaaccaatatacacctaatatgcagaaaggcagagggaaaggtcaggagtggggggcaatcagtatttagaattgcctcatctcaaggactgaggatcagaggtagactctattccacagaaacagttgtgcatgataaargcgtggggccaaggcacagaagcttaggtttgctagtaccagggcctaacatcagggtgggactagcatactctttatttggtactgggttgcaaagttcaccaaataaatgcccctttggtttttctagaagtaggcctgagtaggtactaaagtatgatggaactactagagggaagagagtgagtgtttctatctgaagattagaatactctgtgaagagcaggctggtctgcaatcttgactccacctgaaagataattattctaccaaagttttgttccaaggtcaaggctgatcttttttatctttttgatctgattatttaacagccatccttaaatgtatttagttacttataaarctttcctgaatagatttactgcaacattttgtaattagagcattcatgttagaaagtccttttaaaaatatagatgtatttgtctggatgtttattgcttgcttttagcacagattacttaatcagaataacagtggagcaagccaggccactgaaggagtagaaaacgcaactggtagggagagagaaytgggaaaggtctagggcacttggtgcttcctgagtatggagatttcccagagcagaactggcagtatcagaacactctaaaagacttccttaggagaaaaataaggaataagtgaaggtccctgattgtacctttctaattctatataatcaggttcttggttttaaatgttgcattttaagttctagatgttgacctaactattaaaactataaaaatattatcgatcctgtcttgttttgtgtttaatacataaactaaatgtctctttagtaatttcagctagaagacaawgtgacctattgtatagttatggtctcactgccatcagagtatatccgttgagttctggatttcccaaagcatttccaatttaaaattccacaaaatcagacttgayaatagatgtcatattcatcatactgcaccactatgtttggctatatttattttattatgattatattatctctcctggtttccccacagtaactattgaaccaagaagattcccaagttcatctctatccttcttaaaaagacattttttttttttgggaacagttagaaaattctctgtagaattagattgaagaggatgagatgaggtgaagtgaaaattcagaaggcatgttaagtagacmaaaaacatgaagcaaagttagagcaatctaaattctcaaatcccaaaatttctctttgaccacttctcattgctcagactttcccaggaatttcccattgaacccaccctcattaaccrtatttctagaggcaggttaactatttgatttgaagccatctttattagccatatttctagaggcagattcactatttggaatatgagagatatgtagaatacccagaaaatgtcaatagaagtggacttgatagaaaaataatttggctgataggataactccagaaatttaataattttgtttyggtatactgtacctattagcaaaaaagtatgccaatgctctttgaagttatttcaaatattctagttcaacttaagccatcaggattctgtcaagaaaatgagatatgtgtggttgtggcctgctcatatagaaaaagattagtatgaagaaytctccaattgaaaaatatctctccattccagtgtataaattatatattcatttcagctaggttytatacactgttcttttaaaatgtttaatgtactcattagacatctgaattacagtcattgacattttagtgtgaatttctttaatccaaacattgattgccaaggctatattcactaaagagtaagagtattattgaaagaataaatggaaagttggaggaatatttatatatcaggaagacctttatggctgacctaggtaggatactttgtacagcttaaggatgattaaaattttgggtttggaagaaggaacattaaaagatgatataaagatagaaggatactgaagagaatatttgtctactttataattttaacaagaccttgtgtgccaatgagaatgattaggtgccccttctgtcatgtggtygaggttttgtgactaaaatatgacatatactctatgaaaataaataaatggtttaatgaactataattttatagttgaaggagagaaaaaaggccaccatttggaaaataagaattgtataaaaaatggagatttaaaaggtacaactggatttccacatccatgggttccatatttgtgcattcaaccaactaaggataaaaaatatttgaaaataaaaattttacaaattttcaaaaagcaaaacttgaatttgactgtacattgagtactatgtcgaatctgtgcagatgaagctatgtgtaggcattttattaggtattataagtaatttagagatgacttcaagtgtatgtgaggatgcacgtaggttatttgcaaatactatgccattttacaccaggaacttcagcatctgtggattttgatatccgttggggttgtagaacaaactctgcattgataccaggaaggactataatttatgcgttagaacagaactgcaaataatgaatgaaaacatttaaaaatatgtaaaagttggccgggtgtggtttctcacgcctgtaatcccagcactttgggaggccagggcgggtggatcgcaaggtcaggagatcgagaccagcctggccaagatggtgaaaccccgtctctattaaaaatacaaaaattagccaagcatggtggtgggcacctttaatcccagctactcagaaggctgaggcaggagaatcgcttgaacccaagagtcagaggtgatagtgagccaagatcatgccactgcactccagccygggtgacagagcgagactctgtctcaaaaaaaaaaaatatgtaaaagttgtgaaagtgggcttttagcttcaaataaatatatgtctcayatcaaagccacagctaattaaagaactaagaaagaaaaggaatattcaaatatctggagtaatctaacaaacagcagtgttcagagtttttaaattattattattattatcatcggtgctagatatttctcctatagtatgtgatattgtacagaaacaggcccatccacttgatattcacataggctgctttaaaagtggagtggcaaagtagtagtaaatgtcactaaaatataggtttttttagatgtgttttgggtcgagttgagagtacataataaaaatgatgaattgactcaaatcttcctttcctgtttttttttttttcttttaagcacagttgtttaaattccctacaaggttagaatacatgcacttttaagaaagcattctaccgaagstaattgggtgttttccactatcacataaatctgttggctggtgtttgatattcttggaaagtcggaggataggcatttattagtatcagaggagccctttgaagagaaaattcatagtgtttaataaaagggtaaattaattagttctatgtaaataaaatcctttgaaagaaaattttattcagaaaccttttaaaacttaagaaatcaaaacatatcgaaatgatctgcttttgctatgaggaagatataagtatggttatttcactaaatagtcatggaaaaattatctatatcattatactatctatattcttataatgacataattatacaagagtggcagcatggagaagtggtttagagcaagagctcttgagttgaattgtccagatgtaatcctaactctataccacttaatatattggtatttgaactaggagcaggttgcttgattagtgtttgtctctatatctttgataagaatgaaggtaatgatactaattatctctttgtgtcatttggaagattaatggaactaataatatatgaagaattccttggatgtacaagtattcaacatcagcttattattataacaataaagacttttcttcatatagtttttggtttaagactcaggcattggtatggaaaacaaattcatatacattttgaaaatttccttggaacactggaaatccaggcagcaagaaagcttatagaacaagtaccttggacaggaaaaagcttttcaatgaacataaaaacccccacagtattttgtattccattcttattctttgtggtggtgatgaaaaasagtgcctaaaaatgaagagatgaaagaatctcaatcatcacttcttcatcaaaccactgagttatgtttcatgcccattctaaatgatggtcctcaaaagtggaggtgggtcttctttgggagccaagataatgcatatagttagagaatattcctcaaaattattttcattagttctcagatcccttttttcattgtcattaactgccatttaataagatcctttttttattcttcttgaagagagataacactgctgatagcaatttcagagaaacccatttttgcctctctctttccactgtggagtgaaactaaagagttaaaatgtatatataagcggacaaagcagtctgaaaggatgctgctttcaaaatatgactatttccaccctggtagtcagtatggctgaaaggaaaagatgtggcaaatcctgttactgatattctgtccaagggagtagacttggatcaaattacaaaaccaggaggtttagtttgaaatctgttttaagaggcaggttgtcaagaaaaagcaagaccttgcaagctagtgcagcataggacaggaacaccagacatctgagtcaagtacattatgatgtatggctcaaatatgatatgcagcaaaagaataggaaattgagttggtagtgctacccaaagcaaaccaccagaggaaaagttcaggagatgtttttgtggtttcaagttagaaagatatataggattcttatattactcatatataagagaagaacaytggatataaatgaatgcaaatggcaatgatgggggtcartgtacctcattttgagccaatcttaaaaaggaaacactgaaattagatgcactgtttaaagttagttgactacaatcatttagcactctattcgacatatttttcttaaataatttattagttggaatattaacgcaatttattgttaataaataaatttattgagaacacattatgttctagacatcaggtcacttatttaatataaatcacrtaatttaacaccacaaccatagttttctgtgtcaagcagtctatcaaaaactttgattagatctaagccagagctgtgtagcaaggagtgcaatcatggttatttgactctaaacatttttagagtccaaataaattcactggaatctgtataaagacactcattctgtgtccattataatgttaaactctgattgatcatactattgaaacagcatcctttagatagttgcttaactcttctgtatttcttcctaccaaactcaccctggccttagggcaaaggcaggagatgattatacaattccaccaaactcgccctggctttaggatatcacgcttacttctcccacatctcccctctctttggaatgttctgcccctaaccatttttcatggatctaaagcaggggtgtccaatcttttggcttccctgggccacagtggaagaagaagtgttgggccacacataaaatacactaatactaatgatagactatgtgaaaaaaaaaacccacargaaaaacctcataatgttttaagaaagtttacaaatttgtgttgaactacaccacattcaaagctgtcctgggccacagggctgcaggtyggagaagtctgacctaaagtgtcttatttaaacatcttatgtgaatgtattcataagttgttctctaaaataacattaggcaaagtgttgttacttttatacttattatttaatttaatatctctttctcttaaaggactttaagctcaagacagtcaggacattaaaaagtactgttacgctttaccttgaaattagccaagtgcccagcacacaatagaatctcaataagtatgcgctaggagtttagtcaatcatgtaacaggttctttctgtctgctgcacaaacaaaatcaaactactgagaccacagcattgcagtagtgaaygagtttaattgacctgaagctggcccatgtaagagaacctgggctgttggtcaaatcagcctctctgaaggcttggaagttagggggttttaatggacaatttggtggtcaaggatttaggttatgggtgctactgattggttgaggataaaatcataaaggtgtagaaaacggtcctcaggtactgagtctgcctctgagtgaggccacaagaccagtaaattcaagagtcatgagtccagttggggttagtctgaaaaacatctggaaaaaaaaatctgaggttctacagtagtgatgttatctgtaggagcaattgagaaggtcacaaatcttgactcctgaccacataactcctgaycagtaagcgattttagaaattacatctatcttgtggcctctcagtcttacaaagacagtttcagtctccaaacaaggaggagttagttttagggaaggaatattatcatttttgtttcaaagttaaactataaattcctcgcaaagttagcttggctgatgcccaggaatgaccaagcacagcttagaggtcagaagcaagatggagtcaagtatgtcagatttctcttactgtcatgattttgcaagggcagtttattaatgaagcggattgtacagtagctgtcttgcaaataccgttttaggaccaaactggggtctgctcaccctgtgcagtaaaacgaggtgatatggtttggctcgtctccccccaaattacgtcttgaattgtaatccccrtgtgttgagggagggacatggtggaaggtgattggatcatgggggcagttccctccatgctgctctcatgatagtgagtcagttctcatgagatctgatggtttaaaagtgtttggcagttgcccctgctcctgcctccatgtaggaagtgcttgcttctccttcaccttccgccatgattttaagtttcttgaggcctccccagccatgtggcactgtgagtcaattacaattcttctttatcaattaccyggtcacaggtatgtctttatagaggtgtaagaatggactaatataccagatatctacaccaggatagtgatagaaagaaaggctttmattgcagggtgccaagcaaggaggaccaggcagctaaatgctcaaatcctgatctccttgatggcttgcacacaaggttgtctaaaggcaagggtaaatgtcaggaaagcagaagatacaggcaaaatcataaataatacatggaggttacacattggtttaggcctaaaagggtgggatttcttgaagcaggggcttacaggtcataggtagattcaacgattttctgatttgcaattggttaaggcagagaagtttgtttaagaattggagtgagtagaaaaatgttaactaggtagggggagtgactttctccaaggccctcgggaaaaaacttggaacaaatatgatgattaaagttcagtcttcacttccccttatctgaggtcttcatgccagtggatcccttaggtggggggttccctgtgggggtccragtttctgaaagacaactcagtgacattaagatgttaccataagtttctatgcagaaagcaagcatctctggaactctaacttccttggctgttgttttaggctacgattatcttcttgtttaacaagttccttattttccttatttatttctaggactaactaggttcctagaatttccatcctrgaaactcagcatttgtctttatgtccatgattgagatccataggcttttaaaaagtggtatccctgctctatctcaataatatttcaggtctctgttaactgttaatatattgacatatgagtaaactgaaaataatttacaaagtaattaatgaaataaaaatgtaagaaaaagccaatgtatratattggttcatttgaacaacttttattgaacgcttattgtattcctgacactctttttggtactgaacatttaataaatgaagaagamaaagtgtttttcctcaaggaaatcacagtcagcagggaaatatacaggtaaagagggttgaacagccagaggattaataaactctatgcatctaatcaatggttctcataataaaaaatgcaactaatttaattcagtacagtctctttaatattgtatatctgttgggttagtgattactttcttatgttccttgaattatgagtaatataaaatacagcatgaaataataaccattatattgaacaaatgaattttatctgaggtatttcacattcatgtgagatgaaatcagttattattttgtctcatgagcattttccactttgagcattttaacctcactatcggtggagctatctatttacaactaaatttctatttaccactaaaaaataaaagaggccgggtatggtggctcatgcctgtaatcccaacacttttgggagactgaggcaggtggatcacctgaggtcaggagtttgagaccagcctggccaacatggcgaaaccccgtctctactaaaactacaaaaattagctgggtgtggtggtgggcacctgtaatcccagctacttgggaggctgaggcaggagaatcacttgaacctgggagacggaggttgcagtaagccaagatcacaccactgcattccagcctgtgtaacagtgcaagactccatctcaaaaaaaaaaaaaaaaaagaaagaaatggaataatttaatgatggaaccaacttgcaaaagtaaaatcaaaattcaatcaatatttgcatgcctactaaatgccagctactatgctgtgtgtgtgtgtgtgtgtgtgtgtgtgtgtgtgtgtgtgtgttttgagacacagtctagctctgtcaccaggctgaagtgcagtggcacgatcttggctcacagcaacctccacttcagtgattcttgcacctcagcctctggagtagctaggattacagggacacaccaccatccatggctaatttttttatttttagtagagacaaggtttttccacgttggccaggccggtcttaaactcctgacctcaaacaatcccctgcctcagcctcccagagtgctgggattataggaataagccactgctcccggactatatgtatatttttatttaattcttacaactgtctcagagactgtaaatcttattaaccccattttattaatgaggaaatgcaagtttatggttaacactatatctaagtttatagaactggtaagcagcaaagccaaaacaacactcaaggactcataatttagtcaaacaacaataaggccacataatttatctatatgttaatgcctctctttatctgattgcttctctatattatgacatacctgtggtcttttcagaatgatcatagtccccattttccaattcagaatactcccagtacttatcagacagtaggtaccaggcttatttctatgtctgtgttgtctttgtatatgacacacccaattatactagtaaggcatattcattcatagggaagtcaaagagttccttgattttatatgaagctgttggaagagaaaataggtatcaaaagttgaataatcagcaataaaataaaattgatagatatagctatctatctattgaaagaaataagtaaagtgagtcagctcaaacatttcttgatgagacaagtttatattatagcrgggaagagagggataaagctaccagagattttgtttccaaattacctatgacatgcagttatagaattgacatgggagagakgtggaaatagagctgccacttatgaatatgtgtattatgtgtatatatctatatatctatatctatatatatcactctttctcacacatgccaatatcgacagcttgaagtgcttagtgtgggtatattgatttcatttgccattaggcccctcagtcaataacccatttataatataygctcttcaaagctatccactggggcaaaagagcttgacaaagagaatatttaagttacataaaaagcaaatgataaaaattactaattatctcatgttccaacagattatgtttctcttttgccttggctgccagaaagcatagtgacaaatctgtaggatattaatggtaattctcttgaaccttatggttggtttatttgtattcttcttttctattttttatattttctttgtaaacatgttttgattctttgttttgttttcattttttatcagcttcttagcttcaggattattcttataaatactaaatttaataggctataaaaagcatatgtatgtatgcacacatatatgtctgtgtgaatatgcatatgtgtatgcctttaggatcttaatttttttaagccattgtaaattattattatatttaggagttcatcttctaagtttgctgttttgacaaggagataattttgacataaacaacttataaacaagtggcataaayttaggtttgttgggacagagaagtgacattatccatatcaggggatatattctttcttggcacctgacagcaaattataaaaattaacacttaaagagctgaacatatgtcatataagccagttatagagaaagcagtatcactggaacatgattaaattcactacatataactattcattgaaaatataatgatattaggtcttatacagcaatgttttttagatgacagcatagatctgtatagwaggataaggaacaaaggaattttgcattttggctttgatagctgatgacagagtaagtgtgagaaaaatagtccagttcttatttagttcctttaatgtgattttataatatatagcatcttcacttcacacgcatataccacagaataaattaggatggaatgtagggtgccatatgcacgcatttacttactcttgactgtcaaagtcaagtattatgtttatcattcaggctataatattatatatctcttgtgktttttttctgttaaaataatattgttctaagtgatcagtttctttcttaaaatgttgaaaattcactagtgcagaagacacaagaggcaaccagatgcaggaaaggaaaataaatcagagcccatggatacacagcattgagaaaatattcacagtcaattttaactcaggtgtctggtgtgaataatactataagaaaacaaagcttatgtcaacatttgaaattgtatgaagaaagcaagggtaattatagtcrcccagattattattttacatctaaccttaagcaacagggtagacctctaaccctaaaaataggaagtgaaataaagaacatagatatcagtgaaattactattttcagttcaacagacatgattggaaaaggaaataaaatcaaagaggcaacaaaatgaaaactaaagtaaaaggaaatcagaccagatgttgtgaatctgtttttcatgcagagatgcttaaatgcaaggaatggccttccaggcaaggttgctgagataataacactgaatttgtgcaagatggtttgattagatggtctgacagtggaggtttagaactaaaaggagaataagctatgtaggctaactgcactctttgcatttttaaaagaaatttcatatcttcattcaagatcttgaattgagtaaaagagaagattataatttctctgattttaatttagtcttagcactaaaaaaaagtgttctgtttcatgttttatctatcttttccatactgtacctctcatttctatcagtgtttttgccgtcatgttacctttcttcctgattttattatcactggcctcattacagtacgtccactggtttctcctactgtgatccttattatatggttgtgtgttctatgcrttactgtctttcatcatgtttgagtcctggcaagaatttcttctaaatacaataccatagatacattacactgatcccatgcaatygttgtaactgctgggcatatgactgctattcatgccaattttcactttccaagtttctgtatgagacaaaaaatttgttcttgagcacataattaggaaataagagaactattggtgttcctatctttaacagggaagatttttaattttcatgccactcttttcataaatctgatctaaacaaaactgaaatcttgtacacaaaggccacgaattgtactttgcaagttgtgaaagagccaactgaaaatacttaaaatgtgcaaagaaaagaaagagaatataaacaataagccatgtgataaaataatatttgtaaattggttatgtaacataaaactctcttamtaaaatatcttttatataaatattactctagtaataactctcacagtaagtcaattacttgtcttcaaactcttaatagctgttgtcagcaatgcctattaaacatatacttattattttgatrggaaaattgccccacccctactcccacaatcacccaggaacttgtaaatacacaataaacttttaaaaaattattttcataaagaccaagatatacacattgtgatcagtctgatcccagtgggacaactcacggtacataatgcaatgatgtacacatgtggaaaaagtaagtatgtcattggaaaaataaatggtctagcattgtttacccatgtacattatgrcatttatcatgttccttggagtcatttctttagttgcttatttctacgactagactgtgagttcttttaaagcaaagacagtgagttatttatcttgaaatttctctacacctcacaaaataccttgtagtaggaactctgcaaatactcattaaaatgaatatatcattattcaatgaaagagatattgaatgaatgaatataccatgtgaatatatatatgagtactaattaaatagaaaatattagtttggaattactatcatttggtgggcaaagagagagaggaaaacaatactggaagaactaaggatgttaagctttatctgtgggtatcaatgttatatttacttcagcaatatataaatgttaataaatggtagtttgcttagttccctaagccttagctataagagttctctgtttaataacaatggctaatcaaggatagagtataattttaatagtatcttacaatagtaatgcatgtatattactgcatgcaatattattttatggaaaatatatcaatgctttaaaaaataaaaactactcataatgccactatttattgaaaactacaattaggagtttggaaatttccttccatatatttttcttaaaatgtatgtaattatatgctatattgtagagaaataaatatatgaattttaaatgagggtcctatttaatagatacatagcctgatttttttcacttaaaattatgtcataagcatctttttatgtaatttaattactttataagtgaaaagcttatattggtttgttatattctattaaataaagttattatttgtgtttaccaatggttagtttgcattataaattaaaatcattgtttcacttcaatcagtagctgtggtttaaattttattttgacatgaatctgtaaacttatgtgtgcatagaaaagcatcttctttattagaaatggaatttctttgaggatgrtaatttggggactatttactagaaatggaattgcttgagggtgataatttgggaactattatttcctgatctaactctacccatccataaactcatttctttaaaatgcttaataactattccaatgaattgttgggaagctgtggttaaattactcataaacatttctagatctgctgtaaactgagttcatttacaaggttttaatacatgtcagaagcctaaggtgtcactttcatgtggatgcccaatttataattgaggcgaaaatataattactctcttaacattttaatccttgaaaattgtactaagttatttcaatactttttaaaattaagtttagtaaactacatcattaattattttgcctgattacatwccatgtattaggataaaactggttcaatataactaaaagggaattttagtatccctcttttaatatctaaataagtatagtttattcagttcaataagattttggctcctgcatatgctttcagagttaaattagaaagctaatagtatataaatacatatctttgtattctattatttgattggatagagaaaatatggtatatgcatggaatactatgcagccattaaaaagaatgaaatcatatatttttccagcaatataaatgttgctggagggcattaatctaagtgaaataactgagaaacagaaaatcaagtaccacaagttctcacttacaagtgggaactaaacaatgggtacatgtagacatgaagatggaaataacacacaacgcaaactccagaagggggaagggtaggagtggggcaagaattgaaaaattacctattgggtaccatttttgctacgtgggtgatgggtatgctaggagcccaaacctcaccattacacaaacctgcacatgaamcccctgaatctgaaacaatataaataaataaataaaaattacagagagtatcaagaaatagagaactcttaagagaacaattactgatgytggtgaaattgggatcttgttcagaggttacagaatggctatgattaggatctgttagagaatcttctagaaagctttrtggcaggttcatggagaaacttcatggaaaggtaaataataagtacagactttttggaaatctgaggtaagatgaaccacaytgaattcctgaaaacatggtaccttttaagccatatctttttgccttgtatttttttattagtctttgtaatttgttgtccaattccatgtagttttatagcaatttacatatgataaaaacaatcagggtgatacagaatattttgtgaatgataccgatttgggcatggaaaaagtcataccttgtgtttgcttttaacctcatggactcctcctttgtcatacctgtggaaaattcaagtttttagttatggtttccttgaagcaattacaaatgrtgctgaagagaatttgtctcatagagagggatctgttctgacaatttttgtgcacctctgagcaaaatataagagaaaaatgaatttcagcaaaagaatgctgtacttgactttaaaattaattcattgactaggaaagtgaacttccctaagacgtatatctactaatagtcttcttctcttttgttagcctttttttcccacgtggagagatactgtattttcgaaggtagtaaagataattgagctgtgtatatacttattattctgaggggaaaaaataaataaaaacttagtaaaatttaccaggttatcagcaactcatttattcttaattttatctgtacatttgcattctatctrtgcatttgcatttattgtactttatttgtttagggtttcttttctgctatatgtgtcatatacctctagggggttattttaaacagtactgggatttgcttttctgtgtccaaaagcacagattttatatttggacactcaagttgttctrtattttgaactatgagaaaggaataatacccgattgaatactgactgtttttttataagacaatcgagcaacagaggcattcaacattagcatccagtgtgcaagacttgaatggttttattgcataatatgggagaattgctcactactgtctgttcctgctgacagtcctgatgctcagtctggtaatatcctgaaagatttcttcttctttttttttttttttttttaacccagtgctttgttattagatgttaataggttctcagtctgtgggagaggaagcaatgggacaattaacatgaaaaagctcagtagtagaggagttgatggaaaagagtatggtctgagtgagaatgcctaaggtttgtttcactttttctgtttgtttattttgtcaggataagaatggcataaaatgcaataacttagactttagctcctacaccagaatagctaagtagctaaggcactaaacttcatttgtttatttattcttctatggccaccttcctggtgatgtctctagaatacttgaagttccctctagctatgatggctccttattacagatccagaatgttaacattaccagagcatagtcaatgtaagctttgcagaattaaaattatccttctaaaatgcatagatgattatcttatgctcartgaaaattaatgtgaaaacttataatgcattcagctatagattactatagcataaacaatcttttgtaccatttctataaaatttagaaaatattttaaacctatgattttcccttcccattatacatttggaatagctgaataatataattatagaatcaccttatcttgaagtcagatgagactttagcattttttrtagaaacttagcaggttagataaaccttgattttgagttatgactcaaattactataactttgtgaattttgagaacatatttatcagctcaaaggctctattttgctccaactatamaaatgaaatgtaacagatctatctcttggaattattatgagaattaaacaaaatcttatgtatatgttacccaacacagtgcctggaaaagaagagagactcaaacagtatttgttaaaaactccaagaaaccagttgacaaccagaaggtgttactgtgtgaaggctagaaacttggggaaagaataggaccaaactttttcttagttatattctcagaaaattgtagtatgttcacaattcctacttcattgttggtagacatctgtaaataatgtatgtaattgaatatttttattcctattttagaagctgaacagtgcttatttaaggtctaaaatggacttgacactgaatgtagaakgtttgaagaacatcctttattgttactattgatgaaccaatactgatacattattattatgtaaatcctaccgtttacagtaggcttcaccttgtgttgtaaattctatggattttgacaaatgtatattaatgtgtattcaccactgcagtattacacagaatagttttaccatctggaaaaatcccctacgctctacctatacattttaccctccctaggaattttattgttcccgtagctttgccatttccagaatgacatgtaattgcaatcatacagtatgtagcctttcagattgacttctttcattagcagtatgcatttaaatttcctgcatgtcttttcttggcttgatgtatcatttttcatcgctttttgtacattccattgactgagcgttccagtttatccattcatctactgaagaacatgttggttacmyctaagttttggcaattacaaataaaactgctattaagacacatgtgcaggttttgtgtgaacgtaagttttaaatttatctgggtaaataccaaggtatggttgctcgattgtatagtagaagtatgtttacttttgtaagcaactgctgaaatttcttccaaagtggcattccaaactgtcttccaaaatgtcattttacattctcttcagcgatgaacgagagttcttattgctctacattttcaccagtgtttggtgttatcagtgttttaaattttagtcattctaatagatgggccatgtgttgttttgaattgaaattccttgatgataaayaatgttgaccatgtttttgtgtccttatttgtcatctgtatgtctttggtgaggtgtctgctcgcatcttttgctcattttttaattgagctgttttcttattattgaattttaagaattatttgtacatccttgataccagtcgtgcatcagataggtgttttgcaaatgttatcttccagtctgtggctttttattcttttttttgttttgttttttgagaaggggtctcactctgtcacccaggctggagtgcagtggagcgatctctgctcactgcaacctccacctcccaggttcaagcaattcttctgccacaacctcccgagtagttaggactacaggtgtggaccaccactcctggctaatttttgtatttttaaagtagagacgggtttgaccatactggccaggatggtctcaaactcctgaccttgtgatctgccctcctcagcctcccaaagtgctgggattacaggcatgagccatcatgcccagcatctttttattcttttaagtgtcttttgcagagtagaagttttaaatttttaygaagtccaatgtattcattttttgtaaaaaaattgttaattatgtttttggtgttatattttaaaagttcttgccaaacccaagatcacctagagtttctcctctgttatcttacagaagctttgtagtactgcattttaaatgtaggtttatgatttaacataaaatgtttgctttatatcttttcttctggatagcactctaattgaaaaatcagtagcttccaagtcaaggtgtacagtctatggataattttataaatttgaaagcctgagttttacaaatttaacatgagcatgtgtcaaaaatttatttttgagaggcgctaaaatgataagccttgtttaaaaaatttagataaagaatggttcaataaaatttctcatttagaaacaaaactggttaatgtcctacagagcaatgaagctatagcctttaggattatcttttctacaaaaataacactttttgtaacaagaatcatttacatggtcatcaaatttttttttaaagagcattaactcttacagagttttaaaatatcctgatcgacactaatagcaagtggaacaaagatacacactccttgagaattagatatttgccaggtgggcctgattgcaatgtctgttcaacaggacattaaaaggacaagcaatagtccattttttctgtttccaagctttgataaatttcttaacaactacacaagttgttacaagagcctacttaagacatattgagagaaatatgaagccttcaatgactttcttttttttcgtgtgtgtgtgttcttctatagaattgtgtgtgaataagtgctgcagagtttgtataagtattgttgataattggcttgtaaatagcaatattggactttatttttctttcaataattttcaaaagtaagtcaastaaattcgagctgtctaaaagcgaaagaataagcagctttcagtgcaaagaaactgggcaaattttgttaaagtttaacaaaacttttgtaaaattaccaagtgactacaattttgactattgtattgggcggaataaaagacaataaaatacaaagtgctttattttctggttactagattgtgaatcctttgcagacagggactgtastttatcttttatatcgtctacattttctaacatatattaagactttggaaagaagagacagaagaaaggatttaggaggtaaagaggaagaagggactttacattttacatttaactgtatgcatactctgtattctcaagctagtttttgcttagatctttctgtgggatattatttaatttggaaaccaatcatcatagtcaaactcctgacaaacaaattctgtaagtasatagataagcaacaattaactcacacactaatgcattctatttgctttttagtttcatgtatgttgggtaaatgsgaaagaaaaattactgtattcttgtttttatttgttgaacatttatgtagttgcctatgtaatgtgtttttaatttatagctatggagccaggtatgcaaaaatggaaacttttttttataattaaatttagcttaagtctcttagctcatatacactgggtagctagamttaatcttgacaatttagaaaattcaatcgattttgcattataactcagtttctccagaaaaactagttaatatctttttctctcttcttcccttctctgaatctttttcttgtgtatgtagatatyaggggaggaaactgttgatagtgtatcatttcttgcttgatggattatagcataaactctcttccccttaaggctttgctgttgatgtattcaaagtcccacttcaggaattaaaaggagaaacttttacctctgaaccaatctagcttttgcaaacaaaatgtgctgctactttcagtctgttctctggactatagatttataaaattctactttggctgtagaaagccartgatttaacattttgttttcactgaattttgtttgttttctactttccctggggcaatagatttgacctttaaattctggctttaactgttgaaaactggccaggtgcaggggctcactccagtaatctcaacactttgggaatctgaggtaggagaatcgcttgaggcgaggaggtcgatatcagcctgagcaacgtagcaagaccctgtctctataaaaaattaaaacagccaggcatggcggtgagttcctgcagttctagctacttgggagcctgaggtggaatgatcacttgggcccaagagtttgaggttgcaatgagctatgattatggcactgtaccccatcctgggtgatagaaggagaccttatctctctctctctctctctctstctstccatatatatatatgaatgaaactgaacaactagaaaaaattataattttaaaaatgcatttcaaaattttattgtgctacacttcctgtggtgactgaagatggagttagccagagaagcttgcaccaaacaaagtatcttttagtaaaacatcaattcctttattatcccatgtattactattttccaacaaaatagaaatcaccctttgcatctcaagatggctataaaaatgattgatagaaattgctaataattcaccaattgtctgctcttaaatgaatgcatttcagcatttacgctaacaccaggacattccacccctcacctcagagcaaatgttaagctgatactctgaagctgttaagaaaaatcttcactatgtgacaatccttcaaaacataatattctaaatgtgcttgttctataataacatattctctttcttttaacctcattttaaaaatgatgcatttgttgagttcaagtgcatctacttcagaaaaaaaaawtttttgaggagagaaccaaatgacttttgctgtgtttaaagagtaaacccattccatcagaagcaaagtctaaagagattcaacagtaggaagttgtatacaaggtatttggcattttttttctttcctaaaagtttaaaggctgtgtagctaggcataaaagctcaagccttcatgaagttcttttagccacttaaattcaccagaaatataaatagcagagaaataatcatttttaagaagttgcttaatgtttagttattgtgcatatgtgggaggtacctaacattttgattttctttttcgggcattctatgtttagagcttcatgcaaatagttgttcctagcattctgtaaagcattcagggtaatgggaacgtgtcacagtaatacaaactttgtgaaccttttctaattattttgtgctatatttaatcttagtaatttcaaagatcatttacacatcttctctaatattcttactatagctgctttgggttaagtctggttatagcttcttttcgttattttatttataattttttcatatcatatgtttatataagacttttatttccatatctgaccttacatctataattcttcaacaagatttaacactatggcctcagacaggattatttaattgtgagcagtaatcacacaaccttctgcaaagccaaacaaaaaaagaaccagaaaaattcttgctatatttttattcactgctttaaataataaattcatgggcatatagatcatacttctacagaagaggtgactactcattcattgttagtgaatattctttgtatattttctcctctgcaaaattcactrgggaaaaaatagtttgtacaagctatcatttcatctttaattaaagagaaattacatagtgtattatatattattaatcttccaagaacagacattgtttttactgtaaatattctttcacttttataggactaagaaaatagctctacaatataaaattgaacaccttagtgaatacagagtaaacattcgttgaatacatatatgttgcatttgtttttaaaaaaagaaaccttgccaatatacttgaaaatagtagcttcttctttcttttactactatactttaatttctagggtacatgtgcacaacatgtaggtttgatacataggtatacatgtgccatgttggtttgctgcacccatcaactcataatttacattaggtgtttctcctaatgttatccctcccccagccctccatcccctgacaggccccagtgtgtgatgttccccaccctgtgtccaggtgatctcattgttcagttcccaccaatgagtgagaatatgcggtgtttggttttctgtccttgtgatagtttgctcagaatgatggtttccagcttcatccatgtccctgaaaaggacatgaactcatcctgttttatggctgcatagtattccatggtgtatatgtgccacattttcttaatccagtctatcattgctggacattgaggttggttccaagtctttgctattgtgaatagtgcagcaataaacatacgtgtgcatgtgtctttattgtagcatgatttataatcctttgtatatatacccrgtaatgggattgctgggtcaaatggtaattctagttctagatccttgaggaatcgccacaatatcttccacaatggttgaaccaatttacacacccaccaacagtgtaaaagtgttcctgtttctccacatcctgtccagcatctgttgtttcctggctttttaatgactgccattctaactggcatgagatggtatctcattgtgattttgatttgcagttctctgatgaccagtaatgacgagcattttttcatgtgtctgttgactgcatagatgtcttcttttgagaagtgtctgttcatatcctttgcccactttttgatggacttgtttttttttctagtaaattggtttgagttctttgtagattctggatattagccctttgtcagataggtagattgcaaaaattttctcccattctgtaggttgcctgttcacgccgatggtagtttcttttgctgtgcagaagctcttcagtttaattagatcccatttgtctattttgacttttgttgccattgtgtttggtgttttagtcatgaagtccttgcctatgcctgtgtcctgaatggtattgcctaggttttcttctagggtttttatggttttaggtctaacatttaagtctttaatccatcttgaattaatttttgtacaaggtgtaaggaagggatccagtgttagctttctacatatggctagccagttttcccagcaccatttattaaataaggaatcctttcctcatttcttgtttttgtcaggtttgtcaaagatcagatggttgtagatatgtggcattatttctgagcctctgttctgtyccattggtctatatatctgttttggtaccagtatcatgctgttttggttactgtagccttgtagtatagtttgaagtcaagtagcatgatgcctccagctttgttatttttgcttaggattgtcttggcaatgtgggctcttttttggttccatatgaactttaaagtagtgtttctccaattctgtgaagaaagtcattggtagcttgatgggggtggcattgaatctataaattaccttgggcagtatggccattttcacgatattgattcttcctatccatgagcatggaatgttcttccaattatttgtgtcctcttttatttcattgagcagtggtttgtagctctccttgaagtggtccttcacttcccttgtaagttggattcctaggtattttattctctttgaagcaattgtgaatgggagttcactcatgatttggctctttgtttgtctgttaatggtgtataggaatgcttgtgatttttgcacattgattttgtatcctgagactttgctgaagttgcttatcagcttaaggatattttgggctgatatgatggggttttctaaaagtacaatcatctsatatgcaaacacagacaatttgagttcctcatttcctaactgaataccctttatttctttctcttgcctgattgccctggccagaacttccaacactatgttgagtaggagtggtgagtgagggcgtccttgtcttgtgccagtttccaaagggaatgcttccagtttttgcccattcagtatgatattgggggctgtgggtttgtcataaatagctcttattattgtgagatatgtcccatcaatacctagtttattgagagtttttagcatgaagcactgttgaattttgtcaaaggccttttctgcatctattgagataatcatgtgttttttgttgttgattttgtttatgtgatggattatgtttactgatttgcatatgttgaaccggccttgcatcccagggatgaagcctacttgatcatggtggatgagctttttgatgtgctgctggattcagtttgccagttttttactaaggattttcacatcaatcttcatcagggatattgatctaaaattctctttttttgttgtgtctctgccaggctttggtatcaggatgatgctggcctcataaaatgagttagggaggaatccctttttttctgttgattggaatagtttcagaaggaatggtaccagctcctctttgtatctctggtagaatttggctgtgaatccttctggtcctggactttttttggttagtagcctattaatttttgcctcaatttcagagcctgttattgatctattcagagattcaacttcttcctggtttagtcttgggaggttatatgtgtcgaggaatttatccatttcttctagattttctagtttatttgcatagaggtgtttatagtattctctgatggtagtttgtatttctgtgggatcggtggtgatatcccctttatcaatttttattgcgttcatttgattcttctctcttttcttctttattagtcttgctagcagtctatcagttttgttgatcttttcaaaaaaccagctcctggattcattgattttttgaagggtttttgtgtctctatctctttcaggtctgctctgatcttagttatttcttgccttctgctaggttttgaatgtgtttgctcttgcttctctagttcttttaattgtgatgttagggtgtcrattttagatctttcctgctttctcttgtgggcatttagtgctaaaaatttccctctacacactgctttaaatgtgtcccagagattctggtatgttgtgtctttgttctcattggtttcaaataacatctttttttcttccttcatttcgttatgtacccagtagtcattcaggagcaggttgttcattttccatgtagttgtgttgtttggagtaagtttcttaatcctgagttctaatttgatggcactgtggtctgagagacagtttgttgtgatttcttttcgtttagatttgctaaggagtactttacttcccattatgtggtcaattttagaataaatgcgatgtggtgatgaaaataatgtatattctgttgatttgggatggagagttctgtagatgtctattaggtctgcctgttgcagagctgagttcaggtcctggatatccttgttaaacttctgtctcattgatctgtgtaatattgacagtggggtgttaaagtctcccattattattgtatgagagtctaagtctttttgtatgtctctaaggacttgctttatgaatctgggtgctcctgtgttgggtgcatatatgatagttagctcttcttgttgaattgatccctttaccattatgtaatggccttctttatctcttttgatctttgttggtttaaagtgtgttttatcagagactaggattgcaacccctgcttttttttgttttgcatttgcttggtagatcttcctccctccctttattttgagcctatatgcatctttgcacatgaggtgggtctcctgaatacagcacacttacgggttttgactctttatccaacatgccactctgtgtcttttaattggggtatttagcccatttgcacttaaggttagtattattatgtgtgaatttgatcctgtcattatgatgttcgctggctattttgcctgttagttgatgcagtttcttcatagcatcgatggtctttacaatttggcatgtttttgcagtggctggtaccagttgtttctttccatgtttcatgcttccttcaggagctcttgtaaggcaggcctgatggtgacaaaatctctcagcatttgcttgtctgtacaggrttttatttctccttcacttatgaagcttagtttggctggatatgaaattctgggttgaaaattcctttctttaagaatgttgaatattggcccctactctcttctggcttgtagggtttctgccaagagatccgctgttagtctgatgggcttccctttgtgggtaactcaacctttctctctggctgccgttaacacttttcccttaatttcaaccttggtgaatctgacaatcatgtgtcttggggttgctcttgtcaaggagtatctttgtggtgttctctgtatttcctgaatttgaatgttggcctgccttgctaggttggggaagttctcctgaataatatcctgcagagtgttttccaactgggttccattcttcccatcactttcaggtgcaccaatcaaacatagatttggtcttttcacatagtcccatatttcttggaggctttgttcatttcttcttactcttttttgtctawccttgtcttctcactttatttcattaatttgatcttcaatcactgataccctttcttccacttgatcgaatctgctattgaagcttgtgcatgtgtcatgaagttcttgtgccatggttttcagctccatcaggtcattgaagatcttctctacactgtttattctagttagccattcatctaatcttttttcaaggtttttagcttccttgcaatgggttcaaacatcctcctttagctcagagaagtctgttattaccacacttctgaagcctacttctgtcaactcatcaaagtcattttccatccagctttgttccattgctggtgaggagttgcgatcctttggaggagaagaggtgctctgatttttagaatttccatcttttctgctctggtttcttcccatctttgtggttttatctacctttggtctttgatgttggtgacctacagatggcgttttggtgtagatgatctttttgttgatgttgatgttgatgctacttctttctgtttgttagttttccttctatcaggtccctcagctgcaggtctgttggagtttgctggagttctactacagaccctgtttgcctgggtatcaccagcagaggctgcagaacagcaaatattgctgcctgatccttcttctggaagcttcatcccagaggggcagccgcctatatgaggtgtctgwtggcctctactgggaggtgtctcccagttaggctacacagaggtcagggacccacttaaggaggcagtctgtccattctcagagctcaaccaccatgctgggagaacgagaaccactgctctcttcatagctgtctgacagagtcgtttatgcctgccaaagttgtcttctgccttttgttcagctgtgccctgcccaagagatggagtctagaggcagtaggccttgttgagctcggtgggctccacctagttcgagcttcctggccactgtatttatctactgaagcctcagcaatggcagattccccttccccagccaggctgccgcctcgcagatcgatctcagactgcygcactagcagtgagcaaggctccatgggcatgggacccactgagccaggcaygggagagaatcaccttttctgctggttgctaaaaccttgggaaaagcgcagtatttgggcagggagtgccctgtttttccaggtagtctgtcatggcttcccttggctaggaaagggaaatccgctgaccccttgtgcttcccgggtgaggcaacaccctgtcctgcttcagctcaccccttgtgagctgcacccactgtccaaccagtcccartgagatgaaccaggtacttcagttggaaatgcagaaatcatccatcttctgcatcaatcacactgggagctgcagaccggagctgctcctatttggccatcttggttaggtgaaaatggtagcttcttaatgtgtcattaaagtgtacatctgtggacttcttaaaaattgatgattaytataccttctaaggtccaacctatacttctgttccaggggaaatatgataatatacatatgctttctgttgagattrgaccatgactgtatttactgtagggcttaatgatacattcataactgaatgctgcaaattaggttaaagccctagttaatttataatgaaggttttcagtgtttaatatttttaatataagtgactttaaatgtccttaatatgggttaaatttatctaatttcagataacagatatgtgttcacttaggttcatagcccatgatttaagaatgtcttataagagagcttcattcattcattcattcattcattcaacaagcattcttgttagcctaacaagtgccaagtattataacaagtactacttagaatacctcgaggaataagataaaattctttccctcagatatatttcaaattctactagagagatatttttaaaagtaaataattaaaacacaggtagaatctctaattgaggcacataaaccattttatgtgaatcctaaacaacatggaacaaagttggttttgttgtagagaatgaggaggtcagcatgcatttcctgaggcaggaacatttgcctagtgrcttgaaagaatagtaggagttgagcaagcaggtcaaaggggacagactgttcaggccaaggttctaatatgcccacaggacagaggcatggaagatcatgaaggattttggaaatcataaaatatgtataacagaataatagaagccagatctcagaaggttaacagggaccatattcaatggtagtttgactttattttcttttttcaaaaattatgtctcttaggtctgcttgttgcagagctgagttcaggtcctggatatccttgttaaccttctgtctcattgatctgtctaatattgacagtggggtgttaaagtctcccattattattgtgtgggagtctaagtctctttgtaggtctctaaggacttgctttatgaatctgggtgctcctgtattgggtgcgtatatatttaggatatatttagtgttttggcttctggctttatcacatgaatccccacttaatatctttaatgactatttctttaaaacacacacagaaaacaattataacagtaagatctcagtaattccggaacatatcattatgaaatatatgaatacatatatgattaaataatgttatgtttataaatacatttaaattttaactatatataattaatttaatatatatatatakatagatagatagatagatagatagggcctcactctattacccaggctggagtgtagtggcatgatcaaagctcactgtagcctcaaactcctgggctcaatcaatcctcccacctcagcctcccaagtaactaggactacagcaacatgctgctactcctggctaaatttattttgttgtaaagaaagggtcttgctgtgttttccaggctggtcttgaacttctggccccaagtcatcctccttcctaggtctcccaaagtactaggattatagatgtgagccaccacacccagactgattttattttttgkacgayaagagggaagtgtgactctgaaagaaaactgaagaataattgtcytttgtagcaaacacacacatagtcagcacatatacacaagcagattgggaaagagaaagacagagagacacagacagagagagtgagagrgacaaaaaaagagagaaagagaattaatgatatgttctggaattactgagatcttattgttataattgttttctgtgtgtgttttaaagaaatagtcgttaaagatattaagtggggattcatgtgataaagccagaagccagaacactaattcttttaatattctttcaatttgttagaaatatcattgaccatgtttgttgatattccacatatttgtgcatcttcattcattagttttagctgggagtattaatcattttatgaagaaagaaaatattactgtgctatagtaacttcctgctatcttcatggcctagtcatctaaagaatggagaggatgaggtcaggagacactcttcagagtaggcaactttctctggaattcatttgtttaaatccatcttttaaaagacttatgtatatataagttttataatctgtataatattgctttcattcacgatgtagaatttcatcatcacatattttgttttcattttaatctagaaactgtctttaatttccacctctatgtcastctaaaatctaatctactggaactagaatctaaaataatatgcagtcaatacaaatttctcttaaaaatgtaacatgttatatttcatggattttgctattaaagaataaagggatgtaagcaaaatatgtctccaatttttttataattctcaaagtcttccatttccaatgtgcactctatctgaagtcagaagttaacataattataatatgctagatttgtatgattttaaacacagacacaygcaaaaactaatttgattcatttacttacagaaagccatatcttggaagatgtcaacaagtgtatcatagccttaagagaccaggatgctgataatttagacygtgctgcgggtgctatcagaggccgggcagcaagagttgctcacatcgtcaygggtgaaatggacagttacgagccaggggcttacacggaaggtgtaatgagaaatgttaacttccttacaagtactggtaagtcagttgccaataacagctgcacaatttctcttatttgaatctacatagctacgaatattcatacatgtgggaaagattytagtctgtgttgcttcttttgacatacattgctatacagtgcttgcacactttggttatgcgatttgaaatttatcactgagaagtaaatatattcattggtaaaaagaggtcttctataaatatatgcgttatataaattacccacaggccttagtcagaaaccacttagaatgttcattaatgccttatctattaggagatataattaggctgatatggtatcaagtatgtgatagtcaccaaaccctctgttaactgtatcattgatatccctaagtttttgtttacattacttaaacacagcaagtctgtcctacgtttccagagaaatgctcttaccttcatctgcagtctgtttgcaaaacagcaatttgttcttgcacataatcttctttgattgcataagaaatgyggaaccactcttttgtgttgrttgcagcactcaggttagtattttcgaaaaaycagccagcaaatgcttagttcttgaatccctcagtgaaatggcattttaacactattgttaacctttctccaagaaacttacagaagtgtctgaattcatatggattcaaaaacaatgaggacaatcaactatttttataagtcatgatagcagaactccttcctgggaaaaccctttgtgaatttgtgaaatcctcaggttagaatttttactattgcctcctcacactagggtgatggtgcatctgtgattcctaaaatatttgaaattccaaccttaagtcatcgatcctggagaatcatttttcatgttatgcatatggaatatgaaatttgatatgcacattgtttagccaaaagagtagaagggacaaagatgagtcattttttwaatttttcttttatatttgaagccactccttgaaatgaattaagagaaacaaaccaacagttgaataatattcactagagactaggtctgaagtgctatgctgcaaggcaagcttagcaaggtttgcagggaattgatgatcagttttgctgtttttctagcaagttgataaacaaaatcattgatgaatcttggtatgtaattttcttactatctctttgaaatatttctaaaataatgcaatgctaacaatgtggtaaggaaagataaaactcttgatattattaaatttatattgctatatccactcctcaaagtcaccggtatcaatagggcacatagtagttactttttcaataagttatggcaatatatttacttgtttaaaaagatgattgtgctctggtcattcagtatctcttccctaactaaatttaagcactcctttcatgttggtcaaaaccacrtacagagttttctgtgtccctgatttttttctaccttctgagaatagaatgtaagtaaaagaagaatgtaacaggggttttttttttagacaaataaaaatttcctatcaggaattggttaggtaaaatctaggaggactaatattttgcctctgtctcagttttataatcgtgttagtcttgtgagcatactttatgatcataattctgtttgaggtaccaggtttacagttttatgccactgtttgcaatcactctgagatcagaaaataatgaaacaaagttatttaaacacttaattgcaagtttattaatacctctttgatttataataacctttctagatagctaatccatatggctacattatcacattcagaagagaaaaaaatctgttttcttctaattagttgtatataattttaattaaaattctctagataaattatgtcctatatcccaaatataatgaatataaaataatcctgggttattatgtataaacagcatcttattattagcgtaacggtatagtttaygatgtcccaattttgttattttagttactcagaaaaattttggtgtatctttgaaaaagctttccatttttgtttatgtctaattccaaactattctccaaatagccttctttgaaatttatgaaaagcatgccttactaaaaggaattctgagcaataaattagatgagaaaactaattagatcagtttgatcttaaccaaagctgaaaaatgtgaaaattttctttcccatggagacattgtctatgaaagatacttcccactactctatcctccagaatttactaacaggagatgttcatcgttgtttgcgtctgcttcacatcttggacttattagttataaataattgccaaattaaataattggaaatatcatgttttgtgttatgaggccttaatagtttactttttagcaagtgaacagtaatatctgtggactgtctttctctgtgtttccttttcttttatacagtcttcaggatttaaccctgctttctgaaaatgactttatgaggagctatagtgaattgttgtttattaccaagacttttccgtctttgcaaagtttgccttaaagtattgtcataaatgatgaaatataagccatacttatctaaatcacaaagaargtttttagaacatagcacctttgattttaatcagactttgtagctcattagtacattttcaaaatttgatgatcttctaagtgttttctcagcattaagaagcagggctgacctattatatctcaggaatytatattgttcacaaactctagtgaaatgtagtcaacatctggaatgctacatttcacccagatagaagcataatattgtaatcttcatgtgaaattctttattccaccccatttatccctgttactaagctcctcctcctgtcaggaattcttaataragaatatagaatatattagctttttaaataaataataaascttctggactgtattgtgaaggcttacaaattatactcttagtgtcaacttcagttcttttgtactacgttggggaaaaacctaaactggaagtggacggacataagacatttttgtgtgatttatgaacgctataaaattcaggaatcagcaggccccagagcagctgttgcaaacctccaacccccacctagttttactgtttgccaggctcatggaccaaaacagaacaggtacataaatgaatctgaccaagatatcctggtggcatccactgttggcaactggcagtgatggcaaatacaggttcattcatcaagtatctgatgaggccgagactggaaagtgtgtatccagaattcccaccttcttagaatgaacaattgccatatagttacatgttttttgtctcaaaggcaaatgagacagttgaaagaaattttgagccaataaatttttctaaaattttgttgtaaattgtttactccagtttaagcaacagatagagttttaagatgtatttcatttaaaacgtagtttgaaaaaactttaatagcagttggtaacccctctcaattccctttcatttaatatggtttacatatacatatcttgcattttgtagcttgattaaaacatgctttttttttttggcattgcagctctgtcctacaatcttaaatatttataaaaactaaaggttttagttctagcagtccttaccctctgcagtccggcagtgtttgaaaattagtagtctacatactaggtatgactcaaagaatttttatgtggccagtggagttttgaccaacataattttcacgggaattggctggagcttagtggtgtcctctttttcactgagccttggccatggtctctaccatgccatagtctcttccactctgtctcattatagccccagtcttcttcactcagtttaccttcttgaactctggaggaatttgatttcacctaaaattttatttctaactttttttttttttttctgatgtgggccaaaaggcaccttccacaacacttaagttaatacttccacaatggcggggacatgccaagattattaactgccatcactctctttttaaatatctctaccccttgtttctcacatcaaattctatgcatatttcaagaaaaagcttatattcatgtcctctagaaatytttggcaataatgaattctttctgttctcgtgcactgtagctcttaagggacgtgccaactcaattacatcatcccagacaagtatatgctcttgatgaactcctcagatatactgtcataaaaatggcttttctggtctgggtgtggtggctcacacctgtaatcccagcacttttggaggccaaggcgggaggatcatgaggtcaggagttcaagaccagcctggccaacatggtgaaaccccgtctctagaaaaaatacaaaaaaattagatgggtgttgtagcatgtgcctgtaatcccagctacttgggaggctgaggcaggagaattgcttgaacccaggaggcagaggttgcagtgagctgagatcctgccactgcactccagcaggggtgacagagcgagactccgtctcaaaaaaaaaaaaaaaaaaaaaaaaaaggcttttctttcaaaatggaatatgagctacaggagaaaaagacactcatattatttttctttgaatctctcccagggcctaccattgtgtcgtatgttagaattaaaaagaaaaaaaaatcaaaacccaaaacgaaatctcttgaattgagcttctaaggctttgctaattctatccctgcagttggaatgattgccttttcttctctactgccctcttaaaatataatcattctaaacactttctcaaatgccaccacctttgcaaaggagcttttgattccctttcagttagaattaattgctccattatctgtattactatgagcttgtcctctagttaatgtttatttcactttgcctttgatcataatcagccatttacatacaagtttctcccactagattgtaatgtccttaaagacagacaccacactttctttatttttattttccccrgtagcatctacacatagcagaggggcccaatgatcaatgatcaccaagtccttctccaaaatttaaatttaaaatgtactgcaagattacactgtgatacagtctagttaagcaggagaataggttgtcatcccaattcaggaggaaaacaacccctggaaacagtgggctgtgtcaaaggatggggcagagaaaagattaagaaagtgattcattactgtccagagttagatcttagccacttccagaaaacttggggtcagatttttaaaaggttctttagcaagcttttgaacaattgatcatgaatattgtgtattcaattacttacaagaaccatcattgaactacgtctgttgaaagatccgactsaacctaattttggtaatgcttccagcaaatccctgtaaggggtagtaactgtgctttcacatttgggagccattgttggcgaatttcctcccctttaagcagtctgaacaggctttcaaattatatcctttctgccttttggattagacgttaatataactctttttttttttttaacacaattagagagcattaacaagaggtttctgtctgcagatcacttggctaacctggataactgtgtgtcttcgtgttgataattctaaagttggaaattaaattacaactcagcctctctaaagaagagtaagatctcatgaccgtggaagtgcttctgttcccataggagtgtgggaccttaggtaacattatgagttgaagaaagtagctgttagaacttctgagtggaaaaacctattttctgtccaaggaagactggatttatataggacccagatctagttaagagactaaggatccagttaaagaactaaaataagaatggcaagattcttatcttgccattttaagtaaatgaacatacaaacttgtcagaaaaaagaaaatgctataaaaactgcaatcttcaatatgtattgtgtgatgcaaaatcttttctcacctttttgacatggtacatggagtaatctaaagtgacactgttggtatagccttattttttaaaaaataatatattctgacacagtgatagaaattttattgttaaatgaggaataatataaagggcttaagagtggatattaaagaatcataaagaggggttgagatactgccatatctgaaaaatgtaaaatatgtaactgatgtggtttggctgtgtccccacccaaatctcattttgaactgtaattctcataatcctcatttgttgagggagggacccagtgggaggtaattgaatcatgggggtggtttcccctatgctgttcttgtgacagtgagttctcacaaaatctgatggttttataagcatctggcatttccctttcgggcactcattctctctcctgtctccctgtgaagaggtgccttctgccatgattgtaagtttcctgaggcctgcccagccatgtggaactatgaataaattaaacctgttttctttataaattagccagtctcaggtatttcttcatatcagtgtgagaccagtatgagaacagactaatacagtaactttgagatttttgctaaatgaaggatgggttaacaacagtggagatgaattggcatgggctgaaaagaagggagaattggaagatgaaccagagaatgggaacatgctgtgtggttattcaccagtgcaaaggtgttccagaggtcttgtatcttctgtaactctagaacacctgtgactagcctcatatggatcttctcctgggaaacaagatatcatctagaaagagaaagaggtcacatctttcattctgatcctactttcccgtatttctgtaaaatgactaattcagatttactctatggatctttatgtgctgaaggcaatagaaaaataatttatgtttaaaaagattagacatgaagtattaagtattagttttggttctgggttgcaaagaactgaaattaagaatggctaaattaggcagaaaaacacaggaagactggagaacaagaagaaaaaactggcagactgcaagggacacttcatataggaacacagttaaagtcatcccaaagaatagcttttcaaagtaccattccagccccctctgaacacttaatgccactaacagtatcataacattatgacactggaccacacagctggtacatttattcgctaccacatttcagatggttctaccactggaataaatcataaaatatccctgcttttgcctcacttgctttaaactcaacttccagtgccagaagcattatcttagtagagtttaaatcatgtgcccacaccttggctgtcagcatgcataggggtgagtacctggccttcgagcttctttgcagacagtgctctgcctcacactaagactcttacactggcatattccctgcataataaagggctttgaagtctgttagcaaagggggaagttggggatgatgagaagcaggagaggatgattatcaacgaggaagcaaaaggacccagagaaaggaaattgaggattgatgctgccaacttaattggacatcactgggacaatggaactacttgcatccatattatgcaaccaagaacattgcccttcagcagcttgttgcaaagccaattcttttagatggtttatgaaacctttaaaacaagcataaaagcctgctttatttctggtagatttattaaacaagktattatgataccactccaaattgaggtacattccagggaagacatgccatagcagaatatatgatgtgaatatgattctatggccaagacactagcttcataaaataatgtttgttttgctgtatatgtaaaagtataaaggagtctatgcaggttttcaaaaagggggaacgtttacccttcagtgatatactgaggtttcttctttctttaactacaatgacaaaatttaacacatctgtatcctggtattgttcaaatgtagagtgatactgaattgaactttatattttgttttaaatccaacggaatgggtactttgacttcactaatttttaagattactaagtatgagacattctttgtaacagcatagactagtgttttctaagatcatactgtttgaggctgggcagtggttcatacctgtaatcccagcactttggaaggctgaggtgagaggactgcttgaacccaagtgttcgagatcagcctaggcaacatagtgagacccagctctacaaaagaagaaaatagtaattaaaaaatgttagccaggcatggtggtacacacctgtagtcccaaatacttgggaggttgaggtgtgaggatcacttgagcccaggagtttgaggcttcagtgagctgtgaatgtgccactgcactctatcctggggaacagagtgagaccctgtctctcaaaaaaataaaataaaatcataatgtttgcacagccactgggagaaaagaagtggctgctcaaggcccgaggggatcagaggctctgcagttatcaagcagttttagctccttcccagctaccttgagagctaaggagctcaagatctgaaagctcctctcactaacacacaccaatatgcctcaccagagctgttaggagctctgttctagatagctgtctactgagtaatccaatagttaagtatctttgaaagataattactgtaaaatgttttataaaccataacatagtgtatgtttttaaaaatgtagacaaactggcagaaggcttctctcttccatttcatctcaaaaatcagatttatgaaactaatgaaacaattcccttcagttgttgcaagtatctatttcatgtatgaatagcctgtagctgcaaagacagctaattttacttttttaggggtctttatatatagccagaaaagtctggttatatatttattgatgtgagctgataaaacttttatatactcatctgtaaaacttaattcgaggttcaaggtcactgaggctggagaataaaccaagatattatgtcccttagattttctttcctctagtttgggagagaacataaaccatgtgaattcgagtgtgtaaatcagattgcatttcccctggtggtaagtaattggtgcaggcagcagaacttaattgacaatagctttagccatttcatccccaccctcttcccaactatgtctttcatgccaatttttatgtgattcctcagatgtagtcctggttgggtgggggtggttacaatgggtataattatattgccacgttttcaagacgagcaagtttagtaaatgaagaattaagcatttcttaggtgagcagtacctatagctgttgccgaaataaggtatattgcatttatgctatcagacttcatggacgtaaaagcaaatgctgaaagggcatattgttgctaagaaaaaaacaaattagccggccaacatttgcaaatgacaatgttatctacaagctttattaatagatgtgaatattttattcaatgaaatcaattaattgtttatcatgcatgggtaaattctatttagctctctttcacttgggaaaaaattatgtgtaactaacctgcacgttgtgcacatgtaccctaaaacttaaagtataatagaaaaacaaaaaaactgtaaacactagatatcataagatcatcaatgaagaaagattgcttgactaaaggtggaaaggatattctaaagatagccacaattggaagaacaattctgagagcagaacaagtggacatcgatcaggtgtccagttaaccagctcagggaggatagaagtagttcgaataaagccaaggagactttagacagctggaaagcggtttccactgtgtgccaagccatgatttctactgaaatatattttcacttcacaaatcaaaatttctagctcatggtaatttacagcttcctctttcatcaattacaaaagaaagtattactgcttaataatactacacagcagcctaaggacctgggaagagatttcttctcctgaaatgtattagtaacccagtgctatcttgcaaaatgtaatatattctggtgatcatccaccatttaattttactgtctgccaaaatctgtagcagttaaagttaaatgaacaatttatattataaaattcctctgctgatatagggatttttaaaagtatcatttattataaacactgctggcagtatttctttaagattccagatattctaaagtctagtgttgattgtaggttrtagtgatttaagaaaggttwtacaaattccyttaccacatgcctcaaaatgcttatgtaaaaagaggaattaaagtatggatgttgataaaaaatgaaattatttttgagggaagaagaagtaagttaaaatattgtacttctcttgccatctcccctatgttatttatttatatatcctttaatagctacttctgttggtaaatcggtattagtgtttttccattatttgcatttattaatgtatttgccrtatctccacaattacaatcaaataactttgagtcaaggtactamcaatgttttgttttgtcttttccatctatttagaaagctaacacaagagtaaactgaaaagatataactacgcagtcccagtctaacatcccgttaaaataacagtaaaggaacacaaaagggaataaactcttaatggcaaatgcatgggtgtaggattatcacagggaaaaaaaaaagatccagaagatagaaagcagctggaaacatggagatagatgaaagagagcagcaaaagcctctatctaaactgtgcacaggagggctctgctgaggagctgtgagtttctgcttgactgttgttagacttcttatcacaacactgagttctgcaaggcaatgaagcaatggcttcatgttcatgagaaaattaacatgatcttagaatactatattcatccaaattatgtggtcaaataaaaacctttttgtgtgcataagaactcagaaatgtaacttgtgtagatcttcttgagaaatgacttgaaagtgtgcccaaactaaacaagagatgggaaaaacagaaataggacgacatggaatgctgaaatagtgattctaacccagagatgtaatgaataaaatggcaagttggcagatgcccagcagatccagaaagcaatggatccacattagaatacaaagtcagcgggctcccagaaaataataataataataataataataataataattattattattattattattattattatwataaaagaagccttaaaaagatgcagaaaaccagaatmactaaattagtcacatgataaagaaagcaattcgctatcctctgtaaaatgcattactctaccagtccccacccaggaggcttagaatatcatgaatctaactatatgaccccaaaattttaaaattcggcttccactgctatcagcttatgcttaactttttgtatttgttcatttcctatatttgtcatttcttttgtcattgttaagaaaccagattttagtgtcacatggcaaacatctgttatgctggttttgaatatctattacatatattaaagatatgtacatatgtgcatatgtttctatatatttacaatattatatataaatatatgtattatatgtaatgttgmaactatatatgtatagtatgtattatatatataacatgtcaatgattgatttcttttgttttaaatgatcatttggaaaagagttatcttacagctgggctggaactctccatgattacctggaggtctgacactgacttttggccacaataagaaggcttgaactagtttakatttataatacattgtttaagtttgaaatcaccttgttggtaccaagagtcagcttgtttacaatgtttaggggtgtgtagattgatggcttacgcatgggctaaccagttacatagcatggcttggctatgtgatcagtgggacgtatatcctgaagattcataattcagagatgaagcacatcctgtgtgactgagaagggactctaggtaggtgtgcaagtctcccaggcccgggtgtgtgggctgcacattctttcttctgctatgttgcatttcttacattgaataggtcttccttgagtagtttccatagaattttgcaaaccctttcaattatccaacaccrtctgtaactgttgtagttataactcatttattttattttaaaaacccactgaagatactagaacacacacacacaaagacacacacatacacatctaccttaatcatacagagttaagcaagtggttgcattaggttttgttgctaactgctctgtttttatttactttttaaaaggtgctcagtaagcttttataattagaccatctcagttcatccaggctgctataacaaaatatcttagtctgggcaagttataaacaacagaaatttattgctsacagttctggagctggagaaattcaagatcaaggcaccagcagattcaatgtctggggaggatgcatccctcatagatgatgtgttctaagtggtggaaaggacaaacaagcttcctcaagcctcttttaaaaaggcactaataactgttcatgaaggcagaaccatcatgaccttcatcttttaaaggtcctaccacttactactattgcattggcgaataggttttaacatatgaattttgggggaacacatatgtagacaatagcatagaatttgtgcagtcagaattgctgaatcatggttttttctcagagaactttccaagctcaaaaaccttagtgactaaagatttatttcgtttaacttacacattacacctaactgacatgcatattatatctcattagttaatgggcaaacgtttctcatgagtactgactcagccttttatggcctttcctgcaacagtgtgagctgcccaccaaattacagcttccttactctgcctccttaaaaactgagaactgcaacagacattatcctctccatattagttatttatgctgcatagccaatctccctaaaatttagcaaattaagacaacaaacatttactgtctcataatgtctgacggtcatgaacctgggagcagctaagctaggtggtgttggtcagggtctcctgtgaggttgtattcacactgttggccagagctgcagtcatctaagtctcaactgaggctaaagaatctgcttccaagcttattcatatgtttttgttggcaggaggcttcagttcctcactaaatgggcacctctccatgctgcctatattttttcacatcatggcacctcagtgtgaatgatccagatgagagagagagagagagagagagagcctaagatgcaagccagcatctttgtataacataacttctaaagtggcataccatcgcttttgctgtattcagtttgttagaagcgaatagggcatgaataccaggaggcagatatcactggacaatgttacaggctgcctactacaacttctaaatggcttatactctggatatgcttcatatggtcccatgtcaccaaatagactatacattttttatttattatactttaagttctgggttacatgtgcagaacttgcagttttgttacataggtatacgcgtgccctggtggtttgctgcactcatcaacccaacacttacattaggtatttctaccaatgttatccctcccctagtccccccagcccctgagaggtcctggtgtgtgatgttcccctccctgtgtccatgtgttctcattgttcaactcccacttatgagtgagaacatgcagtgtttggttttctcatcttatgatagtttgctgagaatgatggtttccagcttcatccatgtctctgcaaaggacatgaactcatccttttttatggctgcatagtattccatggtgtatatgtgccacattttcttaatccaatctatcattgatggacatttgggttggttccgagagactacacatttttagtgcacatatatcttatacccctccctgttttctcgcctgacatttaatactggaaacattagcaaaggacctgacatacagtaaatgtatatattaaatggatgaataatacaatgcacatcttaccagggatccttaatagagttgattattgatagtacggaatactgtggaagaggaaatcctctccgttgctaattcatgcaacatggtttyatcattttagagacatacatagaggactgtaaccattgccataagtatcattttatgtgccatggtcatgtggagaaatcattacagaggaaatatggaaaaccaaaattctagatttagatttactgtgatataattgtgaaaatmcgttaaactctatgggccccatatctgtaagtgctagaagagggttaactaggagatcttcaatgttcctctgtacattattttacttaaacgtttaagaaataaatttaagactcatttgtctacaatgcattaatttatttgctatttagctgttttcaaattgtcaaaattctacatctttttaataaccaaagaaaaaatggccaaaatataaaataaccaaagaaaaaatgtccaaaatataaaaaagtgttgtttttaatttcttaagaagttttctgccaatcttatacatttttactcctggagaactagatgttttgtcgatgtaatttttttattcaataattttttaaaaaattgagatgggatctcactgtgttgccgaagttggtctcaaactcctgggctcaagtgatcctcccacctcagcctcccaaagttctgggatttcagtcatgagtcagtgcacctggacattttgtccatattttaaatgattttattgttgtttttgctattgttctaatggttgaaattaattattttgctatatatatatattatatatatataccaagaacaatttgtcaggtttgtcaaaagaaagagaagtacataaagactaagcaatttagtttattgtggtttagtaggcaaataatatttgtagatattaaaaccaaaagctgtattataattttagctctaatacttaccaacaataagtgatcttaggcaaattacttaaccagtctaagccttagttctgtcatctgtaaaacaagggcaataaaacttatctcttagaggttttgtgataatttccattaaatagcatatatagatctcttgaaatgcctgctgcatagtcttagttctataaatagcaagttattaacattattgttgttattattggattggaatatagtaaagcaatacttggttagatttcatgtgatttaccttctgaatgaagtggaaatatgttaatgtgcaatatataaaacataartcacagaaaacaaccaatactgagatttgtattttgttctgacaaaattttatatccagggctgttttcacttcccctaatatgtttttaattttttttattgtaatctggtgtcttggtcagtttgggctgctataacaaattaaatggagtagtggattaagcaatagagatttatttttcacagtctctggaggctgaaagtcccaaatcagggtgccagcatcatcagcatctggtgagggccctctttctggcctgcaaacagctgccttcttgctgtctctacatgatggagagccgaaagataaaggaagcaagttatctaatgtctctccttataagggcactaatcccattatgagggctccacctttatgacctaattacctctcaaaggccccatctccaaataccatcacattagggattagggtttcaacatgaatttgagagggacacaaacattcagtccacagcatctaggtttaccagttttgtgtcctttcttcaaactaaaattattttgaagagaagacatttttaacaattcaaatgataagcagcgcacgatatagcaaaggagatttttttggcctaatgtttagcagcttcattctgttgttgaaatgtatcgctattacacatgcttaaggaatacaatggtagaagaaaccgtgtattttataccaaaagaaaaatagtgaaagactaagtcatctgatctaagtttataatgaaggaatttatttaaagatgttttccttttcagaaatagtcacttttttagagaattaaaaagatatcaagaacatctaattaatagttatcttaaygacagatgacagtttaattaaatgtgaaaagcaaatttgaaagcatcttagtctgtaaaactacttcatgtataaaaaataaacatttgacagaactctcagagcaaagctatctgagggattctttaaagcttccaatttatcaaattacctttttttttttggtcggcagggggaagtagtctcactctgttgcccagggtggagtgcaatggcaggatctcagctcactgcaacctttgtctcccaggttcaagtgattctcccacttcaayctcccgagtatctgggactactggcatacaccaccacacccggctaattttttgtattttttagtagagatagggtggtatgggaaggtcaagacaacttcctagtttgatgagttttgtaagatatttcctaattaagtgtgtgaaattttcatcatgtaatattaaagatctctcatatacaattctgcacaaaaagaggtctgaaaatctgaattattttatagtacaaataacacaaatgtagttgaaattagcaaatgtttagtgactattatatgccattaagtatatcaatttcacatgcatccaaactttaattttactgtccaggaggtgacaatatataataataaaaataataataattttaagagtnnnnnnnnnnnnnnnnnnnngttgcacacctatagtcccagctacttgggaggctgaggcaggaaaatcacttgaacccagaaggcggaggttgctgtgagctgagatcgcacaactgcactccagcctggtgacagagcaagactccgtctcaaaaaaaaaaaaaaaaaaaaaaaattgtgtatgaacctctgtgatatttgctggaaaatatcactgttttgagcaaaactagtggtttcttttagttaaagctgcatatgtcacacagatcttttctgatattacaaaggctaataaagtttcactcaaaagtattctctcaatgcagtggtggggtacaatttaacacttcattaaagaaagaaacagaaggtaagtggatgataaaggttaatgatggaarcgactaccctaatctcaaaaagaatggttaggttgggcatggtggctcatacctgtaattccagcactttgggggrmtgaggaaggaggattacttgaayccaggagtttgagaccagcctgggcaatatagtgagatctcatytctacagaaaattagaaaatcaaccaagtgtggtggtgcacccctatagtcacagctacttgggaggtttaggtaggaagatcccttgagcccaggaggtgaaggttgcagtgagccaagattgtgccactccactccagccagggagacagaacaagaccctatctctaaaaaagaaagaaagaaagaaagagagaaagatgmagagagagggaaagaaggagagagagagagaaagaaaaatagaaagaaagaaagagaaagataaagaaagagagaaagaaaagaaaagaaagaaggaaagggaagggaagtggaagtggaagggaagaaggaaggaaggaaaggaaaggaaaaaagaaaaggaaagaaagaaagaaggaaaggagggagggagggaggaaggggaggggcggggaggggagaattccttgttggtttaaaacattatgaatttgatggctgggcacagtggctcatgcctgtaatcccaatactttagggggctgagacagatagattgcttgagcccaggggttcgagaccagcctgggcagcatagtgagacctcacttctactaaaaaaaaaaaaaaaaattcaaaatttagctgggtgtgaaggtgcatgcctgcagtcctagctactcaggaggctgaggtaggaggatcacttgagcccaggagttcaaggatgcaatgaactatgattgcactactgtactccagctggggtgatggagtgagactccatctcttaaaatataatagaaagaaagagagagacagagagagagagagagacagaaaggaagaaagagagagagagagagagaaataaagaaaaaagaaagaaagaaaaagaaagagaaaggaaagaaagaaagaaagaaagaaaggaaggaaggaaggaaggaaggaagaaagaaagaaagaaagaaaaggaaggaaggaagaaagaaagaaagaaagraagraaggaaggaggaaagaaagaaagaaaagraaggaaggaaggaaggaaagaagaargaaagaaagaaagaaagaaagaaagaaagaaagaaagaaagagaaagaaagaaagaaagaaggaaagaatacattagaggtaagcctcagagttgtttccctgtcccacctggaaagcacatactggtccaaaaaattcagcataatctgttttagattatctctacattgactttggaaaatttctaaaattcagatgtcatattcaaatacatcctgggtttttgttcagtaatgagcaacatctatttcccacagaaaaatggggaagacttcactttaagccattgcctttcctataatgaagatatacaaatgattagatatgagagtaacttttattcatagatttcctctttcccaaacagrtggaaacccttattttcaatgtacagatatygaataatgtaaagctacatgatagagggatgagaaattgactgagtttaaaaaaaaaaaagttcagtgtttttatatatagatataatgctttaaaagttttcaaatgctgaayaaatttagtaagatgagggccaggtgcgatggctcatgcctgtaatcccagcactttgggaggccaaggcgggtggatcatgaggtcaggagttcgagaccagcccgaccaacatgctgaaaccccgtctctactaaaaacaaaaaaaaattagccaggtgtggtggcatgcacctgtaatcccagctactcaggaggcttargcaggagaatagcttgaacttgggaggcagaggttgcagtgagcagagatcaagccactgcactacagcctggatgacagagggagacccatctcaaaaaaaaaaaaatagtaagatgattggtacaatggcatgcaattacatcacaattagaagatcactttaaccttcattgaactatactgatgcacaagcactgtacctatcaaataatgaataaagacaaaatarataagacataattctttctctcaagaagaatgaatgtttgggggggatgacagatgtgaacctttaatgcaaaacagaacagaggtatgcatgtatctcctaattgatgctattgtctgggaatgatttaatccagaaatcaggatactcaaattgtagaaaatttggagtactaccctggaactaaacatttaagaaattagcttattaattatctctataacataattgtaggagaatattaattcctgatattcctagataattatcaggccttatttaggatcaccagctttttcttatccaccattatgaaatgagaggctaatcaagtcataattcatattctgaaccaatccacatccactcacccccatctccttctataataaaaaagaaaacagtagacttcaatccctgaaagtaagtgcaaactttcctgttctgtccctttttacgacctcctatctatcaacatttacctgtgaggagcctgtaaaactgtctccagcttctcatcatataagtgtctggatgcaatgctatcccctctgccattttagggtgagaatataatgaaggattatgctcactttacttgtttcttcagtcaaaactkatttgatatttacttgctgtgaggataccaataaactaagtgctgaraaggagagcatgattcaaatctttcagtkgtttaactgtggttgaggatatattaaatagtgggattcttttataaaacaaggcaggaatatgttaaggaacaaaatgaataggggcaaaaaggaatagattagagcataatacaactgtaagttttataagttttgtaggtcagagaagaccaggtagaagatgtaagaacaaaagtaggaatctaaacattatttaaatttaaaaagaaagtatgttcttcctggaaaggatgtcaaaatatttgtattacattatgatgtaattagagacaactaaaattatactgaacttgatttaatcttcttttgattgcaaagatactttaggttcttgtaatgtttcaggattatccttcaagtattgtgtccttgaaagaaaaatgagcagaaaggtgagtagattttcccactaggtcaggcagtttatgtgactagtaagtcatacgtgggactgggtagcttgtggcaccaacccaagttaaaaatggagtaagtatacctttccctaactcttccactgatgtcaactacaacattggacataatacttaaagcaaatcttggaggactctgtaaagtaatggcagactggagaggaaatcagagtttgaaggataaccccatacaataatatgttccctggactcccctttttttccccatatttcctggcttagactcttctgcaagctgaatctgggaagtgcacaccaagcatggacaaaaaacctccaagcaaaacactttctcaggccagaggacagataagcaggggttaggggtatgggatgaaactcatttaactctcctagcctttgaaaatgcagtccactttggaggtagtggtggcagcagttcccctgttgactgaagagaaatagaaaatacaaattattaatatcaagaatgaaacagggtatcactacagaaccatggacactaaaaggataataataaaatactacaaacacgtctatgcacatacatttaatgaactagatgaaatgaaccaagtgcttgaaggacacgtacctttaaatgtcattgaacagacaataaggagtgttggggaagatgtggagaaattggacacaatgctggtgggaatacaaaatagtacagcttctctggaaaatggtcagactgtttttaaacaatatacgtatgtgttactatctgacacagcaattcagttcctatctgtatacctaagagagataaaaacatacacccacacaaaaacttacacatgcgtacttatagcakcattattaatagccctaaagtgagtataatagtactgatacatactatataataaagtatgatacatactacattattccaagtataatartacttggaaacattatactgagtgaaagaagccagtcaaacactayatattttatgattccattaatataaaatgttatttcatagcagactccaataggaaaatatatataagcacagaaagcagattagtggttgcctagagggactggggacatttgagagtgatggctaaagggcgcagagtttctttttggggtgataaacttattcttaaattgattatggtgatagatacacaactttgtgaatataccaaaacgcactgaattgtacactttaaagggtgactcgcatggtatgtaaattatatcttaaagctgtcaaaaaaaagtcactgaagaagatagagacatattgaatgtcctctatctgttgcagaaattaaattggcagtttaaatgctttcaagagataaaactccaggcctggacagtttccctggttaattctactaaacattgcatcatgtaaggaattacattaaatataatttcaaaaaattaaaaagatggaacacttctaaacttatttcagtaggccagtaatacccgagggatcaaactaaacaaagacattagaagaaaacaaaactacagaccagtatctctcatgaacgtagatgcaaaaacctgcaacaaaatattaggaaatctaacccagcaatatagagtaataactgtataaccaagtatagtttatctcaaggatgcaaggaccgttcaaaattcaaaaattaattattgcaacccaccatattaacagactaaaaaaggaaaaatcaaatgattatatcaaagatgcagaaaaaagcattcaacgaacttccaattttattcataataaaaattctctatacattagaaatagaaagggactttcctaatttgataaaaggtatcaacaaaaagcccacagctaacatcattcttaacagtaaaagaatgaatgctttcttcctaacaacaggaacwtgacaaggctagttatttcactggtcctttttaacattacattaaaggttctagtcagtgcaataaggcaaaagaaagataaaaggcatatatattggcaaagaaaaaataaaatttttctatgtgcagatgacatgattgygaattccaaasatctattatatttatacgtgctagcaatgaacaattggaaaccaaaattataaaagaataccagttaccaaaacttcaaaaattgatatacgtaagtataaatctaaaaaaaaataattgctgcacctatatgttgccagaaactacaaaacgctagtcaaagaaattaaagaagaccttaaaaaatggagtgatgtatcatgttccattattggaatatactcaatatgatgatgatatcaattcttcctaagctgatctataaacttgttacaataccagtcaaaatcctagcagaatttttttccagctatatataagctgattctaaagaaagaattacaaaaatacatttatatggaaaggcaaaggaaccagaatagccaaaaaaaaaaaaaaacaaaacaaaacaagcaaacaaatttggagcatccactgtacctgattttgagacttgcactataaaactatagtaattaagagtgatatttgcaaaagagtagacacatagatcaatgaggtcatttggaaagttcagaaatcaaacaattcttgatggaaatgccaagataattcagtggagaaagactagccttttcatcaagtggtgctggaacaattagacattgaacctcaacttatgccttacattatatacaaaaaatgagtcaaattagataacagctttaaattacaatagaaaactcttaaaagaaaacataggataaatttttgtgaytttggtttggcattgttagatacaacaccaagtaatgacataaaaaattataatttgatttccttggaagttaaaaaaaatcctctgtgaaaggcactgttaaaagagtgaaaagtcataatagagtgggaaagaatatttgcatatcatatcatactcctcaaaaatgttgcatctagaatatatgaaacagtgtaaaaattcaaaaataaagagtttcctattccatagcaaaaataacataataatggaaattacaatcaattaaaagagatatcctattttatgtttgtaggtgctactgacatattgttctcaagggttagagggaagcgtcattcrtggagggtttataatgtatcgaaggtactgctaggtgatttgcatttgccattacatttaatcctggtaacagccctatgagcataatattattttcattttaaagatttgcataaaataattttcccaatgtgacccagttaaatggtggatccatgaaatagtgacttcctacaataaaatgggcttgctaccaaaattggcataaacacagaggccacagagtacctttaaatgcaagtttcttacacatactaatactcagtaatgagctctcagttaagttgtatttcttttaaatcgtatatctacttaaccaaactcactttgtcatgactctcaggtatgtttgatgatgaacgccacaccagaattaagcctgtctagcgtgtgtattcctgcctggcctgtctgaatatttgattattctttaaaaataatattagttgcagatgtctgagcctatctttctggtaattccaagttaagactgataagtgtagatcatgatgatcctttgaatcccagtacactagaactaacatttttatacatatgctttctatttcagtgatttttcattcaacaaatattattatgcatcaggcactatgctgggtggtgagatgctatgatgtacaaagtatgtattcttcaggagctcacagttagttcgggaagagagagcccacagtgacagacttagagtaatggatgtctargtcctaatggaatgaggtctagaatgacttcccagggcacatgaagtgaaagcctaaatccaaaaaggctaaggacgttacccaagtgaagaggatggcaaaaagaggaggcattttcaacgatccacttactctaaaagacagattctcaactacttctaaatattttgttgcaaatagatgacccaccctcaaactcaggttcctttgagcctgataaccctttagttataataattcagattttcaactgtttttggacacatttttgatatctcaaggtagttcagaacaatgtgctttatgagacagaaggaagcagagcttgataccttgatgttgtttcaagagccagtgctagtttcttttttagacacagactaacaagggactcttatttttttttttagtgttcatagactttttttttttatttttgagatggagtctcactttgttgcccaggctggagggcaatggtgccatctcagctcactgcaacctccatctcccgggttcaagcgattctccctgcctcagcctcccaagtagctgggattacaggcgcccgccaccatgcccagctaattgtttgtgtctttagtagagacggggttttgccatgttggccaggctggtctcgacctcctgacatcaggctatctgcctgccttggcttcccaaactgctgggattatcaggcgtgagccgctgcgtctggccgtgttcacggaatttttacaaatgtcacggatactcccatatggatgattatttttcctcactattcacatttttgagattttgtgtgtttttaatttgttttttttttactctttccccatttgcatagtgaaacaaaacaaaaagcctcctcaaatattctaaacccagttttcatctccctagatttatctcagcgatccctttcccctgttacaaaaactatccctgggttgattaatctccagttcctccttcctgatttttttttctacatcaactcctgaaatccagagggaaacaaaatgaaacaaattggcaatcttaacttttgcttggttgctcccctagcaggctgagtgggcagactcggaccagctgtctgacctaatttatgtagataagtttacttccatgttcttttctgcttggcagaaacacacgtcacactagttcatttttcttgaggttctccctcaggcaaaagctatgacttgattctctggatatgaaaaatacaaaaacaagacaacaatattttatttttgtgcataccaacagatgtctgcctcaacacagtgagctgcgcatccaacaggctaagaaagatgtacaaacatagccttttaaaaatatatatttgagcctactgaatttacaattgtgcccatttctgtgggccctgaagcagtcactggttttataatggaaatgaatctgatactgtagcaatgaaaattaggaaagtacccaacaatatatatcatgaatctattctattttaatagattttgttccaaacattaaaaatgctttactgaggaatttttaatgaaattggaaagttttcagagtatattatacaggaataaaaagtaggacacaaaattagagaagcatatatatatcatttaaagataaaaccggctacctttaaaatcaatatttatttatgatgaaatatatcatacatgaaagattacataatgataataaaataatcacccatttacctatggctcagcttgagaaataaaacttgcttcatttttggaagcccctttagtgcccctcgttgatgacctcctcttcctgcttcaccacagtctgcctccccaagataaccactaatgagtgcttttgtttgtttgttatttcttttaaaaatagttttgccagataagaatatagtgcataatatctaatgtagctgtacatttttgagatttataaaatggaattatattgttaagtatctttacgtgatttgcttctckcttttcatttcatccctatgttcacagttaaaacaactcaatggcaccttaagaagtgagagtctctgtgccaattaggggaatttcatgataggattattggccacatttaatgacacaatttattatacagccctttttcactccaaagtatacaatggtgttaggctagatgggtttagctgagttcaaggccctatcgcaatgcagtgctgagaaccactgttttccttcatctttcagaccccatttgttgtatttgcttcctactgctagtcctcttcctttattatgaatgttcttggaaaactatctctatcttccttcaatatttggttcctcctatctctaccaatttgtcatgcacatttgtctatgttttgatcacaatagttcattgtgtatgttccttccccactaaagaggctstgcctgaaaatcaatttatgaaatgagatacaaggagggagggtagccccaaagagcccatgtatgtttgagtcttcagtctgactgctggggccttgttacctactaagtataatgaaatattccttccatttgataccttcttgcttgcttgttgaaattctactatttaaaaacccatccaagtgacatctgctctaggaatccatcttaactaagtcagaatgaaatcttccatctctttagtgcttctccctttcattctggcatatagtacttacttcatgactcttaaaattattattatttttattattatatattgtcacctcctggacagtaaaattaaagtttggatgcatgtgaaattgatatacttaatggcatataatagtcactaaacatttgctaatttcaactacatttgtgttatttgtactataaaataattcagattttcagacctctttttgtgcagaattgtatatgagagatctttaatattacatgatgaaaatttcacacacttaattaggaaatatcttacaaaactcatcaaactaggaagttgtcttgaccttcccataccaaattctccatgctactaaacatgatagtgcaaatttttatttttattcatttatttttgtaaatatctacaatgtgatcatgtttttaaccatctacttgcagcataccgtaaatctaattcaggagttgagttttgcagcatttgattgcagtaaaattatgaatctcattaagcaatcatattgttaaatgttcctgaataaatgtaagatgatattattcagtttctaacactgactcacattttttttaatatctgctatttaacaatggtactcaggaatcagattgtctgcattcaaatcccaactttattctgatattgtaggtaagttatttaacttctctcagcccaagtcttcttatctgaaaaattagaggaaatacttacagcaacctcatgggttgttgtaataaccttctacatattgaatgaaatagcagagcacttggcacatagtacattctccatacacagtaattgacaccggagtggtcatgattactgtatcctcagaaagattaatttttagatgtgtgccctgaagcagaatgtgttgtagaagcatgattcactgaattctgycataaatgggaaatgagattgttgggtctgtgcacaaaattacagacttttgtttttgtttttgttttattttcaaagaaaataatgatctttccaaagaatctgatatagtatattaatttatgtttactaggaaatcactaaagtatggctgtttactatcaagttatcagaagattgttatttaaagactatttggtgtttaacaaagctcttggatctttcccataggatctggaggagtccttctgtggatagacaaggctttgtttgcctttacagtacactaagtaaaacctcaagaggggatgtgtaaatagtgtaaaattcaggatactcaaagaccaaactcattcctccaacttgtgtttaatatgtaaataaaccattcagctactggaatctcttgagatgacattgattctgtcatgtgttgccctgaaataagaggaaamtaagcattttcccaattgacccttcagcaatttctccaggctttttttttttttcaggagcccctttccaattycccatcatttttcaataagatgtgggaatttcttccccaattttttttttctggagctacgttttgatttattttgtgttcattgactatggagtcaggaaatgtatctcttgcccttactcagataaattcgttcaacattctatttttgattgggaaaagaacatatttctaagttttgcttcttgtttgtggacaaatgctaaaaagtataatcaaaatttctctttctcagagcaaattgaagctctatcatttgcctaggcagtgacagcaaaaagcaagcttcctttcccttctctgtcctgaatgcttcctctaagattcttgcttccatgtatagtcttatgtgtctttcagtgagtagcccagaatgttcacagaagagccaattaagacactttgaagtatttaacgaaagaggatattgcagttaacttgggcagcagattctcaacaaagtacccaatttatgcctgctatctagaacaatatatactaaaaatcacagaataatcctttacactgaatgatataactttatatcaccaatgtgttacgttgctataatagaggaaatgtgattcctgtgcagttgaagagtattagtaatggtccactcatttgtttttctttggctctgtaaactgcctctaaagaaaactgcaggatcaaagccattggtgatggggtgactgagaagctaggtatgtgatattctgaagagtaaatgatgagtatatttgttttggttagttttgattaagccatttaatggtaaagttgcagtttaaaaactgtacttatgaccataaaaccaccttatttcaacattattcttgtacaaaaaaaactctcaaacttgttactgcacatgtcatactctctggattttgaatctctttgggtatttttctcatggaaatgattacttytaaagatcatcctgataattcaattttcttaagattgcaactgtttcaaaatagaaaagttagcgtagttgtgaaatttgtgaatggctttggaaagaataacctgctttttcttttccttcatgagccactctctgatgatagctctttattttccaggtatatttgttaatcattgttgcctattaatatttcaacaaagttctcagcttaaaacaatactcacatgtgggtttttgtgtgtcagaaatccaggcatggcttactgtgtcctctgattggagttgtgttctctgattggagtcttagaaagcaatcaaggtgtcagacagggctgtggattcatttgaggctttttcaagctcattcaggttgttggcggaattcagttccctgtggttgtaggagtgagggcttcagtttcttctttgtatctgccaaaagccactgtcagctcctagaggctgcccacaggttttgctgtatgatttccccaacaaagttgcttgtcttctgaatgccatcaaggaagagagagactccatcaggacaagaaatataatcttrtgtaacgaattgtgaagtaacraacatgtaatcaaatatatcycatcaacttttccgttttctgtttgttacaaacaagtcacaaactcaggaagaaagggtcatggtggccaccttaaaggactacctgacacatcagagaaatatttagaatagtcacaataaaatgcaagcctaaatcttatgcctaaaccataaatcccctggtaccagtagaagcaccaggaaattttgttatttgagcagccaatacatggtctaatcataaaagtagttatatgattatcaacttattaaatattctattcaagtcagattctggtagattacatcacatcatcaacaagcggacactcgtagagtaaawcctacagactataatggtgtaggaggcaagattgattgtaaactagcttcttttccttattaaaatgtatgtctctttttgtatatgaatttaaaagtaaacttgattctttctcaacttgaaaccacaatttactattaagttgacccaagtgaaatgactgatattcaacttttttgacctacaagataatttcatatgattcaacctgatagtttccctgtattgttttatacattccaagaagaatgctaaattgtatatacattatcacactcaatcccacaaccatactatgcagtacatggaataatatgcattgtacagatgaggaaatggagtctcagtgggattatgtgaattgattatatttaagctaataatcggctaattaaattatagggttgatagcaaaatgcaaatctgctgttcaaagcctgttcttttagccactattctaagactgataaaaatatatagactaattaatgctaacatcatattttatctaagatgaagttattgtgtttcatttttgcaagaaagactgaagaaagagtagacaggaagagaagaggcttaagagtcaggattcctttctgaatctgatgccaacctgattgtctttcatgatttggtattcttagtattcttaaggttgttttttgtctttgttattctgtagtttcactaaggtgtgtctaagtgcggattcatttttatttatactgttttggaggtatatatcattgcctcctgtttgtgaactcatgtctctaacaagtttcagaaagttcctagctattttctattcaaatatgtcatttattctattatctcgattatctcrtcctgagcatgtgacagtatacatgatgggtagtctcattctatccaccatattctttattcagatttatgtatttccaggcctttgtttcactgtactgtaatccagataatttctgcagataacttttccarttcactaatcttytcttcagttgtgtatratatgatgattcatccatttgttaacttttttwaaacatatatatttcttcaattttagatatttggtagattcttgctgtctgcttttttttttaagataggttctcactctgtcacccaggcaagagtacagtggcaggatcacagcttactgtggcctctaccttctgggctcaagcaatcctcctacctaagcctcctgaatagctggaaccgcagatgtggccaccatacctgactcatttttaaaatgttttgtagagacggaatctcacaaaaatcttgccccagctggtcttgaactcctggcctcaagcaatcytcccgccttggcctccyaaagtgcttggattacaggtgtgagccatggcatccagcctgtttggctcttaataagacataaaacttcctttaatttcaatcttttcataaataaaatggaaatatggaaattgttattaccttagacaataactagagaattaaatcatttaatgtattgaaacttataaaatgtttggcccataggaaatgacatgtatatttttttctactatttattgaatttgcctgatgattatttttgttttctgattttatgattccatatctctatctatagacaaagaaagagaaatactatattagatcactctagtacwtgaatttttttcaggatgtaaatctgatatttgttgtttgctgctttttgtgaggcattttttttttctaccgaagatttatattcacatctgcagatctcagaccacattagccccattccagggtcccaagtataatcaagattcttaatctcatcacctcaatttttccactcaagtctagatgcccaatgtctttcacacttggttacaactctttccccaacctaacaccttcaatgagtctctttacttactgagagcccagaaatgtgataaaaataacgtttcatgtaagttattaggtaattaagtaagttattaggatcaagtaattagaattgtctatcctaccatatagctgcaagcaaaagtctctaatccagtcattactggtcatacaaaatttatgttgtgagagcagttaccaaacaagtgtttttaattgttatgaatatatttactatttggccaggtgcggtggctcacgcctgtaatcccaacactttgggaggccgaggcaggcagatcacgaggtcaaaagatcaagaccatccaggccaacatggtgaagccccgtctttactaaaaatacaaaacttagcygagcatggtggtgcatgtgtgtagtcccagctactcaggaggctgacgcaggataattgcttgaactcaggaggcgtgggttgcagtgagccgagatcatgccactccactccagcctggcgacagggcaagactctgtctctgtctctctttctctctctctctctctctctctctmtatatatatatatatatatatacacacacacatacttactattcaatttaatttcctatattacaacaaattggaggatgtattccacattctttctaacatgagaacagaaggcaatggtttccaactaaatnnnnnnnnnnnnnnnnnnnnctggcccctgacagcttacttctctccgactacggccgcccgtccgcgcgcgctctctagctcacccgtctgccgtgtcgcttcgcattcacccttcgtccaccctcctgctcccctccgctgtcgacctgtctcccagatagtagcaatatacggagctgaactggactccccgaaagcgttcgggaggccctgcctcaccactttgtcccgtgtcgacgctacaagtctgcgtcgatccggatcggaaagccgccataggcatccgccgccgcccacacgtacagcccacgtaccaaacgaaggaagcgttacccatgagtcactgcacacaaagtctgaaccacaatagctacaggactcacggcacccccctccgccccgcgcttcgcacgcatcccagacgtagcacacgcacgtcacctcaccaacacccgccgcccacgccgtgctcaccattatcttgacgtcgcagcacgtcggtctccctgaccccccactcgcctacacgctcggtccccatcctcctgtcgtcccaggtactcggctgacatccgcgcgaccgcccatcaccatcccgtccgcatgcgcactgccgatgactgtaccacactgctgctgacgcagcacacgcatggcacccgtgccatggcgtcacgactggagcagccgacacgatcgcagagctgctcaccagccaccaggctacgtctgcgctgtgcgtcgtctttatgagatggagtctctctctgttgcccaggactggagtgcagtggtgcgatctcggctcactgcaacctctgtctcccagattcaagcaattctcctgtctcggcctccccagtagctgggactataggtgcacaccaccactcccagctaagttttgtatttttagtagagaacggggtttcaccatactggtcaggctggtctcaaactcctgacctcaggtgatccacccgccttggcctcccaaagtgctgggattacaggtgtgagccaccacrccattatttcagatgtgggatatttcaagatgattcagaaactttctgctgctttcagaaatgtatgcatagcttgtcattataaaaagggacttttcaaaaattattttgctatatcatgaagaattcaaccaaataatacttacccaagtgaaataacacctttattctttaaaatcatactgaattcccaagtttccaccttctttgggtacagttattctcagaaaagaattgtttacatttatttagagaaaaaaaataaaaccctctatctagaggcttgaaaattgtttcaaactgccatctatacagtaattcccttcagaatgaaatggtagaataatgacacagaggagcagagtccatcagccattcacactgcctgatttaacgctggtcatcaaaatcaatatggaaatgagcatttttatgtttgaaacctttgtttaacatttttcagaggaaacatggctttggggttttttatgatgctatacattttccagaagccatttaccaattccactgcagtgggccaaatttgctataaactacattctagcctttattgtatctcctggcatcttgctttgttcccatcacatattgttgtttagtgacaaaattatcttaacagcagcatttgtagttcagaatgccggcaaaatttctatgcctgaaaatataaagactatgccatattttttctaatttatgataaacctttaataaagataagtcttgctcctctctttcctgagttttactctcccctattttgaaattacctgtggcttagctttttaatatgtttccttaattattaaattaaatatagttaatgaaggactagaatttttgtatacctttaggttccagaaaggaaacattttttgctttatacttgtgggcaagaaagcattcatgtttagatttgtatacactggggattctagaaccaggaaggcaggaatatgataaggccatatttataccaactggctttctaaatcagatgcctctattgccagtaccattggtcagttcgtctgaaggatgtttccttctatagaaatcataaactwtcataaagagactgtttgggaccatagagagaagactttagatcataagggtagtggtatctaatttaggtttatttaagtaaacagtggcaggaatttcaatttttgatttttaaaattagaaacatacaaaaatacacactacaggctgggcccagtggctcacacctgtaatcccagcactttggttggccaaagccgacggatcacctgaggtcaggagttcgagaccagcctggccaatatagtgaaaccctgtctctactacaaatacaaaaatgagccgggcatggtggcacatgcctgtaatcccagctactcaggaggctgaggcaggagaatcgtttgaacccgggagacggaggttgcagtgagctgagatcacgccactgcactccagcctgggtgacaagagcgagactctttctcaaacaaacaaacaacaacaacaacaaaaacacattgcagtcaattttttttttttttttgagatggagtctcgccctgtcccccaggctggagtgcaatggtgcgatctcggctcactacaacttctgcctctggggttcaagtgattctcctgcctcagcctcctgagtagctaggattacaggcaaccgccaccacgtctggttaatttttgtatttttagtagagacagggtttcaccatgttggtcaagctgatctcgaactcctgacctcaggtgatctgccagtctcaccctcccaaagtgctcagattacaggcatgagcccctatgcccagcctacaatcaattttatagagatttagaggaagagtaaaaattatagaatttgaagattgagagggcttgtctttttaaatttatttaattgacaaataataattgcacatacttatgagtacatagtgatgattcgatacatataatgtatagtaatgcacagggtaattagcatatccatcatctcaaagatttatcgtttctttgtgttgggaacattaaatatccacttctagctatttgaaactatatattattgttaactagagtcatcctagagtggtatagagcactagaacttactcctcctatctagctggaattttgtatcctctaataaatctctccctatcactcccttcccctgacctttcccagccccagtatcctctgttcttttacttctatgagaycaactttttttttttaacttccacatttgagtaagaaagtgtggtgtttamctttttgttcttggcttatttcacgcaacataatgtcctaatcctccaattctatccactgtgaaagacaggatttcattctttttatggctaaatagtattccattgtgtatatgtgtcacattttctttattcattcatctgttgttagacacctaggttgatttcatgtcttgcctgttgtgattaatgacacaataaacatgagagtgcaggtgtctctttgatataatgatttaatttcttttggataaattaccagtaccaggattgctggatcatattggggtcctatttgtagctttttgaggaacttccatacccttctccatagtggctgtactagtttacgttcccaccaacagcttatgagttcctttttctccacattgagagggcttgtcaatgtgccagagactttaaactctgccaatgactggttttgcatctttaggcaaagtgcttaaactttctgaacttcagtattcatatatktgaawtggtgacctcatgttatatttgttgagaattaaawaaaacaatgaaaagattcttactgccctttgcacatagttttcaatcagcaaatattccaaataattctttacatatagttgtcattgaacaaataatacgacaaagataatatcttccaaaaattattgaatattaaggaataaattcagaatattgaagaagagaaataaagratcctgtgatgtggcttatattacaacattacctaaagtagtccattcctcttrgtgaataaatgaaggaattaatgaattatatgaccaatatttatagcacaaaactaatttctttccttacacacagatgtttataatgaatgttatataagagaagctctcctttattgacaataatagtaagcaattgatakttcatatgttctatgcaacattgttttctaaaatcttattgactatgtagaagataataatatttgcatacaaagaatgttttctctgtccttcctcatttttacattaattataaatttaaaacatctagaaatttcataagtttaaatatgtgtgacttggaatgctgtcatttataaatacacacagttttctaaatgaataaatggatgtatttttcatgtcctcaattatctattcatttaatgctctttatgaagttcctgatatgtgccaggcattttgttgggctctgaggaaacagtgatgatgacatgatcccagcgtttaaagccagcacattttactgacatagtcaagaaacttggttgaacactaaatgctaagtacggtttagactatttggactattgcaaaaaagaagtgtaattttctaagacctagataaggactaacacatgcaactaagaattagaaaaaattgaattagaattagaatattgaaatctgtgtgatcttgtgtaagttataaaccatccttgtatctcaaactcattatctgtaaaataatttttcaaaaattatatatatgtgaatatatatatatatacacacacacacacataatgatgcctacttcataaatgtgctatgaatattaatcttcctactgtggtttctgaagactttctatcccatttccatatattgttccccttctgaggttaatacgcaaagaataatatcaacagtagaaagcaaccccctgaccagcacacagactcagcggccatctccaaatttctctcaaattaggttcatttaaccatgcatcacttcgaaaaccaatatgaaaaggtaaaggcaaaagtagtgatgcattttaatgtctgtgtgtttacatctgttttcttagattttattctgtgactcaattaagaagataacaccaagcaattgtgcataaagaaaaatctaaagtacaatttactatgtccattatttctgccaactttaataataactactgatgagcctcacatttaagatatacagcctaggaggcatatgtgtatccaattagtcctatttcttcttagaactaaaaatactcttttatttgtagttttaatagcttaattttgctgatgttataatttgaaatgagcttagtcaaagtagcctctgacacccaaacatatggggttttgctttcactgaatttatttaagtcctttattatctcaagttacagcatggcaaagagactattttatttgcatttagtaaactttcagaacgtgtgcagttttgatagcttataatttactagaatgagggcgtaaagaaatttgatggttgctaacatgtttatggtttcttgaaaagagactggttttatcatcttgtttcatcttcttttaactcatccatgagaatatttgaatctcagaaaagcatccctgacaatcaccatgaaaggaagtaagactcttaggatgatgatagttcatggcacttaatctgtatccacttgcccattataaagacatttggagtctgtttcaatgttagacagaggtatgtttcttaatctgattccatttagcataatgctaacttctaaaattccattaaaaatacattatagagacaggagcataatttttactaccaacactatatatcgagtctgcagatctgagttcaaattatacctaaaataaaaataatgttacctttggatattacttcacctttttttcgccacattttatttatctattaaacaggggtaagaatatctcatccgtatatctctcaggatggttacgaaaattaaatctaataatgtatttaaaatttctcatcaaatgataaatatgagatattatttaagacactatctttaataatatttcatgtattgaaatatgaataaccataattactgcaattgcttaataactgttaaatagggttagtagtaatgaatcttattagaatagaatcatgtaaatagtataggctccttcctgtcttcagacatagtaatatttaaaacaaatatagaaaatttctaaacatatatacactctatactatctgtctagtggagtacgtaaaacaaacaaacagctctaccatctctaaattagagtttagattttaggtttttaggtataaccacccaagggattagctgtgtctccttgacctctctgactctctgattctcaatttttatctctggaacttgacatagaattggtatctgcaatggaaaaattcagtagtagagttgacactttttatactgaatgtgactttttggatgctataagtattgttttggagatgtaacaacctatattgtaagtcaagaaagctagtcaggcaagggaagttgagtttcttgagtatatggtgacaggcaagagatgacaatttaggcaagctctaagtgtcaaccaagacccacaaatataaccctgtccttttttattaatatgtaacaggtgtgtacaatcctgggtaacattagtacatgtattattaattatgaagtcaaatgagtatcatgcatgagggatgtctgcaaggctccatccactcggctgtatttcaaagatgagatccatgggattctagcaagataaatccagcaaattatgggtattagaagcagggagccactcaagaaatctgacaataaagaattcaattattgaaatgaagtagaaaatggtgacttaatctcataggtaaaccagaagtctagttactagaattaacacaaggtcagagctggattatgaataagattaaatcaactctgacccttctgagaactgatttttaaaattcccttttcactacaggaaagataggaattgggacattagacggcactcaagtagcaggaactatctgtaaccctgtctgtagaaataaaaggaatttgggggttaggaaaccaagtaggacataagaattaaccctggctgagcttttaaaatctttcctttactgtctttatctatctttttattttagcttataattgtttatttctctttcccaatttcttcttttaatcttctcaaagaagaaatttcataattggtgaacctattacctctgctgatttatgaaagatttctaagatttaacaatcagacttttatgtttataatatagaaattaaagtttgatttagatattcacaaaagtaccatatttttctctcctttgctttggaataaataaatgatttaaaaattattgttcttttaatagctagctaaattgttttactctaatcccttattgattctcccatgtgtcagtttctgtcaattaataacagagattaattttaaataatcgcttaccatgtgttgctcactgtgtttaagaatgcacatgtttcatatgtgttagctacatttaattctctcaacaaaaaatacatagatttttgttggtagagctagatgctaatattatcgcctttacagatgaagatactgaacacaatctcattggtaacatcaatttaattattgtttaatagttcactatgtgaatgtagtgatttacttcactatttttcttaaagaatttaggtattctttagtttttmcactgtaaacaatggcaaggatttattttttaaaattatttcatgcgtaacattttcttctgtagttaagataatttccttaggataaattttcacagtataaatccttgggtcaaaggaaagaaaaattaagggtcttgatgtctattttcacattgctttggacaaagactgttctaatctgctcagttccaacttccttttagaactgtgaaatcacagttaacaacctgcctccctgatctttgtctcatccttccttgctcttttctctttaggttttcattcccctgtttattctgtgttgatcttattcttgcactgactccctaatctctattaagctttcagtcaccaagttttcagctttttctttactatcacttaattactatgttatttctttaactactgtatgttccttcagtaactgttaaaaagagatctttccaaatggcctaagcactttttgaggcttattctgtgtatcatattcacccatttcaagaataaaagttagtgatgtttagtatatttactgagctgtgcaactatcaccataagtcagtttttgagcattttcatgaccacaataagaactcttatgtctatttgctattaatccttccgacctccaggcccaggcaaccaattatctacttttggtgagtttaaatttgcctttctatgacatcttatataatcgaattatgcaacatgtggtcctttgtgactggcgtctctcacttagcaaaatgttttgaggtccatccttggtgtagcatatatcaaaacttcattcctttttatggctgaataatagtccattgtgcagatataccacattttatgttatctattcttaaactgatgaacatttagggttatttctatttttaggctcttataaataatgctgttatcaacatttctctacaagtctttacatgaacatatactttatttgtcttagctatggatacctaggctatgcatagcttcatttatctttatcttatatagatacctaggaatgaaattgctgggtcatgtggtaactcacatatatattccactttcagaactgccatactgttttccaaagtggctgcaccattttatattcccatcagtgatgtataaggtttcttcatttctttacattcttgttcatatttattattgtctagattatttattatgaccaccttagtggctatgaaatgacatctcattagggttttagtttgtattgccttaattacttttgatgttgatcagcttttcatgtgctcatgcaacaagtttttaaatcttttttgagactgagccagggtaatgattaagaatctgaagtttgaacatagtcagacctggttcaaagtccagtgcttcctcttatcgccttagaggaacatcctgatcatcctgagccacagatttctttcccaaaaagagaggagcacaatatctggctcatagcactgtggaggattaaatgatgtaatgtgtataaagtggccagctggttggacaaatgcagtaaatagtagttgctattcttccaaataagtgtatctgtacttatccgtttgagatgcttaaaagtagtaattctaagactctttggtctcaggactcctttacactcttaaaaattattgaagactacaaaaagccttcgtatgcagattaaatttattgatattttctgtattagatactaaaactgacatattttttaaaaatttgtttacaaattaatttttccaataactatgataaacccattagaagttaacataaacaatatttttatgaaaaataaatatatgtttagaaacaaaataatgagaagagtagcatttttttacatttcccaaatctatttaatgatttggctcaatagaaaacatctgggttttcctctctgcttctgcagtcaatctgttatactgcacttcatgcagcctctggaaaaaaatccacagttaactcatgagagcctaacagtgaaaaagacaaataaggtcttagtattattacaaaaatagtttgactttacagatcttctgatgggttctcaaggcccccctggaggccctggaccactctttgagaagcattgctataagagctatgagagaatttttcaacccaattaattaggccctgtttatactcagcactatattcagtgtgaatgattttggacttatttttgaaaaaaattattggaaagtaagtagatgtgaaatttttggaatattagaaaacataatcaaattataaaaataatgaattatagaatagacaatgttacaaaaaatattgtgtgaagaaagactattgtgggccactgggaaattcttgtgggatgttaataaggaatgtcttaaactatgcaataattcctggaggatagagaggttattaactctttgcaattctttttacataagcaaakattccaaagttattattaaatgactagacaaacggtggcaaaattttgggtaatcaaattaggtaagaagaaatatgtgctgggggtggagmtaagatggccggataggaacacctccagtctacagctcccagcatgggtgatgcagaagatgggtgatttctgcatttccaactgaggtaccaggttcatctcactggggattgtcggacagtgggtgcaggacagtgggtgctgtgcaccgagcatgagccgaagcagggtgaggcattgcctcacccgggaagcacaaggggtcagggaattccgtttcctagtcaaagaaaggggtgacagacggcacckggaaaatcgggtcactcccaccctaatactgcgcttttccaatggtcttagcaaatagcacaccaggagattatatcccgcacctgtcttggagggtcctacaagcacggagcctcgctcattgctagcacagcaggctgagatcaaactgcaaggcagcagcaaggctggaggaggggcaccccgccattgcccaggcttgagtaggtaaacaaagcggctgggaagctcaaactgggtggagcccaccacagctcaaggagacctgcctgcctctgtagactccacctctgagggcagggcatagccaaacaaaaggcagcagaaacctctgcagacttaaatgtccctgtctgacaggtttaaagagagtagtggttctcccagcacgcagctggagatctgagaacggacagactacctcctcaagtgggtccctgacccccgagtagcctaactgggaggcaccccaaagtaggggcagactgacacttcacatggccgggtactcctctgggacaaaacttccagaggaacaatcaggcagcaacatttgctgttcaccaatatccactgttctgcagcttctgctgctgatacccaggcaaagagggtctggagtggacctccagcaaactccaacagatctgcagctgagggtcctgactgttagaaggaaaactaacaaacagaaaggacagccacaccaaaacaccatctgtacgtcaccatcatcaaagaccaaaggtagataaaaccacaaagatggggaaaaaacaaagcagaaaaactggaaacactaaaaatcagagtgcctctcctcctccaaaggaatgcagctcctcaccagcaatggaacaaaggtggacagagaatgactttgacgagttgagagaagacagcttcagacaatcaaactactctgagctaaaggaggaagttcgaacccatagcaaagaagttaaaaaccttgaaaaaaaatttgacaaatggctaactagaataaccaatgcagagaagtccttaaaggacctgatgatgctgaaaaccatggcacgagaactacatgacaaatgcataagcctcagtagccgattcgatcaactggaagaaagggtatcagtgatgtaagatcaaatgaataaaatgaagcgagaagagaagtttacagaaaaaagaataaaaagaaacaaacaaagcctccaagaaatatggaactatgtgaaagaccaaatctacgtctgattggtgtacctgaaagtgatggggagaatggaaccaagttggaaaacactgcaagatattatccaggagaacttccccaatctagcaaggcaggccaacattcaaactcaggaaatacagagaatgccacaaagatactcctcgagaagagcaactccaagacacataattgtcagattcaccaaagttgaaatgaaggaaaaaatgttaagggcagccagagagaaaagtcgggttacccacaaagggaagcccatcagacttacagctgacctctcggcagaaactctacaarccagaagagagtgggggccaatattcaacattattaaagaaaagaattttcaacccagaatttcacatccagccaaactaagcttcataagtgaaggagaaataaaatactttacagacaagcaaacactgagagattttgtcaccaccaggcctggtggtgacaaacagagctcctgaaggaagcactacacatggaaaggaacaaccggtaccagccactgcaaaaacatgccaaattgtaaagactatcgaggctaggaagaaactacatcaactaacgagcaaaataaccagctaacatcacaatgacaggatcaaattcacacataacaattttaaccttaaatgtaaatgggctaaatgctccaattaaaagacagactggcaaactggataaagactcaagacccatcagtgtgctgtattcaggaaacccatctcacatgcagagacacacatgggctcaaaataaagggatggaggaagatctaccaagcaaatggaaaacaaaaaaaggtaggggttgcaatcctagtctctgataaaacagactttaaaccgacaaagatcaaaagagataaagaaggccattacataatgttaaagggatcaattcaacaagaagagctaactatcctaaatatatatacaccacatacaggagcacccagattcataaagcaagtccttagagacctacaaagagacttagactcccacacaataataatgggagactttaacaccccactgtcaacattagacagatcaacgagacagaaagttawcaaggatatccaggaattgaactcagctctgcaccaagcagacctaatagacatctacagaactctccaccccaaatcaacagaatatacattcttttcagcaccacaccacacctattccaaaattgaccacatagttggaagtaaagcactcctcagcaaatgtaaaagaacagaaattgtaaaaaactgtctctcagaccacagtgcaatcaaactagaactcagcattaagaaactcactcaaaaccactcaactacatggaaactaaacaacctgctcctgaatgactactgggtacataacgaaatgaaggcagaaataaagatattccttgaaaccaacgagaacaaagacacaacataccagaatctctgggacacattcaaagaagtgtgtagagggaaatttataacactaaaggcccacaagagaaagcaggaaagatctaaaattgacaccctaacatcacaatgaaaagaactagagaagcaagagcaaacacattcaaaaactaccagaaggcaagaaataactaagatcagagcagaactgaagtagatagagacacaaaaaacccttcaaaaaatcaatgaatccaggagctggttttttttaaaagatcaacaaaattgataggccgctagcaagactaataaagaagaaaagagagaagaatcaaatagattcaataaaaaatgataaaggggatatcaccaccgatcccacagaaatacaaactaccatcagagaatactataaacacctctacacaaataaactagaaaatctcaaagaaatggataaattcctagacacatacaccctcccaagactaaaccaggaagaagttgaatttcagaatagaccaataacaggctctgaaattgaagcaataattaatagcttaccaaccaaaaaaagtccaggaccagatggattcacagccgaattctaccagaggtacaaggaggagctggtaccattccttctgaaactattcgaatcaatagaaaaagagggaatcctccctaactsattttatgaggccagcatcatcctgataccaaagcctggcagagacactacaaaaaaagagaattttagaccaatatccctgatgaacatcgatgcaaaaattctcaataaaatactggcaaaccaaatacagtaacacatcaaaaagcttatccaccatgatcaagtgggcttcatgccggggatgaaaggctggttcaacacacacaaatcaataaacgtaatccagtgtataaacagaaccaatgacaaaaaccacatgattatctcaatagatgcagaaaaggcctttgacaaaatctacacccttcatgctaaaaactctcaataaattaggtattgatggracgtatctcaaaataaaaagaggtatctatgacaaacccacagccaatatcatactcaatgggcaaaaactggaagcattccctttgaaaactggcacaagacagggataccctctctcaccactcctattcaacatagtgttgggagctctggcyagggcaatcaggcaggagaaggaaataaagggtattcaattaggaaaagaggaagtcaaattgtccctgtttgcagatgacatgattgtatatctagaaaaccccattgtctcagcccacaatctccttaagctgataggcaacttcagcaaagtctcaggatacaaaatcaatgcgcaaaaatcacaagcattcttatacaccaataacagacaaacagagagccaaatcatgagtgaactcccattcacaattgcttcaaagagaataaaatacctaggaatccaaataaaagacgatacaaacaaatggaagaacattccatgctcatgggtaggaagaatcaatatcgtgaaaatggccatgctgcccaaggtaatttatagattcaatgccatccccatcaagctaccaatgactttcttcacagaattggaaaaaactactttaaagttcatatggaagcaaaaaagagcccgcattgccaagtcaatcctaagccaaaagaacaaagccagaggcatcacgctacctgacttcaaactrtactacaaggctacagtaaccaaaacagcatggtactggtaccaaaacgaagatatagaccaatggaacagaacagagccctcagaaataatgctgcatatctacaactatctgatatttgacaaacctgacaaaaacaagcaatgggtcctggctaacacggtgaaaccccgtctctactaaaaatacaaaaattagccgggcatggtggcgcgcgcctgtagtcccagctacacgggaggctgaggcaggagaatggcgtgaacccgggaggcggagcttgcagtgagtcgagatcgcgccactgcactccagcctgggcgacagagcaaaactccgtctcaaaaaaaaaaaaaaaaaaaaaaaaaccaagcaatggggaaaggagtccatatttaataaatggtgctgggaaaactggctagccatatgtagaaagctaaaactggatcccttccttacaccttatacacaaattaattcaagcttgattaaaaacttaaacgttagacctaaaaccataaaaaccctagaagaaaacctaggcaataccattcaggacataggtatgggcaaggacttcatgtctaagacaccaaaagcaatggcaacaaaagcaaaattgacaaatgggatctaattaaactaaagagcttctgcacagcaraagaaactaccatcagagtgaacaggcaacctacagaatgggagaaaatttttgccatctactcatctgacaaagggctaatatccagaatcttcaaagaactcaaatttacaagcaaaaaacaaaccaccccatcaaaaagtgggcaaaggatatgaacagacacttctcaaaagaagacatttatgcagccaaaaacacatgaaaaaatgctcatcatcactggccatcagagaaatgcaaatgaaaaccacaatgagataccatctcacaccagttagaatggtgatcattaaaaagtcaggaaactacaggtgctggagaggatgtggaggaataggaacacttttacactgttggtgggactgtaaactagttcaaccattgtggaagtcagcgtggtgattcctcaggaatctagaactagaaataccwtttgacccagccatcccattgctgggtgtatacccagaggattataaaacatgctgctataaagacacatgcacacgtatgtttactgtggcactattcccaatagcaaagacttggaaccaacccaaatgtccaacaatgatagactggattaagataaatgtggcacatatacaccatggaatactatgcagccataaaacaggatgagttcatgtcctttgcagggacatggatgaagctggaaaccatcattcttagcaaactatggcaaggacaaaaaaccaaacactgcatgttctcactcataggtaggaattgaacaatgagaacacagggacacaggaaggggaacatcacacaccggggcctgttgtggggtggggagagggggggagggatagcattaggagatatacctaatgttaaatgacgagttaatggatgcagcacaccaacatggcacaagtatacatatgtaacaaacttttaccttgtgcacatgtaccctaaaacttacagtataataaaaaraagaaatatgtgcttacttctttttcatatttcacaactgaccagtgaattgcctgttctatattttattttttgagcttggaatcatgtcccatttaaccaagcatgcaatatttatttgatggtaaaaattcaattccacaatatcatatgaacgtttctgatgaaaaacagcaggaggaatagcttgtaatatgggtccttgtaactcagtaatttaatttacagtccaattacttgagcttcatgacttacagggtattatataaagtaaataaagtttctttgaaattaatttttcagtctgaaaacactagaaactwttcaagtatatttgatataactctatttctgtgagaaaaaaaagtattaaatttttctcgtccagctatgtgtgatgcacattcactcattcgcccattgttcaactgttcgttcattctttcattttattttgacatacgatagtacttttgtagtaggttttttttttyccctgaaacatgttcaagccctagggtttctaatggcagagctgaagactggtgtaccaggcagtgccgcatgttatactccattatagactgtgrcagttaattttatgcgttcatttgagtaggccacagggtgcccaggagaaacattgttttggggtgttacactgtaagggtgcttctggctgagatttgcatttgaatcagtgactcagtatagtagattgcaaggcccacaatcacccctgccaaagtgattggtatcatccaatctattgaggtcccagaatagagcaaaaggcagaggaagtaagaattcatccctctttggctgggcgccgtggctcaccccgtaatcccagcactttaggaggctgaggtgggtgtatcacctgaggtcaggggttcgataccagcctggccgatatggtgaaaccccatctctactaataatacaaaaattagcagagtgtgatggcacacacctgtaatcccagctactcgagaggctgaggccggagaattgcttgaattccggaggcagaggttgcagtgagccgagatcgtgacattgcactccagcctgggcaacaagagtgaaactccatctcaaaaaaaaaaaattatatttatatgtgtgtgtgtgtgtatatatatatatatatatatatatatatatgtatatatgtgtgtgtgtgtatgtgtatgaatttatccctctttttcctgcttcactgcttgatctggaatgtctcatcacatttctcctgcccttggactgaaacttacattattggttctcctgggttctcaggccttcagatgcaggttaaattataccaccagatttagtgggtctccagcctgcagaaggcatattgtgggcttctcagcctccataattgcatgggtcattcctcatttatatacacataaaatggttctgtttctatggagaacctgagtaatacacagacttaagtaataaaatggaccgtgaaatttcaggaaagaaatcctgtgatcatcaagaaagacttctctatggacaagtctgagctgcactgattttagaaggaaaagtgagaattttcccagtaaataaagagttgaattgacaaggattcagaatgacttataatggtagaggagcacaataacatcacagctaggtacccttcagcatgctcaggtgtcttgtcttagctgccacttgatactacttaatctaacatttaaatatgatgtatccctaggtttgaatctcacatctgctacttactaggtttataacttgggaaaatgatctaagccctgttttgccatttataacatgacaataataatgctcaccttgaagctttcttatcaagattgaatacaatatgctaaaagctgtcagcacaatgtgtaacacttagtaggcctacaaataaaagattgttgtcattattgattcttaccccctagacacctaccttttggcagagatcacacttgaaataatattagcatggcacaatgtcaatattaaaagaatggctatctattaaatattaaaagaatggtgatgttagattcccattattgacattccctcatgggaaataattttcttttccatgtttcaaatcatctttcctgagtaagtaactggtatttctctcataaaatgattgaagttaagaaacaagcagagataacatcttagttataatgcaaggtgacataataaaatgagaaacaaatacatagtgtttataaattgacacataaaatgtaaattatggcaaattattcatgatacagttttaagaaaayttatttaaaagccaatcacaattcttttcacactctctttctaaatatcaatatacacaatggaaaaaattttaataatcatattatagggtcctaagaattgcacttgaagatttttaaarggagagaataagattagagataatatttttgagggaaaattgatagggtaattgattctagaatgcaaaatttgaacgacaatggcaaagaaatatatgccacatgtacaatgaaatttcaggaatttttcccctgaaggacatttctaaattctttaggtccttaacaccttaatgtatctattttagcatgggtagtgataaacaattgcaatctcaggatcattttaaatgttccaaaaatattttttgacacagaataagaaaagaaagtaaattttcctatcaaatttaggatttgcaataaatggttgtttccctactgtgaagaacatcagttccttatttaacacaatttattcactgtatgtgtagaaaattgatagcaggaacattcctatttgaacattcacagttgctggcttttaaacttttaatttcttactgttactttgcaatcaaatttagtgttgtcgctttgaaataaatgctgggtcacattcagttagttagattttgacattgttttccaggagtcaagaggtggctgaagttcctgagggcctaaaaatagttctgaaacagaagtgtacaccctaggggcttgattatctttgtgagcatgcagttgtattttcaacacaattagctgcctaactgtttgactaaacttttctatgtatttgcacatgtaagtaattatgacagaattaaaatctgaaaagctctctgcctactttgttttcccttatgaataagactaaaaacacatattgaaaagaattttattttgtaaactcattcactgaatgaaygaaatatgaaaggattttttaaaatatatttgttaccccccaaagaggaagatactagagactatgattaaacaaaaagaagttgcaacaatctgctagcaccctttctggtctgatctcccgctacccccaatacacacgtgaatttaatgtacatctattaatatgaatttataaatatacattaatttagtgtacactaacaattaatggccattacagtttatctttatttatagtttcagtttatatattttacccttcattgtattattttcctataacttatgcagcattttatatacattcactttttatatgactcatgccttatatacctatactgaacctaactctgaacacatttaatatgagttagtgtactttttgaatatgaatctgccctttctaccaatcccatagatggaggccaaattgtaaggtatttataagtastacctgtgccaaatgtcgagtagcatcatctgccttatatgaaactcttattggttatgtagatgaagaaggtgcataaagagtgatgagagcattgtaagagtgaagcgtaacatgtagatcaagtattagtgtccttcactttacccattcctgctgtttgatacattctgctctaaatgtcaaaaggatcttctaagttgtgtggtaaagtatcttgtaatccaatgtagtcatttacacccaagtattactttcaaaattgtaaagggcactctgcacttgtattagttggattgagcttgttcattttacaaaattctgactcagttctctaaagtttgcatcaattacgttaaacaatgcaggcttttaaaattgagtaatcatttttatcagccatttttcaacagtggctcttttcatgcatggttaagtgtgattttggctgttaaatcsttcttctcgaatgaaataagcattttaattcagcaatctgaaaatcatcaataacagacattgtcttgcccttttgctctcccaatttacctaatcagttctcattttttaatatgagcacataactatttcaaacagacaattttcagtcctagatttaatgtttctaatagcaggaccccacttagagtcccttggtagttcttgtggctaaacagcctcagagtcaagaaggcatgccttatgacttggttagagctgcactctttgcctttagatttgcttgcaggggagatgtagaacaggtgagcatcttcctcagaacaacccttcattgtcttcattgaaaasaattattaagaagctcattgttggccaggtgcagcggctcatgcctataatcccagcactttcagagatcaaggcaggaggatcccttgagcctaggagttcaagaccaccttgggcaacatagggagactcctcggctctacaacaaaaagaagcacgttattttttctgcaggcaagatatgaacaactcatcttgactcttgtttgctagtttctattctttgaaatggtaaaatcaaatctgtcattcaaagttttgcacatagaaggtacccagcacatttttaatgtttctttttctttcaccctttaatgtacagaaaacagtcaatactaaacaaaaaccgataagcatgtagctgagggactacagtcattactgattatcgttaagtgtatttgcactcctgcctttcgtgtgcctattcttattttaatgtttgcttttggtcccaaaagactcatggggatttctgtggtgatttctaaaattcttcctctgtgtagctccctcctctctgggacagtgcctcacaaatccagctatcccactcttgcaaatctgacctctctccacagctgaggaagactgccaggctctgtttgggtttacttctctgtgatttggtccagaaaatatctccaatgttttgttgtaaaattatgatgtcggccgggcgcggtggctcacgcctgtaatcccagcactttgggaggccgaggcgggcggatcacgaggtcaggagatcgagaccatcccggctaaaacggtgaaaccccgtctctactaaaaatacaaaaaattagccgggcgtagtggcgggcgcctgtagtcccagctacttgggaggctgaggcgggagaatggcgtgaacccgggaggcggagcttgcagtgagccgagatcccgccactgcactccagcctgggcgacagagcgagactccgtctcaaaaaaaaaaaaaaaaaaaaaaaaaaaaaaaaaaaattatgatgtctcagaagttgtaaaattatgacagggtatcttcatttggctgtgcttggttctaccttagttccttttgaatctccatatccagtttaagcatgatgataaactaattaaagcaaactgaaggccaaccggcatgcatcgggttaaatgatggcttctcagagcatcttgtcatcatgaaactgaagagttccctgatcccccatgcaggacatggaacaggtttgtggctcacttgttcagttgccatcactgctcaaaccccttgcaggaaggggagcatgcagatgggcaggtgcagaggctggggccagtgctttgggctctggccctgtggtagtgtctaggggtgggtgcctgcaaccccagtgttacaatgctgtcttagccttgctgtctgcacatggctttaagtgttaaccagttcagtggactctctgcctttttgcaagggcagaaggccagagtgacagctttctgtgtcctgagctcttgcccactgtcctggaagaattggattacacatggacttgaaggatgaatgtgaggtttttttgtttgtttgtttgttttttgagatgcagtctcgctctgttgctcaggatggagtacagtagcatgatctcagttcactggaatctccgcctcctgggttcaaacaattcttctgcctcagcctcccaagtagctgggattacaggtgtgcgccaccacacctggctaatttttgtatttttagtagagatgaggcttcaccatattggccaggctggactggaacccctgacctcatgatctgcctgcctcagcctcccaaagtgctgggaattcaagcgaatgtgagtttttattgagtggtggaggtggccctcagtggaatggatggggagccagaagtggggatggagtggaaagatgatcttcccttggagttggaccattcagccactaaactcctctctgaccaccccaagccgaactcctctcagcactcagacattccccctcttccctctttctctgctgtgtcattctgctgttcatctgcttgtcttatatcctcatctgctggtcttttctggagcctgggatacaggatagggacatggcaggccaaaaggcaactttttgggagagaaaacagaaatgcctgttctcatttagggccacgggtgtccaggcttgagagtaggggctttgctggggaactgccctcttcttcttctttttttttttttcgtttgagatggattctccctctttcacccagggtggagtgcagtggcacgatcttggctcactgcaacctccgcctcctgggttcaagcgattcttctgcctcagcctccttgagtagctaggactacaggcatatggcaccacgtccagctaatttttattttttgtatttttagtagagacaaattttcaccatgttgcccaggctggtctcgaactcttgacctcaggtgatccgtgccccttggcctctcaaagtgctgggattacaggtgtagactgccctcttctacccagtatttccaactcctgttcatatcatcacaattaaatagaagtacaaatggcatgttaaaaaaatatattaaatacaacccttgatgattaagcacatttggtttgaatttataaaatagatacttagtgtggcagattaatttattgagacattaatttgtattttgttcttactgctgttggaattacatttacctcctgtatcattaaaaataawttttttaaaagggaccccgtaatgtggtcttttacctcagaggcttttgtgctgcaggtttaaagcagaagttaccagatacccataagccaaataagtcctgacttttgtttgttcaggtctgggctcatttatgggatttatgatgcacagttcaagcaggagtatgggagttcttggatttctaggaaaggtgactaactagagacttttgwgggcttataccagattggttctaggtccttgagagagtggaggttgaaaagcagctctctgctccctcacaatgccctggggagcggtgtatctagtgaaaagggacactaaataccaatgttttggtctccagtaagtcaccatattttgtcaaaagtctcttttcctaaggttgacacttaagtgcagctggcaacatrtattcagcaggattcttgttcttcccaaatgtccagaatggagatactcctgccaactccctcccgccaaccaggatttgttcttttcctggtacttgtttgttttgcaaggctttgtgtagtctcttctctgcatttacagctcagccaaagattccaggaaatctgtatagagatttctggaactcttttactgcatagtgccctcctctctggtacaatgccctacaaattccagctgcctcacctcctccaactgaactttgatttctgtctcttcagctaagtatgattggcatgccctgcttgggtttcctctgctcatgtctaaatctaggaagtgcctccaggcagaaatcctgggcgactgtaggacattcctcatttgttccactcctcattgcaaacacagttccttagtgtctgttttccagtgcctgaaaagagctgttgcacatatttttcgagttttccaatagtttatggctggcaggctgatctgctaccagttattctcaaagccagaagcagtagggtgatattttaaaaacagatataagtgtgtgattcctctacttagagctcttcaatggttttccacagaacttagaaaaagattcgaaatcctctgtgaggcctgttctgagtgtgttctgggccctatctaccagcagagcttcacctcagccactgtcattttcacccactagtctacctagtctcactttcagtgttccagggtgccatgcacattcccaaatgaagacctttaaatgccaacttggatataatccatctgactcatgtgtctactcctgaactatttaattgtagatgagagtgcaaggccacacatcacagcctggtcactaggacactcatatagcatacgcacatttccttggcttcagcataaagagtattatttggagctttttcgtagcagtggacaaaggttaaaatagcgagaattttttaaagtttattgtaaacacagtattttggcaatagaaaatacactcggagagtataaaaatatgttatatctttgtttatggaaacaatyagtattttgaaatttaaatcttggcatttaagtagttaccataaaaaagtattcattgcaggttttcaaaaatgtatgcaactaattatatttagtaaaagaatacatttaaaggaaataataagtggaattgttgagaataacttgaatgattctaaaacaggctaagagtttttyattagtttcactttctaattttatctatagttcactttaattgcacagttaagttacttcttaggatttccaccaagtccaaccctcttctacctccaacctttaaatatcagcagccccctaaggtataaatttacctttagtttttatgtttctttcggtaacttaatagaatggacaatcttgatcccaatggaaacatgacttttccaaaattatgttttgcagaaagctcttctaacatgttataactattttttttcaaatctatattttattttttacctattcaacaaagatggtccaacataattaaaaatcattgatcagttgagtagaagctggacttgggctaccatgtaaaactcaagggccactattcatatcataatctatgggaatgaggactcctgaagctgtacagagcataatctggctggctatttgtgatgggcattggtctggaaggcaaagttattgcatttaaagagagagttatttaattgcatgtttgatgtcttaataataataatgtaaacatgatttttaaaggccaaaattttggaagctgttgataacaacacatttcttggccaaaagaatattttctcagccactttaacaaaagtctaaatgaaaagcttcatttgcattactgttctttatttctgtctattctctcctttggcaacatttggcaatattttctcttttttatggtgttacaagaagcatctttaaattactaggtcaaaagtatttttacagatgtattagaagatatggaatattatatataaaaggaaaatgtgttttttattatcaggaacagaatgtctcaggctgggttaggaatgagagaaccaagacctgcaccaaagtcctagtgatacgaagacagccaacctgtcaatgtgtcatgctcctcagggcagcaagtggccaagggttgtggagataactcaagtgaccaggaattgacgaagctaaggcaagaatttgtaagattcacattcagtttacattggctgaatggcaattttgtttcagatggtatgcttggtaacactgacatatattaattaaacattatttaatgccaagatagacatcaaaaggagaaatttgccaactggctagaggcaggaaaaattagaaccaagtaggcaagaaaaagaagtgcataaatgtgtagggtaaatcaaagccaaagatcacaactagagggagacttagggaaattaaaacagcagcctaaagccagcaggagaataactgtgacttaccaaaagaaagaatattcaaaatgaagatgatagtgataagaatggtcatagtgatggtcgataagacttatatatcaggtgcgagactaggcattttatatgcaatgctgcgtaaaasctcacaacagccccacaacgtaggtataatgtaggtttgatgatgggtcaaaatgtcagctttattactggagctgcattggagagtgcaatgaattctgtgaatcaacttgaatcctaatgacctttctaaatagttttctctcagtattaaattcatccactcagtatctactcctacccacaggagaacaggaacttggtgattttaattcatgccctttcttagtctcacaaataaatactctcttcctttgaagagtgggagtaagaagtgaaagatgttttttggtgttttatgtttgtttgttttcttttatccagttacaaatygcatttgaatgctagtaacagacattccaaacagtagattaaccaatgtaattgttttatttttgtctaatgacaagaaatttataggtgtatggttggtggcattaaaatatcagggcaaaggattttgtgattcttttagattttccctggaagctaagatatagctgcttaaacaattatgttcatattctrtgttctagaaaagcaaaaggcaaagtgttgcaaacaagtttagtttatccctacatcccatcccctrtcttatatgaagagcttttctctgcatttctacccaaggacttctacgtacatcttactgaccaacatcacatggttatccctagctgaaaagtaggcttggtgtgtagattttaactgggcatattgcttccctcaattattgggattccgttaatgtaaagggagagtaaatattgaatcagtaagtagctctatgggacatgttactccaagagtgtttttctcaaggtgaagttctcttttgaaaacatgaataagggagaataaaacactaaacacttgattttttttcccatttgattatgatcaagtaattattcccatttttattattattcccatttatagttgtgatatccaaggctcagaagagctaagcaacttgaccaagttcatactttataaaagtggatttatattcaaacctaaaattgactcatttaataactcgatttcttaagtatttgctagctcctttctttctctcaggagtaactcaagggcttgcaatgcgtgaacgagtgctcttaaagtaatagggaaagggtactgaaccaaaaaaaaaaaatasttctacctttaaggtgcagtgatgtgaagttgaaataccactgtggctcagagaagttttatgcaagaaggttctcaaaagatatttctggattgcatgcatcagaattattttaccaaatatctagggacagagcctggtaactgcagcataattagctttgaagagcatttacatgtgcatactaaracttgggaaccactcagagagggtgagatcagtttcatctaagcatggaagaatttttagaagaggtggttaatctagttgttggagaatagggatgacctagaaacatggaaataaagtttcacttagagggcatggattttggcaatagcatggatgaggaaaaacatgtggcatatggatattggagaggaagcttggcgtgcacagagaactgggagcaatcagatcaaaatgagggaagaccagagtaattggtatctatggatcacaacgacagaatacaaagaaagataggtgcacttgtctcaaagaccttcacataggtggagagattactattgaccactgggattatagagtatgcattatatttagaagaaaatctcacttatccaaattcgcgtgcacacatacacacacacacacacacacacacacacacatatatatatatatatatatctcccagcaactccacctgcaaatgatcttactcagctgattccactaactattcatagatgacttggttgatctagggacaaagggcaagataaaaaccctgctatcccactgggccagctgcaaagcaagcttcattttgaaaataaagcttcatgggcaaaataaataagagcctgtacaaggagatggggctctgaaggttattttaaaactttcaagcaatgttttcaaccacataccataatgctttccmcctttttcatattttgctttgtcttttgtccatatagttgctggcatgcacttatttaataaatatccgactctataaaataaaaggagaatccattagtgaatgtaattaaatattactgttattgatttagttaatgaaaatcattgagagctttcagagatcattttcataaccttgacagaaaattcaaatgtcctttcctacaaaacaccatagaaataaatcaccatgcattcctttactgtttgtgttactgacattaaatcacactaatttgataatataaattataaaatttcttttctttttttaaattttttttaattttttgagacagagtcttgcactgtcacccaggctggagtacagtggagtgatctcagctcactacaacctccacctcctgggttcaaataattctcctgcctcagcctccygagtagctgggattataggtgcctaccaccacgtccagctaatcttttgtatttttagtaaagacggggtttcactatgttggccaggctggtcttgaactcctgaccttgtgattcacccacctcggcctcccaaagtgctgggattacaggtgtgagccaccacgcccggcttaaaatttctttttataagtatttctacgaaaactgtatcataaacaaacccaaataaatgaggaattatgtagaaatggcaaaacttgactaaccataaatttagtttgtggaaaaaaaattattcaaaggcatgtgctggccatcagatactgaacgaagaagtattcttagaaacatcaccattttctctgtattttaatgtattaaacttgcattaagtttccaaacttaaaatttgtattttatcttattgtctaactgatcattagactatgttaacaaaatttcacttacatttgatataagcatgaatgtctaaaaaaattatattttgaatgtaatgcgaaactgaactaatttgtttttgaatatgtgtgcattttatgaactttcatctatcttatgggtgcttttaagatcactaattagtctgctattcaattctttttaagtaaacgttttgtctaaattttattctgccgtaatcagttattgagaaaagttcataggttttggtctagacaacaagttaaatttatattacttgttttaaaacataattatctgtcaactggataattgaaattttaaataagtattagaagttaaatatagcaggtccttgaataatatcattttgttcaactcctgttgttataaacaatgatagggggagaaaatcarttcccacctgggccactgtctgtgtggaattcgcacattctctggtgtctataggggttttttcttggtactctggtttgctcccaaatccccaagatgtgcacattaggttaactggcttgtctacattgtcccaatcagagtgagtgtgggtgtgtgtttagtacttgctgtgtgtgatggaatggtgtcctgttcagggctggttcccttcttgtgcactgagtttyggggataggctccagccacctgtgacccagaactggaattaaaaaattaatgagttaattaatatatattactgtaaaataaaagttcataaagtagacaataatcccacaaattcactacataaaatgatgcagtgcaaaagtgctcagggagcccaccctgttcatgattgttttagaactgcatgatagaagagctgctctttacaattttcacttttgcgaatatttattcttagatttaacccactacctttaccaccactgtcactcactgattcaccaaaaattgggtaaaccattattttatttgtttttgtttgtctttcttaatggtaagtatagctcacatttatttcaatactcaatattgaaagtctctttgtcttatttagaagtttgttgatatttttgtgaccagaaacatgccatgggagcttaactcttgtttatatcaattaaccttcgttaaaattggttgtgttaaagttgcggttttcaagaacctatcaataatgttaagtgaggatttcctacaagttatgatgttaagatgaagggaataaaggtgtgactgactttaaaatcttttcagactggcttaagatagtattgtttatttgccttcatgttttagagttttatcatgttgtaggaaatatgggcttcagcttttccagttcctaagagaataaacttgttacctttgttttgaggatgaaatattacagaataatttctccttaggtcagaatctcatttaataagaaatttttaacatattgccttttatcagcctcatccttctctgtaacatctggcctgagaaataagcaagttgaaaatagtctttgtggtataaatctgaaataccagaaataattagcaagtgtatataaacaaaaccaagttacgatcagtgttcaaaccatagcacttatttmcacacacacacacacacacacacaagagaagtcagatttttagagccccttgcctctggattggttcaaacacagagccctttaatacttgtcattcaactcctttgagactttcattgttcataaaatgggtataagacctttctttcatggttgttgtagatactagaggcaggatatacaaaatctgtcttacatctctggtccatattttgacctaatatcagtcagctgtcattattaataatgaagtggggccaggatagaagatacattaagtcatcagggattgtggcgttagaactgggaatctggaaaccttagtaaaactggtatttacttaaaaatcatttgtagttaaggaggaaaattacttacttctagtagagaaaaaaaaaggagcaataagctatctcagtaaaatttattaataaagaaagaaccacggtgtactattacccttgaaaaatgtaacctttgcctccttcagttttttccatatcttcttggagatgaaagggtaagtccatgaaaaagtgaaaaagtaacccaccacacatcgtaagtttctttctaagaactgtcactttccttctattttaaaggggacttatttttgcactgacagacacaactgagtgcaaaagcagatgcttaattatgatatgatttttttaaaactggatttttactgttttttattcttctgacttttatccaagtgatgctaaagattggcttgaaatttataagtattgtgttcaatcttgtaaaagacagtttgaacactaaattaattgtttttatataaattattattgaaatgttagtacctgtgaagaagttctactctattttattcaaccaataatatctcaaattttataagatattgaagctcagagaagttgaaaaacttattgaagattctatattctaattggaggaaattgagatcttgtcaaagtatatttgaacttagagttttctctgccatacttcaagaatgtccccttgagggaagagaagaagaaaaggaaaaaagaatgatattggatcatgataattaggaactgatggtcaatgagagcataatcacacagatgttttccacacatgatattttaaaatttttaaattaatttttgctacctataattagaaagattttatatacaaatctaatttctagcctttttaaaaaaagatacatttggcaaccttgggccttatttcatcatggcatcatcacttatgaattagctaaagctggggtggagctgccttctttatctaggacatctagtcttrtgctcaatgctgtccctgggccagcttcactcattcatgttacctgtgcagctcccggggaagaacatgtgagctatgatgaaacaggggcccctgctgagatgtttcctatgactggtgaaggctaagcagcctgcatacactggtaatcctatgtatgtatgtatgagtrtatttatttttgcttcaattgtctgttagacctaaagtttctgggccagggaggatgagatagtttgtatgtctcaaattcaggaattaaaatagagcaaagaaatctgagggcctcccattttaccaaattcaccttgtagacaagggaaatatttcagtattcattatttttctgacccatttgccttcttgtagctattagagaatggaggagtttaagatgtaatgagtgaaatgtgtaccaggctctgaatcaggctcttacgctttactgcatatattcattcacttgtgtgttgagtgtctttatgtcattrtcatggcaattgctggagatatacacctaccctcacagcccaaggcttgagagaaagacaaataataagtaatcaagtaaagaagttgctactcatgcaaacagtwgtaggaactatagctacgtggtcagagaaggcctctcagagtggatgacatttaggatgagagttaagaggagaaggagccagacactgtacaagctgggagaagagaactctaggcagaggatcaacagcagcaaaygccttgggaacacagtgttttatctcccagctttagagtctgaaaacaaagttaatgcaattgcagcctacttgaataaaaggaagatgatattggcaaagtggacaaaccatggtgaagagttggtaagttcattggaaactctcatttaatcctcccccaaacactgtgaaacagaagcaaatcttaggcaaaagaatcatccagactgatcacttactagctatctatcttggtactggttttaatcttatttgagcttcaaagataataatacccacatcataggactttttgtcagaactaaaggctatatgccatgcagagttttacgggaatgtccagcccataggaagtgctccgtaaatgataggttttattattttaaataaggaagggggaagatacactctctctcttctcaatctagactctcttccttttccttcgtccggtaatggtgaagttatgatttgtgtgatttcattttaaagtttatcatggtcaaggcttgtgtctaagaatttcagcaggcaatgtgtttgagctccctcctcacctcttcccacctgtaacattagttctttccccttctttcttctgtctgacaattggtggtggtttaaagaatctgcaatcccgccgggcattgtagctcacgcctgtaatcccagcactttgggaggccgaggtgggtgtatcacgaggtcaggagattgagatcatcctggccaatatggtgaaaccctgtctttactaaaatacagaaaattatccgggcctgatgatgcatgcctgtagtcccagctactcgggaggctgaggcaggggaatctcttgaacccaggaggtggagattgcggtragttgatatcatgccattgtactccaacctggtgacagagtgagactctgtctaaaaaaaaaaacaatctgcaatccatggactcagagtttctaaggtttataaccctctgattattttgacagccttcatatatactccccctcaatgtatttatacacacacacaacacaacacacacatacacacacaaaaacacacatttgtagattgggaaaggaatcatgaagcagctaaaaacactgctcaaaaatttctaagaaagattgttgcaggcaagttaggcatgtacctgatagctacccaaggcctaactacatagtgagatgtagaaaattttaggattcggaaactttgcctttaactgaatggcactgggaggtgggwaaggagaccagccacacaagcaagtgagtcaggagagtgtgtcatgaatattaagcagacactttttagatactagagtactaaaaaatgagaaaaatctatttcaattaattagatgaaaataattataacaattactaaaatagcctatatgtggctaattattataactacaaaagctcttaggcacacccttaatagtgatacgtagcagctttgtttagttgtaagttttacataattacaacattaaactatatgtagctatactttaccttctattattcaagtagcaagtcatctaccaaaacccaacatttagaagatagaacatggcttttaaaaagtcttatcatctacgtaagggtcaggagatgggagaagttaaaaatcaggaccctgaaattccccaggaragtaactatcagggagcaacgtaaaaaaaattattttcccatattccttttccatatacaagagttctatgcatataggagccccatgtagaaatttttagttgtggtatctttctgagtctaatattaaaacttctggcattactgtgtgcctaatgtattgctgtatgttaccattgcaggttgaatacacatcacacacgtggtggggttctgctggagcttgcgggtcaaggccctgtcactgtactaagtgaagtaaagcaccatgctactgttaggactgcttattcttgtggctgtttggatcactgtcatgtactctgtataagctgatagctgcagatggttccaccttctgattcctgtactgactactatgtcttaaaaatgaaaagtttagccacaaagacttcagaagctcagctattcagctttgccttacacctgggtgtgattctctctaactctctttatgctacttttagctagtgcaacttgccataggaaaaaaatactgaaaacytaaaatgaccrtaagagcaacaaactttctgatttctgtcattcttttaaccaagataattttgaaggtagctatctatgtgtttggatacttggttcctaattagtgacgtgctctccacaatctgtagaacatatattctttggatatatatgcctcaagtattctacataaggtgggcatatagttacctttttctagtgattctgggatacactgtacctacactttgatagaatgtggagcattattgcatttaggacaacagtctaggaaaaagtgaattaattcaacttccaaaagtaagagttatatatactcacacctgtaatcccagcactttgggaggccaaggcgggtggatcatgaggtcaggaaatcgagaccatcctggctggctaacatggtgaaaccccgtctctactaaaaatacaaaaaattagccaggcgttgttgtgggtgcctgtagtcccagctacttgggaggctgaggcagaatggcatgaacctgggaggcggagcttgcagtgagctgagttcgcaccactgcactccagcctgggagacagagccagactccgcctaaaaaaaaaaaaaaaaaaaagttatgtataaacaaatattattgctcaactggaatatggcctagaataatgggaaataaatatttgcttttttatgttaccctcttcaggcatgatgaacacagaataaaacattctagaaactgaatttagcatagcatggatttccaaggaatataggccaaatttaaagacacacttgatggaatgtacccagttttccagacaaattatcatctattattgcccaaataaaggcaatttatagaaatagtttagggtacagaaatggatcgtggggtactgaactaaatttagaattaggagagctaggctttgtccatatgatatcggataaatcaacctctgtgggcttcagatttcttcttttctgttaaaggtgacgaatatctctatgtcaaaatcacagtttactatgtaaatatgttgcagagtagaaagtggtaaagtcatgaaagatagcaccaaaggcttaatatctgatgtttgcaagaaaaaaatgtaaaaattattctaaaaaaggccattgagaatattattttttgcctttttttttctttttttttgaggtggagtctcaccctgtcgcccaggctggagtgcagtggtgcaatctcagctcactgcaacctcccaggttcaagtgattctcctgcctcagcctcccaagtagctgggattacaggctctcaccaccacgcctagctaatttatttttatttttattttatttatttatttatttatttatttatttatttatttatttatttattttttgtatctttggtagagacggggtttcaccatgttggctaggctggtctcgaactcctgacttcctgatccgcccaccttggcctcccaaagtgttgggattacaggcgtgagccactgcacttggccaaggatattattttttgtccctcatttccctatttccctatctatataaggttggaatctaacccttttttttttttttttttttttttttgagacggagtctcgctctgccgcctaggctggagtgcagtggcgcgatctcagctcactgcaagctccgcctcccgggttcacaccattcycctgcctcagcctcccagctgggactacaggtgcccgccaccatgcccggctattattttgtatttttggtagatggggtttcacagtgttagccaggatggtctcgatctcctgacctcgtgatctgcccgccttggcctcccaaagtgctgagattacaggcgtgagccactgcacccggcccggaatctagccttaatgacagaattttgagctccagagacgaaaaaaaaggtgttattagaagcgtctatttgtgtgtatgtctgtgtgtgtaactgttatgatggcacataatgatttcaaacactgaggtaaacttttggtgaaaaaactcatgaagcatttcaaataagagcagagtatatatagttctaggtctcatgtttttactgagaaaggttcataaactttacctaaggagataaaatttcctctaaaatgcctgcataaacacatttgtacaaaatagatcattagttgttcatcttaagtagacgtgagtgatagccattttactgttggtaaatgtaggaatttgtatagagaactctttttgaattagttgagagtatgggccaagtagaagaaatgcaaaggctgaaatagcatattaagcaatttgagttaacttttagataatttgccatttcccttaagtagagtaagaaacagatattaaggaagagcatatgtcaacttcaatttaagaagaagccaaggtgtcctgatgaacttcaagtcaccctgattaatttcattttagagctttgaaatatataataaaacatgaatttttatagatgtttataatataagcaaattagcctgtacaagggttagccaagaaaattgtcttcactgacataatttgcttttaaaaagacatgataaaaatgttttcatatattatgaaaaaatagtgatgattttaaatatatgtaagtatatcaaatgtgaatggaaacattttgtactactggaagccaaaataaaaagattgattcagaatttcataagcttgcaaagaattgataagtttttgtttttgtttgtaaattgctgtctttttcagatattaatggctaaaaatgatgccctctttcagaaatttatattccttactcaaaagtctgaaataaagtcatttggcatattggattcaatgcagatatacccattttcaaatcttaaacaggagtgaattctgtttttaagtttcaatatttagtgcttttaatttattgaatctcaaaatttagaaaaatatcgaatttgcagaacaaagagaaaaagttaaacctaatgtgaaatatgattatatcaaacaatgtatattaatttatgaacaataccaagaatgaaaggcacccaccttcaaggcctggctattttttctggaaccatataaatattttcataaaatgttatctgatggcatcttaaattttcatttgcaaaaaatgcagggttatagcaaaatgtttaaagcataaaaatcctgccacctacagtataaacaaagatgtgttttagacatgatgcttcagtgaaaaccctgctcaaatgagactttggtcttgcaaattagggtggcagtatggcaaccctgtcaacctctcttccaggtatgcctcaggmactactgcccactctggaaaatatttaaaccagcagagtggctgcttaatggagctgagcagcagcctgcatttcttggcacatttgacaagcaagttcagtctcagttagtaaaccttatttaagaaactaatgttctccrtttgtgtatttgcaaaggatatgttttagataatgtcaaaaaatgaattatcaggaaataaactaaaaatgaaacttaagtctttagatcaataaaatgcaatacttttgatttttatgaaattcataaygagtgtcacagtttgcaaatgagaatcaaccatttttatttattctcatcctaaatcaaattaaaatttggagtttgtcaatttaaaaaaacagctagtgggaaaatagcaaatcagaatttgtcagaagatattatgtcatctctctgaataattagaagtgttaaagatgactggagccacttacatattctaatatcaatttacaatatcacataaaagcatctttagaatcakgactaaaaactgacttgttcatgtttgtggaacaagtctaattttttaagtttcaatatacctttatttaaaatagttaatgtcacacatgcaaatgatatgtaacattttccagatactataatgataaaacttatttttagttcttaataatttttattttacatcattaaagagtgcagacttcaacatgcactcctttatgaatatatgaaaatcacatgtaaaaattactaacatggccattttacatacaggaagaaggtcacatgtttaacagaaactattcttgcttcctgttctgctctgtactagttatataacttcaaatctctgtgtcttcatmtataaactgggaatattaacagtatctaattcagagggctyttgtgaggattaagtgaattaacacataaaaaatgcttgccgttgtgcctgacacgcaggttcagtaactgttagctaatttttttgttgttagtaatttagggtccagaaagagataaattagacttcaattaacttttctttcagcctagttttaagctcattgcttattaaatctcttacttttagaagtataattgttctttttctagtgagtgtcgttccatgatgtacttttgtatgcaaagctttcagacatacgaaaaccagtctttaattctttttttcttaactccactataatcctttgaaccaaatattgctatctgtctggcaagggcagacaagtacacattttttgcagagcgtaagtactcgatggtcgttatggtgagatgattttatagtaccatctttcaattttacccttgcatatgccagtatgaaatcatacagttttgccctttaaatcttgttttattgttaagtggaggcagtatcaggcagtatggcttactagcaaaacaatagattaggcacagccataaattctaattttggcaccatcatcgattcactaagcccttctgtgctatagcataaagtgcattattgagaaacaccagcgttgaagctgtcatttggctttctatattggcagtaacactaagatactataaatttgtggcagttaaaaaaataaaagaagactcagaacagggaaggaccttattgaatacctagttaaactgtctgtctttagatgaggaggctgagactcagggaagttatgtgatttgctgaaagtcaaactacagaacacaaaatccaggtggctgatggccagttttgtggtctgtccactatctgtgcttccacatggaaccttcaaaaaatttagttaagtatctggacactgcgtctatgtattgcttaaaatctggatttttttctaaccctttaggtatgtgacagttttttattatttgcttggaatgtgggattatgtgataatctttgtgtagtaataattaataagtgacatatttgcaaaatacatttakttgggtcaggataggaaaagcygctatgtgactttggatactgttcactcaacattcttgctgagactttagatttatagmccagaataatcagctgcatggaattgataagtgaggcaaagtgcaagggataagagagagagaatttgcctttattaagtacttaactatgtgtccaccattgtaacaagggctttatatacattttccctttttaagaataagacaatcctctctgaatctgtagcatcagtatcagagttgtcattgataattgctctataacctcagatgaatcttttaacctgcctggaccttgacttccttatttgtaaaacaggcaacacctaaactgtctacttcatgaacaggaagacttcaccatgaaagcacctagaaaagtataaggtaccatcagaatttaaaatcatatatgtttactttcagttgactccttgtgctaattatattttgcttaaggggattttgaatcaggatggtggaaggaaggtaacacaggattaaagattgaataatgagccaaatgcagagtccacttgagaaaatagggttgactgcttcacctttttttccttattcttttcagtttttcatgtgtccctatgtgttggatacattattatcaacactgttttgtacaaattcttttatagaaatcagcaaaagaagctcaaacatgatatgtgtgtgcatatgatctaaaatcaataaaactacaattaatgaaacaaaagtaatacaactaataacttaaatacctagggagatagtttttgtcattctaagttggaaagattatgtttatgttgcatttcagaagagattcttgggtggaagcaagagaaattaacttggctagccgaaatcagggcttttatatagtgggggttagagaggggctgaggatgagcctgcatgtgaaaggcaggcatgagaagttgcgtgtgccaccagggagaggcagaagggagaggagccagaaccacaaaagttcatatgactgaaattttttgttttgaacctttgaaaactaggaaatatatatcaaacacaagagtaaatataacatatatgtacttaaaataytactactaataataaatcaagtaaatatctatgtacttaaccttacctcgtggtcctgtctccccactcttacttaatcactgttctgaaatttgtattgctcatttttatacctgttcctatacttttgttacacagtcaatacaacataatacttaggtgtgtgtgtatggtttatatgtgagtggtgtgggcggatrctcttgagtattatattgttgtattgtaggatcaaattttatttttttaatcctcttcaacttgctttctccacattttgttttcaagatacagatgctttaccccattatataaatgtatcgaaatatatttattgtactactgatgagcgtatggattattagtgcaaatctttgttcattctcatcctctttttctctttcctctttttctctttcttctgttatgtacaaagctactatgaacaatttaattctggtgcatctgttgcaaaagctttctaggatacatgcttgggactgaaggacagggccataggttctgtggctgttcagatttacgaggtcataccaaattgttttccaaaaggttttctgattttctacttcagcgaggagtgaaggaggagttcagatgtttaacaaccttctatagacttagattttttgaattgttggccaatgtgtaaatgagatatatctaaatgatatcatgttttcaatttgcattccttgattccctatgagattgagcttcttccccccaatatgtttgtcctatctctttatttcacttctttgaaatactggtacaacattgatccatttttctttggggttgtttttatttttctggatactatgggttgtatatatttcatcttttcttagtttacatttccttttcattctctttatgatgttattgttaaagaaaatttcaaggtttgtggttttatatcctttgctctactgaggacttaaaaattgccctttaaagttttcaagttttaccgggcacagtggctcacatctatatatcccagcactttgggaggccgaggtgggcggatcacgaggtcaggagatcaagaccatcctggctaacacggtgaaaccctgtctctactaaaaatacaaaaaattagccaggcgtggtggcaaatcgcttgaacccggggacaggaggttgcagtgagctgagatcgcgccactacactacagcctgggtgacagagtgagactccgtctctaaataaataaataaatttgcctttctcatttaagatcttaaccatttgtatttttttgtatattgagataagacttttatttttattcacttcatatgcctaaccaattayataaaaactttttaataataattgtttaaataaaaaagtttttttacccataatgatgtgcagagccagatacataatcaagtataaatgcattgtctgtgtaaaaatttgtcttttgttccaatagactatatgtctgtctctattattttactgtgcatcttaattattctaaatttaaaatgccatgataactggtaaagaaaattttcataactattgtttcttttttttcttccagaatacactgtttattcttaacctttgctctgggtttgttgtagtttgtacatttttttatttcttttttcatctttatgcttttaattaatgtgctggttacaataaccaaggcaacgctaaagagaagtgttgttagtgtttatccttgttgctattatcctattttaaaataaggcttgtaacattttacatttgaatatcacgtttgcggtaaatttttgtgaatgtgctatgtcaaattaaaggtgttcccttttattcctagtttgagtaagaaattatgtcacaaattcctacttgatttctatctgttgagaagcttatatctaatttcccttttaatctgtaaataagatgaattagaaaattaatagattacttaatgttaaaataaacttgtattcctgaaatggatctaatttgggcatggaatagtatctttcttttgtaatgatgaattttgccttgctaaaattttattaggacttttgtatgtttttacatgagagatatttggcttagaatctttttttaaactatttattttaaaataattttgtgtttacagaagagattcaatgatagtacagatagtaaagtgcccacatacctttctaccagtttcccttaaagttaacatcttacattatcatggtatatttgtcaaaactaattaattagcattggtgcaaggcaactgtagactttgttcaaatttcactactaatgtctgttttctgttccagaatatcacattgcatttagttatcacgtcttcatagtgtctttcgaaatgtgacaacttttcacagtttcttttactttatgtatattcttttacaaacacaatgctgtcatgattactgtagctttatagtaggtcttgaagtcaggtagtgtcagtcctctaattttgtctttcaatattgtatcaagtattctgggtcttttgcttttccctgttaagtttagggtcaattagtaaatacccaaaatgcctggctggaattttgatagggattgtattaaatattaacttgattgtacatcaagtagggaaagactgacatctagaccatactgagtcctatctaggcaccggaactcactctccatttatgtagatcttctttgaattctttcatcagagttctgtaattttcttcacatggatcttgtagatattatttttagatttatactaagtatctcttttttggtgctcatgttaatggcattgtgtttttaatttcaaattttagtttttcattgctggtgtataagaaatcaaaagacttgagttgtatcctacaagcttgctgtcattaattagttccaggactttttaaattgattctttgctattttctatatagacaatcgtgtcatctacaaagagatttttaatcttccttccaagtctgaatggtttttatttccttttattgtttattacattcactagtggtgagagtggacatcttgccttcttcctgatcttagtgggaagagatctagtttgtctccattaagtatgatgttaactgtaggcattttgtggatgttttttattaagttgagaaaggtcccttctattcctactttgctgagagttcttactatgagtgggtgtaggattttgtcaaatgcttttccttttaatattattatgtgatttttcttctttagcctaatgatatgatggattatagtaattgatttttgaaggctgaatcaggtttacatacctgggataaatctacttgattctttgtagatttatttatgactatttataataaaattatttatatactaaaagaattagtatataattccttttatacataaytcaattagttttgttaacattttcttaaaaatcttggcatttatgttcgtaagaaatattgatctgtaattttcctttctttcaatgtctttggttttggtaataggggaattatggcctcatagaatgagttggaaagtattcactctgcttccaccttctggaagagatggaaagaattggtataatttcctccttcagtgtttggtagaattaaccagtgagtctatctggtcctggttctttctgttttggaagtttattaattattgatccaatctcctcaatagctataagcctattcatgttatctatgtctgtgtatatgagtttcagtatattgtatctttcaaggaattatttattttacttaggctatcatatttgtgagtatagggttgttcatggtattttgttattatctttttaatgttcatgatatcagttgtcatagtcccttttcattactgatattagtaatttgtatcttctctctttttttttagttaacctggctacgggcttgtgaattttattgatcttttcagataactagcttttgattttgttgactttctttactgattttctgcttccaaattcattgatttttgctctaatttgtataatttattttcttctgcttagtttgaattttatttgctctttttctagtttcttaaagtagaagcttaggttatagactttaattttttttttctcatatataccttaccttgatacttttaaagagcactgggcaagcattttgtagaattaccttcaatttgtatgtatctaaagtgttcatgatttcactggaattacagattttagggaagaataccacacagatgaagtatctttctcatcatctagtatcaggaatccatatcaacatgacttatataactagtgatattaacttcaatcacttgtttaagacagtacttgccatgtttcttcagtataaagctactactccctttccgtgctctgttgtttagaattgagttaccaggtccagtttatactcaagtggaagaaaataaataatcctcctggtgccagaagtatcaaagaattttcaatacaagcaccaggatatttaataaatatggtttggcaagtattttcatgccttgcaagtgtactatttctcctaatgctttgcccagtaattttagcattcatcagtaaaaattatatctgtgatattctaatggtgattttaaaaaatttttcctcattgtaggccaggtgtggtggctcacacctgtaatcccatctcttagggaggctgaggcaggtgaatcacgaggtcaggagttcaagaccagcctggccaacatggtgaaaacccgtctctactaaaaatataaaaaattagccaggcatggtggcaggcacctgtagtcccagctactcgggaggctgaggcaggagaattgcttatacctgggaggcagaggttgcagtgaaccgagatcatgccattgygctccagcctgggcaacagagcgagactccatctcaaaaaaagaaaaaaaatttcctcattgtattttactatttctggatgtatattatttttatttttctattcttagttgttcaaatttcttaagtctggaaattactgtgggccttttagtaagcatatattcaatctgatttttattccgtcttctttattaccttctctttttgttttccatttctgttattctttgtgtttcattctgtgtagtttcttcaaatctgtcttccagtttacatatcccaactatttctctctgaatggatagtatagatttacttcatccaatgagtgtgatgctttgaaagttcaagctttatgcagtgaaggctaaatagttcagatacaattttccttcccactcatggtgcagacttttcatcctctcttttatgcatggttcattggaattaacctgctactttaggcagagttctccagggcaaacaccactcyagcacttactttctcttctgggattatattttttgtaatttctgaggatttaaaaaaattattcttctacccccatggtacaattttttaactatatttaatccagcatttttaggtttgtgaactcagaaaatctgagacaggtctcagttaatttagaaagtttattttgccaaggtcgaggacccacgcctgtgacacarcctcaggaggtcctaatgacatgcatctaagatggtgagaacacagtttggttttatatattttagtgagatacgagacatcaatcagcatgtgtaagatgaacattggttccgtctagaaaggcgggacaacttgaagcaaaggccagaagactcgcagcagggagggggcttctaggtcataggcagataagagacagatggttgcattcttttgagtttctgattagcctctccaaaggaggcaatcagatacgcatttatctcaatgagcagagggatgacttcaagtagaatgggaggcaggttggccctaagcagttcccaacttgacttttccctttagattagtgatttgggggctccaagatttattttcctttcgtaggtttcatatgttgtaaatgtttctctgaacaatatgtaacactagagaataatggaagatcctgtattcttctttaccttgttgcttcactagctcaagattcaaaatccgaggaaagacaatctttttggctgactagatcacttgccaactctctgtctatagatactatggggaaggagaagacatgatctctttggcttaaagagtgaaaggcaggtaccgtctcccaataaaatatccacgaaagggaaatggtgatttcctgagagaaaattcagggctggaagaaagggtgatggatactggggaagagaaatgtaagatataaccactgtaactctcttatctcatctttagcaatgtattttttatgtgtgtatatatatgtatgtgtgtatatggtatatattacatatatatataatgcacattacaatgtattgggtacattgctaagtaatgggtcagctattttatgattatttcattattttcttctaataagtttagtttccctacagtgttggtttgaaaccattactaactttattacttccaaatgccttgtgtctccttaatgaacccatctaagttatggtatgtgttcaaaatgaaagtttgtttaaaggcttgatctgcaagtgtctgccctttaaccttgctattttatcaactacctctatcttgcagagataaatactctaacacattttagaggctgggttctcccagtgctgctgctgctttcwtgatttctgctgtggttgcacatacacaaacaatgaaccagacaggaaaaatagcctcctaactggttaattaaatatgcagtttattacaaattatggagtctagttatagggaaaattcactgagttatggcagtccctgtttctctctgcctaaattctgaaagccagagtaagtactcctattatactcatctgctttcaaattctacttaacttaccccatggctccatcctcgcaagctggacgtaagtgcccaaacagtcagtggcccaaacatggcaggaggttggatgagacccgcagtagctccaccatagaaatacaggattcttgtttcactaagtggttatctggaaagttggccttattgtagaaaatgatgaaaggttgcagtgactgcttaactctgcatgattacgtagacaataagaaacatctcttttgaaagccacctttatctgtgtagtgttttctggaagctcaaagcatcttaattttgaggctgagcatatttgagactctataaatgtaggatagaggacacgaggaagagatattgcagaaaaatgcaatgtttctctcagaagagagggcaaaagacagggtacttttggtacagatgtaaaatttaccttttaatatatataattactttttgaaaatatatgattaaatgtattcttaaaccagttttcaggaagtttctttccatgtatatagtcccataattttcccagaaattattttaaattgktattttatttattattctgtctcagcatttatgcccggcttgcraggatggaaccagggggtggttatgtggaatctgtagatccrtctttttcaatgattaacctatttcaaggatgaatttaaaataaataaatttatttttatctcttatgtgtgtataggactggattccttccaaccccccacatctactgccattcttctctttctagtgtaagttcacacataaactcatagaatctatctgctcacacattatatttcattaatgttttcaattcagtaaaatgatgtaacattttcatagtcttgttcagaattaacaaaatgtgaagtatcaatgttcaaaagaaagtggacaagaaaaagaaaaacagtcgttactatttttggcatggattttcagtggggcaaaaataacatgtctgattatttctctgctytgtatttagcacatccatcttttgatattgccccctaagtagttctacttttctttttattatttatgtttgctaatcaagctttcaaagccttgtggatgtgttaaagccagggggtaaagcatgacacaaccaacattttgtaaaatgtcacaacatttagtgaagtaaaatcttcttgaaatccatacagataatcctcccttggattataaacagtatacaatttcttctagtttccagaatcaatcaacaggcatgatttttgtgcatgcgtgtgtgtgtgtatagatatagatatatagatatatagatctgtgtgtgtgtgtgtatatatatacacacacgcatgcacacacatgtgtgtgtgagtttattttgttattctaaccttggctatttttaaaacacacttagggataaatacaaaatatgatgaccattttaaagagatcttgctatgtgaattgaatactagaagaggagacagaatttcgtgcttttgtttagaagacttcatagtcattttaatatggtgatgaatcagaaaatgaaattcctttatagttataatcaatttgagtaacagctgagraagtacaatagaaatcatatagttttacttttatcccatcaaagtcatgaaatattctgacagggmaatttyatctacttgcctcttcctataaatctttaaaaatctgttttaataataggctaatttccctaccacataaaccaaatatactctcagtggatttggaatttatccagaattatgtgtacttcttccattctggttgaagtaaaaatagaaagtgtaaaaaaataaaaatcagtcttggttttgattttgcttaatcattcaacatagatataccttaattattaactacaaaagttaggtatgcatcccctgcattaagaaagactaaggaaatcatccaatactaaaaagtgttattgccatctccaaaatttttcctactgaagccagagacaaaagagttaatgttaatacaaatacaccatgttccatattaccacttctgcagatgactgggacttctgcctgacagaacgtgggacaattatcttgtcctttgtgttcagagatgatgtgctgacaggttatttcctgagcggtaactaagatatgtgacctgctatctttaccaggagggagcctattttgtagttgacagcagcagtcactgaggaaaaagttcgacatttgtggccttgtagccttagggtcagctgagtctggttttgattccttcttcctggtatggtgtcctgatttctgttttgtcttggctttataaactgacactaccttattgcaagtaatctctgaaggtattccctctgtcccagccccctacatgtgcaatcacctaccatgtcctacaattacaaactttcaattctggtgccactttctccattttcttatcagggaaatacactgagtcccattctgaatgtagataggatctctgctactaagctttctttgctggaggttggttctgctgttattgcccagaaagagattaccaagccaacgattatgcatttcttaacctacgcttagaatgtttcagtaagatattgctcttacagtgcattagataaatgcagtttcattaacaaattctaaaaaaaagacaagtcttaggttaagtckctattacaatgtaataataatgtcaataaatatttccatcttacatttgaacagtaattttgagttccacagtcctttcacatacaatacaggtattcctgtaacatgacaggtgtcaccaaaaggatgaatcccctcttgtcttaaaagtctgtgaagctatcaacagagacacatttaattatgactaccaagttcctctttcaaactatagggaaattagcctaatatcaagcatgatttggcctattgccatggcttcaactgtcatcccaatgcaaatgtttaccaaatccttctctctctctctctctctctctctctctgtcctgactgtctaataggtatctggacttgaaacttacctgaaactcaacgtgaatagactcttattaacccatcgagacttcctttccttttggctcttttattactgataatagtttgcccactttcttctagacatcaggattagtcaataccttagtmatcttggaattcttcctttgcattacctccctgcatctaatcagcaataaaatcgtgaagtttctatctcagtaccaaatgtcccaacctgttcatttccactgccaacatcctcattcagatctttatgaactcttttcttctagcctactctaaaacctcctaacttgtcttcctgtttcagcttttctattttatacaagacttctatattcataatgtagagcaatgatttccagtctttttagtattacacaaccttttattccagtgaaactgaacttaaatatatagaacagatgaaaaagtgctgctgtctttgtaacagcgattgagtgtgggaactcacactattttcagtagggcttctcctcaccccctccttcttctctctctacccacagtgyttcctgagacactctcattggaacagagttgaaaaccactgttaaaacawcttctcagacaaattaattatgaccggatgataaaactctatttccaacatgctgcaaggaaataggctttagaaaaagtaaatttaaatatgtcctcttgatagagatgattcatttaaaacatgatgattagacaatcactattagattatatgcaactattccaaagattctcgttaacaatcattgggctattagcatgatggttacttgaggccagtctaatctcctagaagaggtcataatctcatgaaagtctattagaaaggtgcttgatttttttcttgtcaagaatgctgatgaccgggcwcggtggctaacgcctgtaatttcaacactttgggaggcagaggtgggcagatcacgaggtcaggagttcaagaccagcctggccaatatgttgaaaccccgtctctactaaaaayacaaaaaattagccgggcgtggtggcaggcgcctgtaatcccagctactcgggaggctgacgcaggagaattgtttgaaccctggaggcggaggttgcagtgagccgagatcgcaccactgcactccagcctgggcgacagaataagagttcatctcagaaaaaaaaaaaaaagaaagaaaaaagaaaaaataatgctgattaattcacagaaaaagtaatgaattacattgtacaggaaattttaaggcagatcaagtagcagatttactttctcactactagtcatgttagaatactactggaattttctaaaggccattaaatatctatcaaattaagaatagattctttggcttaaagtttaaattacaacttgttgtaatctaacttttagctttttttttccctgttttactacattgatagatattacaatctcaactctactttttctcattttaatgtctctgaagctttatatgattctcttttggcagttttgttattctgccttgtattctacagttagtaggaaacacaggcaaatatataacaggtaatatattgaaatcatattataaatacataattaaaatctacattttcagccaccagtagtttgttatgttcttgttttacctcaaagagattgttaaccttttaaaagctttataggacaattcttcatttttagaagtattttgtgattcattttttgctagctatgcagttttagacattaatacttaatctgactgaaccttagttttgtgatcatcaaaacttatacatatcaataagtaaatatctattgaaatgatttcttcctgcagtaaaagaaaaacacaatgcatagaaggatagaaggaggtagcctgaaaaaatgagatcttagctcatatctgtctctctaggcatctctaggcatcttgaggataataggcaaggtaatgaggtcttttgaggagaaagaagtaggtagatttaagattattagaattaaaaataacaaaattgcttatatatactttctctctacatttgcaggcagcctcatgatgatttggagaattccagaggtagaaataataaaatgatatgtgagaggttttcatgcctcaaaataaaaggttttcagagcattcttgctgactcagtgaattgatattagctttaggtattttgggttttatccttattaatcctcttaacttcagagctttgtccatcagtaatatactaaatgtactgtgtgtrcactattgaggcacagccaagaattgcagtggcagaactttagtgaataggaacagaaaaggtttgagaagcaaacttttccattgagagagacctacacgaaattcacagcaactgattcaatgataacttaatgataactcctttgaccttaatgataaagttagtaggtgcattaattaaaagacaatcattatatgttttacttgtaaaactgggtgagttatgatgcatagaagttagatcattgaattgatagaacttgtgctaggtargcatattcactcagtgcataattactgagcatctactatgtgccagaaacatatttgagaggccgaatcagcaggacatagtgattgattgattgaacatggagagtgggagatacatgaggagagagaagagtaaatttggtgggagaaactgatgatacgaaacatatgtgtttacacataaatgatatatatgtgtatgtatatatatatgtgtgtgtgtgtgtgtgtgtatctgtatatgcgtgttttatataccaaatttggtgtgtgtatacatgtgtgtatgtgtatatatatctgtatgtgttccacatcaaatgatatattgaggtatattataatatattgatatacaatatgagatatattataatacatatatacatataagtacacaaaagtgtttggtatacacacagaaacacacacatatatagacacacatatatatgcatacacatatatataatttatgtgttcacacatataatttggtgtgtatatatatgccaaatacacacacatacacatacatatatacagacagatatatattaatatataaatacacatatatataatttatgcacacatatcttctaagtatcttccctttgtggaacatcaaatagggtgacaaacaataacaactattacaataaaattccttctttaatacaatatgggaagagcacagagaatactaacctactctaactgaccgagaactgcatcaccttccctcttctcagatgtaactggacgtttgaacaaattcatggttcttttagcaacaatgttggtagtgagtattcggggagccaaccaattgtatctgctaaaagtgattctcaaagatgatccctggactagcagtatccacatcagttgaaaacttgttaaaatttagattcttctgcagcactttagacctattgaaccaggaactccatgggtggggccttaatgggcctttctggtgattctgatgcatggtaaagtttgaaaactactgtgttataataaagtttacygagcaatgaatttactgtttgcacaggactacagccttgtaaaacttcagagaaaacacaatgcatataaaatgcaatgagaaaatgcaatcagggaagagacccccaatcaggaagtttgatgtcaagcctcaacataccacacattactgctttcacacgtgtaaatcactagcaaaataactggtacttagtamgtgatcagatgtttgtcttctcttatttccaaacgatcagatattatgatggacactgtcatataggttatcataytttgtaatcctgatctgaggctttctgtctcaggaataaaatgcagctgatacaagtcactttcattttcacaagagaatatcaatttacatcattagcatttttgtttctaaaacaagtgttggaagttcttttgcctgataaacctgaatgaccatcctacaagaagtaactcactgttgacatcaatttcgaataatttgtgactcacttctgtcaaaagcyatgttgagatcrtttattcatttatgcattgactttctctctagaattcaaatcaagacctatttctgtatgtyatatcaggtaggtgcaaatcaaaactctagtactttaactctctgcagacgataatctgatattgtaaaaaataaatagtcttatgaagaatgcttttgcattttcttaacatcatttgwaaagactattgttcattttattatttaataaccaataacataaataaatacatgatacatttattcctcttagtatacagcattgagaaggaaaagtcttttcaagtatatcctgatgaaaatagaaattatcattttcatttgaaaatttcaaagtgcttaggttccttttagtaggtaatatgaaccatataacccattgcttcatttttgcctggacctcaaacaatcaattttatacttaattgctgtaccttaactctaggatttttaatgtaattatatttctgctccctaactttgattatgtggctcctgttggccttgttttaaagcttattgcacacttgactcttttttaaaagctgcttttaattcacttttgggggagatgtaggagagttataaaaataaatctctacttctctttattcacacatcgtattatctatgcatctatccacccaacttctcctactactatccttctttccttttatccacccacctagccatccagtcatctacccaccctctcattcttccatttattcttttcaaatgaatttctgcttgtaaccagatatagccagagaaaataaatacaatgcatgtatgattgtgaagaaacttatggaatcagagagtaactatgctagaggagaagaactaaaccaactttttcattttatagaagggaactttagctcattttgttttctgatgtttcataatcatagtttacatagattcagaaagtttttggatttctataactactttaaacatgcttagcatggttataaaacttcattttcttgtatagacttgtttaaaatagtgtctgtaaaccaacatgtggaaattcagctttaaaaagaaaaagaaattaggaggtgaaatatttatgatagaagttacttcagttgccttaaatagtaagctcccctactgcatttaaaacaggagttttcttcattcattcaacaaatattattaaaagtaataattcagttcaccaaactctcacagccaaaaagtttacaatcaatttctattcagatttctagaaaagtatgttacatgagttaaacatgcttatatgtttaagccgtattaatttgggctccccgaagttaatatattgggtgtaatagtaggaggattcataataaactgaatatcaaatacaggaaaaataaatctattctttaaaaatctttcttgtttgtttccaaagtgctgggattacaggcatgagccaccacgcctggcctgttctttaaaaatcttaaccttgtaccccttgcatataggaagctcttatgcttccatgggaaatacagctaatgcggaaaataaaatcacaactatcaatgagattgaatccataatcttttactgtagtattacaactccttaaaattaattaacagttttgttagaatgaaagtaacaaattggaactgaaattccagacactgttaacatatattgcaattagtacaatttcatcagctgtagaatcccataaacttcaagggattaacacaattaatatggcaaagagataatctataatttctcaaactacaaggaaaactatgttttttgttgttaagtagtcatctatatttataccaaggaagatacatgttgaccaataaagctaagaattgtatcattagataggagctaaaatacaattttgcaatagcccagggcattttgaggtgccagagagggtttctttagggttttttaactcatagtagtgagatatacacagaatcaaagatgataccgatatcactcatccaacattaaaccggtgccctgcagaggacaggtgcttcacaaataattgatttgcaaatatttgaaatagtgctgtccaatagaactttttgtgatgatagaactgagctatatctacactatctaatatggtagccatatgtggtgggctagagtgactaaggaaataaatgtttaattgtattcatttatagtattttaatataaggttaaatagcagcgtatatctggtggccactgtattaaacaacacaactttagaaaatagtgaagtatgagcaactcagtggtgcacacgttaaaaattttaaacatattcattcattcatttattgctatttgcatttggtgttaggtttcctctccccaactccctacccttgttgattgaattttattttttttattgtagaatcttaaaaagtttacagaagtcaaaaatgtacaaaaactactctgagacaaatctatcttctcatatcccttctaccttactcttaagattccttgtatataacaagtcttcttattcctttatccttaatgtgaatcttttttaaaaatgtgtgtgaagataggcaaattaagatgtgttttcttatttctccttcattcttgcacaaaaataatacacatatatatctgtatatacaatttatgtttatatctgcatataaaattatgagttcaagccaacatcttcagttcagtccagtcccatggggttcatctttgtcttaccacagcagtttgtcattccttagcagtacctccctgtttacatagtgagaaccctggctctcaaatatatcacatgtttacatattgtctcaatactctctgggtattccttatactgcttttccaactccactatttcctcagccccacgttttgatcttttggattcacctcttgttttaagagtatgtgtgccaagtgtcttcctgacagttaatagaaattaaatattctgtgtacttgaatgtctgaaataatgccatcattcacttaactgatggattggttggatattgaatttcaagtttaaaataaatttttcttagaattaaggcattattttatgttttttcctttggtatctagcctttctcatgaaaagtctaatgccaatctgattttaatattttgctgataatcttttctctcttaaagatgtagctcttctctttatcctaagtgtcctgcaatgttttgtgggtatgtctcagggtggttattcttacatccaagcaatagaacatagtggctatgggcacaggctctgagtctgagtgcctaattttgaattcttactctactacctactactttcctgaggaaacaaagtgacctgacagagtttatactttgagagctttctgtcaggattttagaagtggctgagtacaagaaaacacatacagtaaagtaagagacataggagctttacaaaaaggtagggcagaggcaaggggctctcattctgttacccaggctgaactgcagtggtgtgatcatagctcaatgaagccttgaactccttggctcaagtgatcctcttgcttcagccttccaagtagtagaaactacaggcacatgccaccatgcctggctaagacacaggtgctttaataaacgtatatttcaggcattagcgtgtccaagagacaggatttcctaatatacttggaggcaagtgtgggggtgctgattgagggaagtttcgcagagaagcttatgtttaaactgaatctgatttcaaattacatgaaggtattaagttatcatatgtaccctcaaatatgtacatctattatgtatcaataaaaaataaatttataaaagtaaataaataaacaataatctgaatctgaagaatgggcagaaagataccagatagacaaggttggaaaaatggttctactctgacacataattatagacaactgtgcaaagagagttgaagtttgtagaggtaagatcaattctatttattttcagccaaggaatccccagcaatatgtgaaggaccaccttcattcaacaccactggtcaaaggaagatacatttctcctactagatgtgatcccaccctataaacctctgtaccttttaaacctctgcacctttttactctagacttctttccctgttcctctagttcaggataccctctgagtactgagcagcattttgctaacactacagaccttggagcccttttacctttctatttttctttaactttttccctgttgtatgtttttctgaatggtagaaagtgaagaaattaagatttgatcttgagcaataggatggtgagtgattctaaaagaggaagatttaacagtctaaactcaagatgcaggagtagattttttaaaaaatcaaagtaatccctagtcttaactagcagaaaccagatccctggaagagatattaaaagggaacaagagaatatactctgcagaaagctaaaaagtaaaagatggtatgtgccaaatattagggaagatacagagcaactagaatatttaggcattgttgataggggtaaaaatttttccaaccacttaggatattgttgatgtttactaatgtgaaatatatggatatactatggcccagcaagtctactgatatgtatattccctaaaaatgtacacatatattcaccaaaaaacatctactaggatattcatagcaccatatatattatagtcccaaactaaaaattatgcaaatgcccatcamccatagactggataaatacattttagtataatgacatgctatacagcaatgagaatgaataattccatatacaacttacrtagaaaaaaatttaatgtttagtgaaagttgatacaaaaaagtatatgcagtatgattctatttgcatgaaccaaaacagttgcacgaacttcttattcayatgcttaatgccactttctactattaattctctcccagttaattaacataacataaataaaaatagtattgataatttaaacatttgagaattcttactgagaaatgcaaagaaaaccaagcaatttaaaaaaataaaatttattaacaatttaaaataaataaaatttataaagtagtacataaaagaacaaaggtcatcatagaacattacttggttcaggtccaactttgaatatttaagtagtcacatttgtgtaaatgattactrtgatgtaaacaaattagaaaatgatgtgaggaaaagcatgaaagagcttaatcttcatcatattaaaaattcattggatacacttttaatataattaaatcagaaatattatttattaatattaacccattatgtagacatatgaagattttttaaattaagctacagggaaagaagatgagtttctaagtcactggagagactcaaaggtggacactcaggctaattaaatgattagcgtttcatatgtagaaaacctactctgccagagggggaaaacataatgtatcagcttcatgaagctatatctaagtcctttctctctagtattttattttttactttttgaagatattccagatattcttgaaagatagagtagagtataacacagaggtcaaaagtgctgctcttgttaaccatgtgatgtgtgataaaggatcagagtaggtcagtactttgggacatatcatttgaaaaatggtgaaatccttactagtcattgatttgtatgatatatgatctatgaggtaccaaacatattcttgatacataatattggctccctaaatattaaatatatatgaaccacaataattagcatttattgaataaatgaaaaaaagaagagtataaagtggtatttgtagaagtcatttatatgcttaatgccactttctactattattaattctctcccagttacttaacataacctaaagaaatgatgacttagcattatgtgagctttcaaaggcaaatttctttaccaccagtaattttcaaaggtaatggtataattagaaatattttaatctgggctttattaatggtagaaaacaatttggtgatatcatttttagatcattattgtaatgagtctgaattcttttctgacctatttaattccataataatgtatcctcacctactttcaaatgcacataataartttatcaaggattaagaagggatgaaatatttttgggctactaccagacagaagctcaaggcctaggagaacttggctgtgtaggtctgttaactgcattgtcagaaaattatcatgaattcccccaggagagcagcaattcagaaaccccatggactttacttatcaaaagaaagcagtgcagatttagggttcagagagctggctctatattctcaattaccagccaatctcttattaactatgtgacctcagtttcctcataggtaaatcaggatagtaatagttcctgccttacagggcttccgtgaggattatgagacatgcatctaaaatgcttagcacagtgccaagatgagtgagaatggtagctattattctgtctattctgaataaagtaggcagagaaagtataggctgcaaaagagttcagaactggttctgaatttggctgtgtaaaatagacaagatactttgaagtcgccggggtgttgaccaaaaggccgcytttgtttgatmaatctacactccaaagttcagaacagcttatcctacctggcatttccattgattagaatggatgtgtttaaggtatccctctctttgatcaataattctatagcatgattgtatattaatgtctaaacctcattttctgaaaacctaggtagattatggagtaaagacaggcttgtcaatttgctattcttcctaaattaccataaactgattacttatttatactcattttgtattttcttgaaagcattaaaaaaatttactcctagtttgatccaagcaaccatatgtccatagtgtaagtaaagtacacccacagctgatgtttaagctaatgaaatgagaaatgaattacatatcagctttgaatagttcatttatgttgttagagtgagaaagtagtagtttccatctgtacttcagaaattaaacatttgcttctgaaagattttattttaattgaagctaatattaatttattagtaaaaggcccttagaggagttaaaatgaaatcattttgcactaatgaaaaggctgtgttgtatttttttgtaagattccttaaatctttcttgcarttacttcacagggcagtgaaaaacagatctttacatgactttaaatttttctttttttgccaaaatctacataggaagatggtgggaastgtatcaataatagcagattgaaagtattaatagacagaattaaattattactgtattgcacacttgtttggtatatgagaaaaagcattttttagtggggatgactatgaataaagttatgtagccgacaggtccctacaggttttgaggacatatctctttttacttaactatgtctttggagtgaatagagcatatcacagaggctagaagccattttgtcctgttctttagagtagtagttttgacggttggtttgctgtmtactccagaacctgaaggaaatgtgaaataactggacacattttcttagatgttccctcctcttttaacactacaaaagtaatgattractcattaagcagatttgaatgttcctataagcctgcataaatatatttttggagcttttcagttgttaacaaaaccaaaatcacatttaaatgcaagctggacatgtttcattgtacctactctttgcttgattttacatattaattmattmattcattcattcatttaatcacttaattcattcgatcatttatttactgcatgccaacctatgcacttaggatataaacaaagaaaagcttcaaggaacaattgaaaacttgtaaacactgtattaacatgatgtgttcataaaacaacttattgagtgtccatcatttgagagatactataatacttaatgctaagagcaggtgccattcataagattayacttaaaatgaacctgagaatgagcagaatttagacatgggaagaactatgctgtggatggaaatagtagatgatgatgaatagagacagtggggctaaaaattctcaatgkatttgggatatatttacatagtagagcagatggcacttagtaggtatttggatgtaaggaataaagaagtataggaggtcagataaaacacctgggtttttttcatgaatgactcagcaccaacatagaatatggtaaaggaaaattaggtttcctgggtagaaagaaatgtatttagatttagatagaatatgtttgaggtgttataaaagattcaggcagaattttgccattgtcagttggatatacagttctgaaattaaggagaaaggtctagattagagatatactttgagagtcacatccatatataagagaattgtggtttgagattgtttctcctaggcaaagtggtatgagtttgctctccctcttgctttattattccgtccgctgaaagggagactgtgatttgaaggtttctcagtgcaaagtggtatgacccaatagaagtttctgttatcccaaaagttaccctgatgatagccatatatccactcttcaaaatggtaatcactagtcacatgtatgtgttaagcagttgaaatgggatgagtatgactaaggaattgaatttaaaatttgaggctaatgaatttaatttttaatagctatatgcagctagtagccaccttttattagacaatgtgcctagagaatagacagagaatargagcacagtggataatgtcagcaggtatggtggctcagaagtagggtataagtgatacattttggcagctagaggaaagaaaggaccagataaaaagagtgcccatgtatatcatcaaaatttcctmatatcaataacatggcaggcagaattgcaagagatggtatgccatacaagcagatacaacttaaatgtagaaaaataacatttattgatatttttataccagtcaaaatatttctatcttccaggtttataattatttcttctaaaaattaatctttttacccgacatcttcatatgggcaagaggcttcctcactatgatatagtagattagtttgagtgtaaagtgtaaagtcccaaaaactgcattttgggactctgagttcacatctctaattacacattaacagaatgaatctgtggaagagtcttgatttctctgtgtcctagttgttaaactattaatactcagttaatactggggttaagatttgaatcacattgaacacttagaaaagtaccttgagcctagtgaagagataataactgttaatatcattaaccttaaaagtaaaattgaagaagcgtttttatttgaaactattttgaagccttaatttaaaaagataatccatggattggcttactgatagaagcatccctatagtcagtcagtgttttgttattttaaagatagttttcatatgagaatgccaattccttttcactaattttttttattatagagaaaacatcttactaaaaggaagtttacratatttttattatttctataaggcagaattactacttttarctaaattttcttctgtttagcaactcaattgctttctttctttaaatatctttgtgtttacaattccaactgttttacacaccaattcctttttgtaatgtcttgtggtttatattgaataggatgagaaatgattgtatggtcccaaggttttgtaaaaacaaagatgatataaaggagaaagataatcttttaaaacatttatataataatgcctttctctccagaagcctggggtttagaaaaaaaaaatgcctttaattgtctttgattcgttttacttttcagagattcaagataatcctgctaaaatttgtgtatctctatatttaaaaaatacaattaaagatctattaatcaaatatttgtttaaaaccaaattctacatttcctggaaactactgtataaatccaaaaatacaaagaggacaatcttctccttattctttattttaacagtaattcctgaatttgtaacacaagtgaatgttgccttggaagccttaagcaaaarctcattgaatgtgttggatgataatcaatttgtggacatctcaaagaagatctatgatacaattcatgatatcagatgttcagtmatgatgattcgggtaagtttgcttttccttccattgaattattgcaatgttcttcaccatctggaatgcctgggatgactgcaagaaatgctttatttctatgctgtaatgtcaatgctgaaatctattaaaactttagaagttcatatgtatccccaaagtcagatctactgtcacaaacaacacttttacttatgtatttggttataacttacacaaatgagtgcattttactgctgcgtgtgcagaaaagataggatttgttgggtgcaggatttgttgaggtgtctcttagcatgatcagaagccaaagaaaaatacataaagtaatttgcttttttatttttgttgaacaaaaaggaaagaatctttcttatcactgtagtggaattgataggaaaacgtggtattttatggccaaaccctctcatcctagatcataaaatcacagagtgttctgcaagaaatctcacttggagttgctggcaacaacaaacacttcaagggtcccagtctgggagttgtctgtttggggacatatattccaccttcccaggcgtgagagcacaatttgttgcaggcacactgtatatacagaaaccaggattgttttccctcaattattaatgtaaaatgttcttttaaatgttaccaaaaaatgcacattctttggaaaatgcatatgtaaagatatggagataccttaagtggattcacctgaagacagactctgaagtaaggatttgtgttatcaatagtctatttaagagaaagtgagacaaagtgaggcagagaggggaagaaaaccaagaaggtgtaattatgggtcactgcaggcaactggggcttggggcttgatcctgctgttaaactctgggtagtactgcagaatgcacctcagcacttcagaattatcttacctgacatgaacaaactggatatttagccacctattcatcctgggtgaaaagctaccctcagaggtgtcacctgaacctcatgttcagggccaatcaagcttttgtggccaaagaaagtaattctcaggcagggtagcaggtgcttgctgtaggaagattcagtgggactggtgaatataatttttaagtatgaatagaattcaatttttaagcctctggacttaactgtyagtaagtctgtaagatggatatagaagtgctgagaatrtatgagtggagcatcagtagtattaatatctgataggcctgaatgtcactggctatactgagcagtccataagtcatttgtggaccttgtaaagaaaagggccaataaatattayggagtctggcagggcagcaggatgctgtggaagagcttgtaagacaaagtctaaaggtgtcaagacaaagaatctagtacactgaggcttgggaaaacctgaaagcaaaccaattaccatatcaaagagaaacctcaggataaatacttgtgagcaacctacaactatttctaagtgattagaaaatgtggccctgtaccaatgactatgtctgggcagcaagaaactttaccaattttcttgttgcaaaatttttaggccttacctctgtggattagtggactagtaataacccaaagctgagaggtagatgaatccataaaagaaacattaaaagtgtaaagaaggcacatgaacttcaggatatagtcttgccagagtgaaacctctccattttcactattcctgagtggatatttgagaatataaaccagtgagatagcacaggggaaccagggtacggaatgcatttttcttcttactaaagctatctagggatggaaaaaaacatcttatagcttctcccagttagatgttccagtatttttacatttcctcattatcaagatagcttacttatagcaaatcaaattatcttgccattatttttacatattcctcatatacagtggtcctctgtagggcaggagaacaatttattgtaattattaatagcctttgagagcagtaattttctcccatagtcatctctttttcaagataaatacttccatttctgttaactttttctcataagaaaaatttagtattttgtgttcttcactagtctttatttaattttcaacaaacttctcaaaagagactatcaagaatacattcaaattagtgcctgtccaatgtcaaataaattagaagacttgttcttatgttatttctaccaatatagccaactgctattagcctatatttttttccatttaaacattatatttattggatagaggttgacttccttttccttttttttatcttgtatgcctatgtatgcatcctttattttgatttgttctgttcttgtttttaagtcctaatcctattacactgtatatgattcttcatatgatttatcagattgttttctggtttggttgttgaatttatcaagttagtatcaatcagaaacatgaaatgtagagtcttagcttcttcaactaaataactaataaaacattaaattatattggtcctttatctgactgtaatcactgctagagagattcagttaagagcattagtgttaagaacctttagtatctgatgttccatgcaactgagaacatgtctctaagtacatggtttgaaagagtgttttctgagttttaaggcagatatattatttctttaagtacactttatggtcaaaaagataaagcaaataaaatcagagctgctgtacttgaaaccagggaggaatacccagagggtcatcgtctctatctctatacccccagttccctaagcagcctctaggggaacctctacacgacttctacagggattccttggaaaatgatccataaacttatggacttaatcgctaactgggttatagcataaaaataaattctcacttaggtgcaagtaaatgaaaatctatccgtttttttcttaaagactgtccctttttcacagaagagaataaacttgatctggtataatcttctttttacaaggtcaaatttaatgttggccaatattctggccttagaactgcaaagtatttgatcctttcttcaaggtatctaaaaagtgtcaacattaaagcaataaatgtgtaattatacaagctcagggagggataggctatgctattgaggatatttgtaagtgtatcagaatcccattttatgtctaaatttttatgaatactcttcagtgcctttgaaacaataaaatactaactcaagatcagaacttggcattttatagggttttataaaaatatgattatgtctttactatttgttttgatcaataattatgctagcagttgtttaaaattctaagatatttagaatgtcactaaatactgtgacatttagtattgctatttccactggaytcagtgtgtagacaagtgaggttatagactatcatacttagcacactcagagaataagcagtattaaatattttgatctgtttgatatttaatatacatgtgtaaattatacaactattaagagtgcataatataatggttaaaactaaagcaagaaacaaatcttacttagcctcaatttcatcctttgtaagatagacatggtattaaacctacttcaaaagattattatgcttacatgagttaatagaaatgaaatgcttaataaacaataggctataataagaagatagctactactactattattaccacatagagttagtacttactagacctactgaagctamttaatatttttgyatatcttgacgaatattaactacataagcatgcttgtagagcaacatgaagggcaaagtcctaaatcaagaaatctcttcttttataaggcaatgtttaaataagaggatacttatgcttattaacatcaggtatctaaatgatagactgttaaatgcaaattatgcttttgaacctatattaatttaaggtagtattataattctgcacataatttttatagaccccttaaaacataaatgagaactgaactctcaatgttcatctttttttggtaaaagacatttaaccacaaatggaggaaattttaaaagagtacataattgaattgagagagagggtagtataagtggcccgcagtgaagtatcctcacaaaaagaaacaagattcaggtaaaatttttcctataacgggcattcagaatgtagatttcacatgttttgtttgtgaattttcatatgtgccttatcaaaggcgcttcaaaaatatagagatactttccaaagccaagtgtgtagattttcaggtccataactcaagtttgcattttctgtgtcagttttctaactctatatatcagggaataggaacatattttrcatatctgacttgatgaaggttaatttttgaggaaacaaagaaaaataagataaatttacatggcccagtttacattaattgtttttacatgaatcatttacatggcttctagaattgggacacagtccaatatamaatatcagcttatataacaatccaatctttgggtctgattctatttcacctacaggaatgaacagatttatggcttttcctggaattaaatataactttctcaattgagattacctgcagtgtcacaacttctataaatttctgtcattttcttccttaacattttttttttcttggtggccttgtagacatcttttctttatgtgtcttccaggctgagcttctggctatttgaagtttcatactcaaactgctaaagggaaagacttttacartttcagwtagtcactaaccaatgtagaatgttatcttatccaattacaattctctggaattaagtttggaaatggtccaataatgaaagaatattgtgtaaaatcagaagacctgagttcaagtctcagctgtacatgttaccatttatatttttactttacatgatgtcatcagtttcttccctgcaggggaaaatggaagaacactactgaatttctacttttaagtatcattgtatgtaaaagtaaaggactgaacagtgtttcccaagatgatgaaaaaaatgagactgtccatgcttcaaatgcaaattagggccaagttcagtggctcacgcctgtttgggaggccaaggtskgcggattgcctgagctcaggagttcaagaacagcctggccaacatgatgaagcctcatctctactaaaatacaaaaaattagctgggcatgatggtgcgtgcctgtagtcccagtttctcaggaggttgaggcaggagaattgcttgaacctgggaggcagaggttgcagtgagctgagatcatgccattgcactccagactgggtgacagagcaaaattccatctccaaaaagaaggaaaaaaaatgcaaattaaataagacatggacaatagagaaatacaatgatacaatgaaactcaaaatatgtatttcaatgtagtagcaactaacaattagaaaatattatttataaagtagactatatcacagcatccaaaattataaaataagcggtaataattttaacaaaacaaatataatatctatactctgaaaattataatacaacattaaaaaaattaaaaacacctaaatatctgaagggattgatcatattcctgaagttggagattcaatattaagatgtcagttattcccagattgacttacagattgatttaycactgtcttaaattctcagcagactcttttatgaaaaccgatcatttgaggtggttacattggaggatacgtttgccaaaactcatcaaactgcatttaaagttgcatgtaaattagatattaataaagttcattaaaaaataatcaactccatagccaacacctcagaaaatagctaattttaaatagataaaatcataccaaattacaaattagggctaattagaaaaacttgcatggactattaaaaatgctgatatctcaaatattataaaattaataatacctttctactttataagtgactgtttgccaaacatttctaatgtatggaggttctcttttattttttatttctcatatatgtgaatcattatttactattttagatcagcaggtggcatattttggcctttgggtcacgtttgatccactatatgttttgtatggcctgtggcctaagaatggttttaatgtttttaaatggttgaaaaaattcaaaagaagaatatgatattgtgactcatgaaaatggtataaaattctaattttactgtccataaaatcatattgaaacgtgactcagccattggtttatatctatgactctgtgctacaatggcaaggttgaggagttatgaggagactataatggctcacaaagcttaaaatatttactacctgaccctttacagaaaaagtttactaaccttgccttagagattttgttttagcctttacgaaaatcctgcctggcttttccaagaatccactcacctttttattagttttcctttatacatctaatcatcccaaatatttgaatattagaattgtcttttcttcgaggttcctggagctacacgaccacctagaatgacttctgctaaccctttctattcacagtctagggtcccaggctgtactctccaccctcctctactcttcttttcaccctcatggcttgccattcatccaggtactctttttctcaccctttcttttctggatcaaactcttgtttttttgttttaatttccaaattttatattcatgccctgatgcttttcaaataaagttgtttaattaccagaacccacccttctccaaaggttgcaagggagtttttacattccttttgatatttttgcattatttgttcaacacgtaaaattaaattttagcctcgcctttgattatggtatgttttgaaactcaatttttaaggtttatagaatgttgaaattcatcarctgtattctgtcatgtcattttgttgttgttgtttcatgttatagagaagtagacatccccttattcatggttttgattttcatggtttmacttatctgtggtcaaccactgtctgataatattaaataagaaattccagagttaaacaatttataagttttaaatcgtgcactcttctgagtagtgtgatgaaacctcatgctgttccattctgtcctgcctgggatgtaaatcatccctttgtccatcagatccatgttgtctgtgctcccctcccattagtcatatagtattgcagttcttgtgttcaagtaacccttattttacttcatgatgaccccaaagtgcacgtagtgatgcaggcaatcctgatatgccaaagaagctgtaaagtgcttcctttaagtgaaaaggtgaaagttcttgacttattaaggaaagaaaaaaaatcatatgccaaggttgctaagatctacagtaagaatgaatcttctatctgtagggttgtaaagaaggaaaaagaaactggtattagttttgctatcactcttcagactcaaaagtcacagccacagggtatgataagtgcttagttaagatggaaaaggcattaaatttgtgggtggaagacagaaatggaaatgtgttcggactgatggcaatcagattcattactatccgaggtttctggcattcactggaggtattagaacataacccctgtggataagggggttgggggcagtgtagtattaattgtgtctgaagattattgggattacaaatgagtttacataaaataagtatatgctaagtgagtttaaaatatagtgacaggatgagtatatatatgtatggcttggcttgcacaggacagtactggattatactgccttttacttttaagtgcccaatttggagaataaattggtaagctcactagtttctgggtcctgatggtactgcttgaggccctgtggtgcattgtctccacccacagggcgacagttcccggtgcttggcactaatgatcatagttccctgtcaagccagtttttctaaccccagggaacactttctctccatagtcctaacggctatcaaatgtgcgcttctccccttcatgcttttctgatactttgttgactgtggagaatttattcaggcwccatttccaatttatttaatgtacaaagacttcatagcttttcatttttcagtgttaggcagatttcctaagttcatctaagttactctgctcttcaacctcacaggactcatggaatgccagttaaaacactttgtcccttctggaagtaatatgactcttttctagtgtcaggaccagtttgtaaagaaaccacctaccagggggattcctaagggaacttcgtaaaaggccaatagcaaagtaaccttagttttatatgcaaatttaaatcaaaccttagtggaaagaagtctgtaacagtactcttgctgcttcttctgaaaacagagtataaggtagggaaaccttggaaygcctgctggcactggtcagcaagaagtcttatgctctcagcacatttaatggccctcctcttgtgtatcccatttgaagaaacttttgactaagggagcagaggtgactagagtaagaaaaagatattcaggaaacgtgttaagctacaaaagccgcgctagttagtgatctcagttgctcattctgagagaaagatgttcagcttgaagtcgttctgggaagtgctctttcaccaaagggtcaacaccactggactggcaggggagtccatggtccaataggactttgatgcagtctagtcctgcactcagagagctctacacaagtgcagctcagagcttttgactcaaagtagctgaatataaggmgccaagcatctccctttgaaaacatctccaggtgttcaggggaaatggctaacattgtgaatggaagggtaatatggggaagacggttacttgcagaatcttagagtttttggtttgctttttgttaagtgaattattaaatgtcatactattataaacttgtataagtattaaataagttagatttatattaagtattcaatctagtaagttttattattttggtacaaaaacttgtttttatcctaaaaactcttaaggaatgctaacctcttcaaacataaagtttctctgcatatctacatttcaaaaacaacttttggagagttgaatcagccttctggagaaaataatatgggaatacaacttataaaatgatgaattttagaaaacagactttgatgtagctaatggagggagactgggaattttataactccagtatctgtaaactaaataatggagtttcaacrggaaaaatattctggagtctgatagcaaaagttctctaagtgaatagaggcacttgaggtcctatactggtagggaaagtcacagcaagagattcagggtcttcaggcacctgaatgcctgaagaacattttctcttaccataggagaatacaacagctcaatgtttttataccatgggagcctttagactccatagacttccctttgttgatggaacagttataaacacataaatctcaagaatcactttttgggcaatttgttaaagagcacttatcctactactactcttccctgctccctgagattcagacacattggcctgctggctgttcccctaattcctcagacaggcccatgcttctggcatctgtccacttactgtgctctctaactgtgatgctctcttccaagactctgcacaggaggcctcttcaggtcagcttcatccwtgccttatccaacaccctacacagatcctatatagagccacatctaaaaatagcatctcccaccgcagctactcttcatcttcttgctcaattttatgcttgcgtagcgtttgtcatgatgattgacgtattacatatttattcatttatttatctgttttctttgttcccacaaaagaatgtaggctatatgaaataaggaagattcagacctttaaaacaaagtctgtctgggtacagtggcttatatctataatcccagcactttggaagsctgaggcaggtggaatggttgagctcaggagtttgagacaagcctgggcaacatggtgaaacccccgtctctgtaaaaaacagaaaaattatccgggcatggtggtgcatgcctatactcccatctacttgtggggctgaggcaggaggatggcttgaccctggggggtcgaggctacagtttctgccactgcactgcagcctgggtgacaaagtgagaccctgccccccccccmaaaaaatgttatagtgttctgcattaaataaagtggttgatttggtttccaaattggacatttgttcaaaatgtaatcattagaccccaaggaattaaggacaagaacatgcgatgttactttgttaaattttatactacaaaaattaaggacagtagaaactaccttgagatatattttcacaaagaattaaatttgcttgatctcttatttaagatggttttaagagttccaaggatgtgtactaagcattgtattttgtggccactaatgtaattatgaatgcacagtacatgtctgtttgatgctatttgtcttcgtagaagcttctgcaaagtcggatccgtgtggttgttttaaaagttcttcatttcacctagttcaggtgacaagattactctttaaagatgatggcaattgtagaacagcccggatgagactttcttagtgtatgtattagtggytgggttatgggaaaaaaagatcctaaggatagagtttgtggaatgtgccggagtgtattttatgcacattatcctctattatcagtcccttggtgttataagctctaaaaagtcacaaaattatctataaatttaatgattaaagtgtgttttatactgtcttrtattgcaatgtttggaacagaaatcagaaatttaattaaagtcataaaatatagaaagatcccataacaaaaattatttgtaacyttaaaaatggctgtaaaatacattttaacaattccatagtggtctgtttactaaaaaatataaaattaaaataaaaccagggatttttatatatcttcttttgtctctaaaattaatggtttgggattaaattcacgactccyatttaccaaaaactcacattgacaatgcatttacaaatagctaatctcttccagtggattttgcttatttaactcttagagtacaaacttattttaggtttgcctccgtcttcaaggaaattcccattctttggaatatctttgtaaccctatstaagtcatgtagtcttttaacttcagatttgcatttgtaaaatggggataacaaagatacctacgtaaggatggttcatcagagtttaaaagggttaatgtatgyaagccatttagtaaaatttctagggcattgtaactgcttagtgagtattagtttttgtagtagttagaataacaaatactacttgctgtaatacaacccccagatctcagtagcttattgcaatgatggtttatttatcaaccttacrttggtctgatgccagcctgttttcctgaataggtctctacaaggtagtgactcaatgattcagtatctttcaatcttgtgattttgccatctgtataagctggcctccatgtcactgcagaaatgggagagagagtagataattgaataggaagtttggtggccagacctcaatgcaatgtactttcctctacatctcattggacaaaatccatcaaaaggacytgaataaactgcaaaggagctggtgaatgccctcttcctctgtgcctaagaagaaataggactgatgaacacataaacattccttgtcacactctttgttccagttattattgctgcataacaaattactccacacataatggtataaaacaaccatcaatgtatcatgctctcacattctatgggtcaggaatttagaaagggtacagactccttcttgtgcatgtctgacatctggactaaggagtagaagactgaggaaggtgacatttagcctcttatggggcttggctttctcacagcatggtagccactggatagtcgggctttttgtgtgacatttcagggatccaagaataagttacagttaacaaagcacacgccatattgccttttgtatcctaactttggaaatcatagagtgtcacttctgtcatagtcttggttacaagcaagttaaaagcctcccggattcaaaggagaggagacacgaaccccatctttcaatggaaagagtgtaaaggtcaaaaggagcatgygagatgaggaataatattgtatccatctttagaaaatacaaagtgacccacttctgtcatcgtgctcttattatcatagtcatcatcatcattattatcatcatcatcatcatcattttcaacaataacagttattttttaacaattatgtgaccataagtcaatttaaacagtcttttgcttattaattagtaaaataaaccaatccaaagagtcttaaatcacttcagataatcatttgtttaatgacaggtaaagatttagaggtataattagtcaaatattttagtgaatagaatattaaattgccatactttaatgtcttttataaatatagctgctgccaatttaagatattaagctatacataatctttttgataccctcttctaaataaaaccctttgaaataataatagctagaaagtataaaacagaaaaaagtcttgaggagggtatgtggaatgtgagattatcatgaacatgggaaacatacaatgaagaagacatcatattgagaagtaattttctatcctgtacaggatacagtcaatcacttgaaaaatggctgagtattttctatcttttaatcactgtgctaggttttaagaacgcaaacatggttgagtcatgatctttgctatcaagtaattggcattctcatagaataaagaggtacataagcaaatgacaggaatacattgtgataagtaatataatggaagcacatggaatcatgttttaaaatacagagactttaaattctgccatggagaaaattatgcaaagatgtagccatttgttgacattccagttgggctttgatgaatgagtcaagagttggatagttggaattatggctcagcacatttgcaaggatacrgaggtcaagacaggagaaagaactacaattaggtgaagggtacctggaygccagtgtacaggtggaggaggagtagaaacataagcagagttaaaatttttaagagtcttcatgcatgtcaaagaaacatgaccttgctaaatggcgagaggaacggaattactaggcttagtatagagtgttcaaaattcatcctgtatggttgggatggcagcatagtcatccctttcagttcctcagtcacctgccttaagccgcctaatatttaaaaattgagattctttaagcaagagagaagggataagaaattatygmatagatgacaaacaatctcytacaatatatttactactaaaggaggatagaaatttcaatcaaatactaattataccatttatgcctcactaaatttactgatcaaatgtaattttcagggatttctctttctcaggatatggaatctctttaaaagtgacttcagaagagtgatacaggtaatactaataatgatactaacaataataatagaaaaaaatgaggcttgtatttggaacaagcgtttttgtatttgcaatgagctgaagccaagcatatgtcaaaagtatttctaaccatctaaaatctcagaggagatttaggaaatcagactggtagtcaggcatgttcactactagagcagccaaggtgaagggattgaagtgctgtctcaccagtttcagggactcattgagtctgttccaaggtataacatgtctctgattacggaaaatgttggtgttaaattgacagaagtaattgctaatcaaaatgcaagtaggagatgtaaatgcaaaaacatatgaactcaccaattaatgcatagagaataattttctccttcaaatgccttatttattaaatctgaagccttacatttagcttcaaaagaaccacatcaatcagagaaggctgaaagacagtgtgttaggctgtggtgagcacaggattagaaatcagaagaccttgatcctggtctcagctacgtgttatagtagctctggagtcctgggtttctccctttgatgcattgttacatggtgttctaatatacaagggaggggattatcacacttgccttacttatggcacgttttcagagccccttccttccttccttctttccttccttccttctttccttccttccttctttccttccttccttccttcctccctctctttctctcccccccttcctctctctcttttcccttcttttcctccctccctccctctctccctccttcctttctttctttttcttttatccatttattgtctttttattcacttattttgttgttttattgagtacgtactacgggccaataaatctatcgaacacttagccatatggagatagataagacagataagatttccattttcatggagtttacatttttgtagaaagagacagggagtaaagaaagatatggataaagtagttatgatgagtgataggaaggaagcaggatgatatgatgaaaagaaaattggcctaagagataaatcactttcagtcaaagcagtcttttacactctgaggagatcgaattttagttagttagtaaggataagagtgtggcagcaattttaaaacactgaaggaatgtttcaggcagagaagagtaattgcaaagatgctaaaatttggaattgcttgttatacctaaagaacaggaaggaggcactgtttctaaaagttactgaatggaggagtagagtggtaagagtttagaaaggaagacagacaataagttattttgacattttcatacatgctaggctrtttgaattttgttccaaagcattgataactattgtaatagctttaacaggggaggggcatgatccaatttgcattttaagaagtttcctcttgattttgttgaatgttgactttccaaaagtatgttaatcaagcagtactaccactaagacttagtgtgataaaggagaataccaccttgaagtgagttacctacatccatgtagctaattaatgtcaaagctgggattagaattcaggtctcctgactccaaattcagtgtacttttggtgttatcacaaccaagtaaccataataggtttgttggccaatatgtggataactcaaggtgggaaaattagagaagcattttaaagcctgtgctgagtgattttaaagtgtatcttgcaagagagagaactggttggattgtggtgataagtagatttggatgagtggacaaaatgaattgaaggtttggtagtaaatcttaatgagcttactagtcttgataattggtcagtttaactgtttcagttttctcttctaggagcaggtatttcctggagaaagcagctaagtattgttttgcttgctcttagtattattaacacaggagcaggaaggtctgcccagttcctgtccctgtgggacagaggattatgtcgttttcagttctcaccaatccataggaagtatgttattggaaatggaggatgggcaagaatagatgtgaggataccagatatgagtctgttgtacttctccaggcaacaggtaatgttgccatatactagagctgcactgtccgatatagtagttacatgtgacttatcaagcacttgaacttcggctatgtgaaatgagatgtgccatgtaaatgtacgacacacaacaaattttgaacatttatcaaggaaaaatgatataaaatatctcaaatatatttatattttacatgtcaaattaatgtcaataatatattttaaccaaatatatccaaaatattatcactttgacttacacaaattatttttaatatgactactagcaagttaaaaattacatatgttgcttgcattgtatttatattagtaatgcactagagaattgcagaagaggtaaacaaattcaaaacatattttagaggtaaaattgactgaaattgctgggaatgaatgtgggattgaaggaaattgggaaacaaatgtggctttggggtttcttgttttggggcattgtgtgtgtgtgaaagtaacttatggatttaaggaagacttggaggaatctgtttcgggtagaagtctcattccaatttagtggcctttagatattgaatttgctcatttcatagttatattatatcagccattgggtatatgattttggaatttagagcataagtttgacctatgataggaattgtttttttcttaggatgtaataacatatagacagggtatattagagcagaaaatatgatatagaagcaaacacatttagaattcatgttgaagaggaggagctaacaaaggagattggcaagaaataactgggaaagatagaaaaccgagaracggctgtctcagaaactaaggcaagtgtatttaaattgtgcacaatataacttagaagacttaaaaagataacaagaaaatatgttcattgcatctgggaatatagatgatcaaataggtaatgtatgtttagatattcagtgaattggtgtcagggtttcctggaattgatgactaaagctgtagctggcaaaaagagctaaacactctaattgcaggttgagaaaactgccagcctgtgaggaccagcatacttccactgggcttagatataatgagaggatttgggacagggagaggggattagacttccaaaatgtgcagtgtttagagaggttaagctgttctctcctttctctttgggttactttatgttgtccttacaatataataaaggaaaacaaaagatactctgataccctgacaatgactgaacccatattctgtaaagtggtctctttatactttatataagcataaagtgacacaattgtaaacagtatagatagtgttatgataagaacttctagttgttaatgactcttagtgtgtctcaaatctagcccagtcttttgttgttgttgaaatatgttatattttcttggaaagcctcttctttcttatatccttatgaatatctgcagggagccattagtctttgccttgtgcactttctgaaaatattttctttagatttttttggagagacttgctttgttccaatatgctctgcagaatgcttccccctgctgtgttctgttacccccaatgatggcttttgcctagctctctcagttctttctctaatgtaaagacagctctacatgtgtttcctcttccaaccgtatgtctgttatcataattagttttcttatcatagattcaatgagaataatagtttcaaatcactttgagaagaaagtatttctgcttgggtcacagcttaaacagattcacccacggtctacttcaaggcatttcctgtgtgaggctaatgaaccttcctccacttcagtcatctctcctgtttataactttaagtccagtatgtggtagattacaaagccacattgaaaaaaaaccttatatacataaaataaatatcagttaataaaaatgtttaaagtaatattcctattataagaataatacactcttgttataccaaattaaataatataggacagtttatagtacaaattttagcctcactacccctctagctcagaattttctcttccagggctaattgcttctcaataattttgtatgtatcctttaatatcattttctacataaatcatattcatttatgtatatgtatctttggttttgcaaaaaaaaagaccattctatggctgttgttataaaacttgatttgatttttataattttacaataagtcatacattaagttctcttagttaaaaccccaaataaaagttagtgtggatccataccaactactgttgacacagctccttcttgtaagcttttccttaggtaagcaaaacatgaaagaataaaggggaaagacaaaggcaacacaccagaaaaaaatgaaaacaaatagttatttgaaggtttagatttaaaaatatggaaaaaccaatataattttattaatggaacattgtgatgctgtaaaagttgcatcataaaaccatgaaatgataatgctaagttgagggaaaaattgcctatctcaaaatccttggagggctttgaggccttcagaagtgaagtgagttacctatatccacgtagctaattaatgtcaaagcyaggattagaattcaggtctcctgactccaaattcagtgtacttttgatgttatcacaatcaagtaaccataataggttttttttgcccaatatgtgcaaaaagtcaatatgctgagacacgaggttacagcagagaaagaggtttaatggttgggccatcgaaggagaagatgggaaggaacctcaaatccatctccccaggtagtttggggctgggtttttaagggttttggagtgkgtcaaagtgtggagattgttaattggtggaagagtacagggggaagtcataggatggggagaggaagaaaccatctcatgttgattctgttcctctgtgggggtcttcaaaatggttgtcatcagctgtttcactggaattggggatccgaagaacatctttaagcaattcttaaagaaaagccttatgattctgatgtcagagattctatctataagaacagtgggaatggggatacaaatattcaggatctagtgactttcagttacaaggaagtgggtcaaagtgcagcctgattaatacttacttatagccatatttctgtccagaattcttgttaacccctgagaatgccttcaaccataagttcatactaacagaaagacaagcaaaacacgttatattaattaaatacaattgtaatacaatgtgtttaatacaacatattttattaattaaaggcaatttgaaaaatattacttaaagaattgcatttgaaaycattggctaagaataggaatataacataaggactggaaaaagagacaagtgacaagtagcttggagggaaggtcaaattagtttctctgtaaaagaagatgaggtaggaagatcaagggaaataatttaaatgtactgaatttacttaagaagtgaagcaaagagaaaatgcccttcagtttaaaataaaattcccaacagaagctgagaagatcaagtaaaggtaaaagttatacccttgagctgctaataatgaaatctagcctgagggaaggaagttttgttgagagatcactacctgacaggaacttcacatacattctctcattttaccttaaagcaacccttgaggaagggacttggaaaaccattttatggataggaaagaaaacaaataacttaaaattactctcccaaagtcactctgatatacactgttccaacagggtgaagactcaggtacttttgtcttggccgcaaagtctgtcttcattgtgcaccacgtactgcctatattaatcaggaaggtgaaatgatctctatgtcagatctagagtttctgaatatggaagtgtgagagattaatttcaayatatatgagctatccttaaaattttgaaaatataattaaatccaattataaagatacgattaagaaaaaaatgatggtttataggacattgcatacacttttacaagtgttctgtaagtagaaacttcctgtcatttacctgttctgctttttcctgctttgactctgtttaaagcttgaagaaatttgagtaggtaagacataggaattaatagtgtagggaccaaagggaaaacttcccttttgtcctctgaaggtttactgaaaaatcaactgacaaatggcaaattaattggagaaagggcatacagatttattaatgtgtacacagtgagaatcacggagtgattacctatcccccaaatagggtttagaagcttatatatcatcttttgtgggtacagaaagaatgggaacttagktcttggcaaaacaggttataggagggaggaaaagaggaattctgttgacaggcaataaatgacaactagggagaatgaatggattggagggcagagatgattaactttaagatatttctccatggaatttgaatgagcctgagagacagacattatcttgtgaaagggtctattcaartgtggttacatttttggcctwcttttctgtaatagataatgagataatagtaaggagaagaataaacagttgttctcctggtggatcagtactttaggcagataaagggacttcaggcaacaactcatcctgtgctttgggagagacaatggggaagtgagaggtcagagagaccttgaggtttcttcagttctgcatatcgaagcatgtattttggggtatcagttcctaagccccaacaatagccaaggaaaaaagcaaagcctgaaaagttgcttttcattaaggtttctaattgcagctcaaytctttcgtttacactctgattttgcaggtgggcccaatatagagacttggagtcaacatgggttagaaatagactctatcatagaacttgtctattttcccacaattctgataatattttacacaaatacagacatgctttgcagtcagttatgtaatagtcaatatagtgaggcattggagattgcagcagagaaagtgtttaataatcttaggatagccacaggaggagatgagaggaaacctcaaatcctcttctctaaagaatctggagctaggtatctagggtttgaagtagactgaggtgtgggaatcactgagtagttgaagagtgcagggtgaagttatgtacttttgataatagggaggttgaattacttctaaattcctcagataagaagttttgcctctggatggcctgcttgatagtctccaggtgatctttcctctccttattttcttcctgaaaatatcttggtcaaatctttgaccctttgtgttcccccatgctcatgtctacctgctgcctattacagtctcaagaaacagaaaatagcacagtgaagaggggccccaggtctgtctggttacttcctgctgaaaggggatagtgagtggataagttgtatttttccttttctctctgttgtcatgaagggaatgaggatcatgaaaaacttgttcatggggagaagaaacrattccattaagaggccccatgtaaatggaagttgctgttgcaggccgatattgggattgcatagtcatctgtaggtggaatcgtaacctggatgatataaacttaatgagagcattaaaaaggcagagaccaaagattaaaagaagagtaacaaggaataaaggtccaagtaataggagaagccatgtgatttttagaaaccaatcagtagaggttttggcccagtagtggttactttaggaaagtgtgtatagccatgtggcttgtttgaaaatttttttggacattagttttcacttctctttttccgcattcctgtacagaaaagagaagtggaacatgttttattgatgaacgcacagactccttttttagctagggggtaattagcagtgaagcaaagccataagatcccaggagggttaatatatttttaaggtttcttagactaagagggctaccactgctaaggctcttaagctgggaggtggggagggattcctaggatactaggtctaaagcttttgaaaaatatgctgtggggtgcttagagggccatagatcttaggctcactctcaaaactatcccccttcatttgtgtamgtaaaaaaagaaaggcttagtcagatcaggtagggctaaggctgggactgagattacagcctgtttttaaagtgtttagagcatgcttcacattattagtccacgatagaggttgttcctcacttccctggagggcttcatataaaggttttccttttaatccaaaggaaggaatacatattctgtaaaacacagccatacccaaaaaggacagaagctgttgtttagttcctggagttgtcatgtttaagataagatcttcaggagcgctagagaggctctttgtaccaagggttaaaataaggccccaaaagtgaatgctttctgtgaatatttgtaccttagaaggagatactttgtatccacagtcagcaagtttgtttgatactaacactgtatttttgtctaaaacagccttgttaggactacagattagtagggtcatccacataagggagtagattgctgtcttggagaagctgcagggtagacaggtttctagctagggcctgtccgaaaaggtggaggctatctctgattccctggggcagaattgttcaagttaagtgttttgccattccctggggcagaattgttcaagttaagttatttgccattcaaaagcaaacaaaaattggctatctgattgtacaggaatgcagaaaaagtcatccttaagatcaagtacagtaaactaagctgtggtggagagagtctgtccaaaaagggtataagtgtttgggacaataggatgaatcagaataacagcttcattaataattctaaggtttgtgctagctgataggagccatctgattcctttacagctaaaatgagagttgcaaggtcagttgcatgggtgcaataatccatgggttaaaaattttgttattaggggctgtaactcttttcatgcttctggtttcaagaggcatcagggagtctgaagaacttattgggaatctgaagctgaatgaatacaagagcagctgatattgattgaccaggaagagaagtattccaacttcaaatggcacttgttttagagtttgagtttctgtagactgcagttgctcttttagtgaagtgtgagttaatacagctggaaggtgagggcttcgttgtaaattagcatgtaattttgtgttaagtcatggcctaataatggaacaaggcagcttggcacgactaaaaggaatgaggaaaggaatagccttccattttacaagggagtggcagtgtaaaacagcctccttggggttttccatcaatacctgtgagaaaaatggaggactggcacattgggccatagtaaatgtttaaagatgaataactggcccctgtatctatgaagaacattatctcttgtttagccacaatcagatttactctagacttatccatagagatggaaaagataggggctggatggcctcaaggccccatcagtcatctagaggatgaatttcagaggcttgattataatccaggaatagagttagaagagcttgtccttggcattgccctcgtccccattctgcaggaytcccttgttaggtagrttgataaggctgtagctgtgacagcccagaaggaagaggtgccccacctcatgagggagagagggtcactcgctcttccgatgaccctcttatttctagtgaggacaggctyccagggttggcttgtaacctggaggttaggaaccttttctactctagtgtccwggatttctgcagcaataacaggtccccattctgttagtagcatagggatgagccctgggtttattagttaatgaaaaagaatgtgccagtgctgtcgccatgtaattagttggcgacggcattttttctcctccaatttacgctttttttttttgagacaatgtctcactcttgttgcccaggctggaatgcwatggcacaatttcagctcactacaacctctgcctcccgggttcaagcaattctcctgcctcagcctcctgagtagctgggattacaggcatgtgccaccatgaccggctaatttttgtattttttagtagagacggggtttctccatgttggccaggctggtctcgaactcccaaactcaggttatccacccgcctcggcctcccaaagtgctgggattacaggcatgagccaccgcgccccaagcaccttttttatttttgatatttccttccaattattgaaaactggaaaggctgcatttaataaagtaggaaaaggagtttgtgggtcttcctctaatttttggagtttttgtctgacgtctttggatgcctgacttagaaagtgtacagccagaatggattggcctgcagggctttgggggtctaaatttgtatatttttgcatagtgtccagcagtctagcttgtaaaagggcaggattctcagatggctcctaactgacttctcataatttagaaaaattaacaggttttcttacggtctttttcattccttccaacaaacaagttattatataatctcacctgcccctgcctctgtctgggccaacattggtggcctggtgttgccagttgggttctgtgtcagggacagcttcttccctggctatattatcattaggattacgagcatgagtttcatccacctaagctcaaactaaaggcaagatttttcttcgcgggaacatcaactagttaataccacaaatatatcttgccacgttaaaacaaaggaaatagttaaggcctgaaattcttgaattaacttagagtgctcctggctaaatgaacgcaactgggatggaatttgcaaaagatccaatattggaaatgtgcatgaaytcgaatttttcccaaatcttcatttgccaccttatggacaaggaaaacattttggaggttttctgaggactctgtactagtggcttatgtaactcctgtgcaagtatatgaggaggataaagtatctgtttatggggagagggtgatgattgggggatgaagcagatggaaagggtgtaggtaaagtgggagcaggatgaggagagtgtgagaggcaaatggaaggatcatctaagacatyagaatcgggtagagaagaagttctttggaagattatgcaatttttatgtaattttacgtatcagataaagcccaaaagacctgaacatatggggtctctgaatataaaagtttaaagagyttgtgggtcaaaatgggaccactttataagaatgcaacccaagggcaaataggatagaactgaagaatgagttgaacccatgttgggtttagatacggcactataagattcctgaagtgcctgcgagggattttgacctcccttttccctttgctcactctatctgggggtgcctaccatggatagagggcctrcccttgcctggatgagcagtctaggcctgcccttgtttgagtgatcagctcaaacctaatgtgaaggagaacttgtccgtgacttgcgatgtgatgtctgtgacaaagttcaattcaaaatggggtccacaaccagcagattgtgtctgtgcagagttgattttgctgctgctcatttccaaggcacggtttacagtgttaaagtgaaggtggacttgccacycttggaagggggcaatagtaaatttgcttttttgtcttggcctttggataataccaaggagtgcactcagccagaaaccctcaattgccaaagagtacttaagctggttcactggtaattcaaaaatggaaaagaaccctggccagtttctcggccccaagggcagagacagacagayactccttctctaggrcttcaggatcccactgaagagtggcctcagccaaagatcattggtttctaagagtaaagtaccagactgttgagggaagcagagagaaaaaagaagggagaaatcccartaaagtcccaggatgagtcaaaaagatgcccrgcagggtgtcagagccccagcatcagaragtggttgactctcaggttggcaagaagaatttattgacaacagtataggtttgaaaaggaaggttttattagatagaaagcatgctgcagaagagtacagcgaggcacctcagcaagggaggactgagtgtgaagcggtggattttccttaggggtttttatggactttaaagtgggagcttaagggtattttgaaccgtattagccatgtaggtcatgaggaatgattacatttrtagatattttggtgccttgatgtcagcaagggttgcacaatgagtttcaatatgcatacattccagagatctatagaaattctagttacttacaaagttttgggaaaagagcttggtaccagatgcatgcttttgataatagggaagtcaaattacttctaaattcctcagataaggagttttgcctctggatggcctgcttgatggtcactaggtaattttcctcgagcaagatgccttcatccttcagggagtgtatttagtagtgttgtctgtcttgggaggtaagattgttgagaaaagtctcagggaataggctttcctggaccatatagggaaagcagagaaggcatctgaggctccacatcctcttccaagatgagcacttttagtgggtaataccaaaatccaagtgggaggcaaggcctataaccacagactatcatcatttgagtgataatttgtcatctatgctgaaatccttcttttttcctcttgcaaccatcagagatagttgcccgcatagtccctggaatatgcacaagggactctctgatatctccagattttgttcctttctgttggaatcactataaggtcaagttcctttttaataattcatgacacttattaacttcccacccatccmaaaagcaaaagaaacacacagacacacaacgtgcacacacacagaaacacacatrcatacaccacaaagacatatcttgaacacctaaaaaatgcaaaactattgtgaaagaaaccttcatagcaccagtactgtggtgcacamagtttaaccagtttgaggtgcctgcctgctactgagatacagcagtgaactcttctaccatttcaatgagatatccttctgagttctcacaggctgtttaacttccatctaagtttataattggatagtgtaggtaaatggagttagaaggattccagtggccatacagaagcttgtggtatagtaaaatgaaccttgagatctaattagaacatatgatcaaagcttgaaaaaaagagggagggtgagaaaacaaagaagaggcctgcaggagccttttgaagagatgtattgtctttctgcatctgcttggccattacatagaatattaatgtgcatttgcacttggtggtaatgataggggtgttgacatagttgatcaaaattgttccaccagctatgatgatggattgctcctgtcaggagagccagttagaaatgtctacatcagatgacaaagggaaaaatgtatcattgatttgaatccagataataatcttgtctgaaagaagacatgttgctctttagacagcagaataaaaagtatgttctaaatgagtagaaattatggtgaaaacaacttcattctgtgtgcaatccactaactaccctcccttaccctcttcaactgagactttaggcaaattatgtaaacagtttgtattttcagctagaaaatgcatacctctctatctcccaaaaagttgttctcagattaaataaagataataaatatgaaaacgatttaaaacaaaaatgcagatttaaaggaatgttaatatttacctgatggctggagccagaaatgtggccatcatcctccgatggttccttttcaaattattcaccaagtccttccacctcttgacactcagtaattttgtcattccactagacccgcttyactttatctataataatttttattcgttcttvgttctttgtttggatgccactttcttctgcaagaattttctaaacccagtttacgaattaggtattcccatatattcacataacaccacatacctgtacatgatagcattgattacaatgtttatcatattttgtgctagaatttaaggtccaaaggaaaccacatccatgactttaaatctcttttcttcacttcagcattataagacttgacacatagtaaataattagcagctagttgttgactaaagaaatgcataattgtctggctctgaaattaaaaatgagaaagaaatataagaaaatgttgattaaaagtaattattttaattagaaattgactaaaatatttaaacatttgatgcctaggcaaataaacttgaaaatatgttctcttcctgagaggagcaagagtcagctaaaagaaaaaaagaaaaagaaaacaaaacatacgttgtcaagctaaaaggctgtatctgatactttgtttaaccatcatagaaayatttgggcaatgtaaataatatayatatcattgtcttttttactctcatcaacactgccttcttttcaaagttgcccttaatatatrttaaaacttgacatatgtctcaaagaagtgactctgtgagattaaattgatggttttcatatttcatagactgatcttaataatggttaagagtatggtctctagatcaaactgcctggagtttaaatcctggttccaccacttagtagttgtattatgttaggcaagttgcttaaactctctgtaagtgtttcctcatttgcaaaatgrggatgataaatctcccactgaggattaaatgctccaatgcaagttaagctcttggaaccctggcacaaaktaaatacttaatagttattatcttattatttgaacaatgttgatatttctaatttctgagctatcatgttaaatagagtaattagcacttcttatattctaaaaatattttgatataatgaaataccatgaaacatttattatatagctgtaatattattatatgagccatattactattgatattttctattatgtttcaatttggtcttgtggaaatattggaatttctggattacaagaggttggctcagtggattttactctactataattgccttggtagaaatattcaatattttgatgccaatttagccatgaataacttataaaaatgtaactccaatctaattttcaagggggaatttttggaaactgataaaatgactaaaattccatcctaacaaagcaaaatcaccaaacgtctaagaaaaatcagaaagtaaaagaatatgagaggcattgtcaagtatcagatttttttttttaatttcaaaggtataatcttaatcatttggtattgcttcatgaatacaaagactgatcagtgtaagaaaagagatgtccatggaagagacactaataaatgaatgttttagggcaggccacacaagatggctgcttactacaatactctttctggagagcctctatgtgcatgacattttcagtttccttctaagaggttcctggtgcatggatcactgtgtttagttccatgtggttctgcaagcagagccagggattattggagcaggaatcacctctcattcagtcaatcatctggaataatcaatggtctacaaggcagggcaatatgagaggtatagaacatacagtactaacattctccacttcatatggtaactagtcaattcaatcagatcctttgatggtctatgttaccctctagaaaatggccacatataaatagcagtaatatttgagaagtacagaagctaaaagatagagaaaaagcagtagtacggtgacattattagacagaaaaagctaggaagaagcataaattaattccagaagcatttgtcatgtcaagagaagaaacaatagaagcatagacaaagagtagttgagtagctatagaatattgaattgggtagcaaaagacaccactgataatgataaaacaacaaggttactatagctgcagtgtatccagatgctataagaaattttgctcctgccgttcaaaaaaattattatttttaattgtagagagtacatagtaggtgtgattatatatagggcacatgagatactttgatataggcatgtaatgcctaataaccacatcatagtaaatgggatatctgccttctcaagcatttatccttggtgtcataaacaaattgtgtactcttgtagttattttaaaatggacaagtacrttattattgattatagttactctgtcatgctatcaaatactaggtcttattcactcattctttctattttttgtacccattaactatcctcacttccccctaagtccccaactacccttcccagcttctggtaactattcttctaccctctatctccacgaaytcaattgatttaatttttagctctcataaataagtgagaacatgtgaagtttatctttctattcctgactcatttctttctatttctgactcatttcacttaacataatgacctcccagttccatccatgttgttgcaaatgacaggatcttattcatttttatgactgaatagtactccattgtgtatatgtactacattttctttatccactcatttgatgatggacactgaagttgcttccaaatcttgcctactataaataatgctgcctactataaagtgaagttaacactttaacatcctgatttccattcctttgggtatataccttgcagtgggattgctggattgtatgttagttctatttttagtttttgtttgtttstttctttgtttgttttgagatggagtctcgctctgtcccccaagctggagtgcagtggtgctatctcggctcactgcaagctccgccttatttttagtattttgaggtttgaggaaactccaaactatttttcatggtggttgtactaatttacatccccaccaacagtgtacaaaagttcccttttctccacatcctcattagcatttgttattgcttgtcttttagataaaagccattttaactggggtgagatgttatctcattatagttttgatttgcagttctctgatgaytgatgatgttcagcaccttttcatattcctgtttgccattgacatttgtatgtcttcttttgagaaatgtttattcagatcttttgcccactttttgatcagatgattagattttttcctatagagttgtttgagctacttatatattctggttattaatcctttctcaggggggtagtttgcaaatattttatcgcattctgtggttgtctcttcactttgtggatagtttctttgctgtgcagaagattttttaacttgatctgatctcatttgtycttttttgctttggtttcttgtgcttgtagggtactactcaagaaatctttgcccacactcatgttctggagagtttccccgatgttttcttttagtagttttatagtttctagtcttagatttytgtatatggtgagagataggggtctagttttattcttctgcatgtagagatacagttttctcagcaccatttattgaagagactgtcttttccccagtgtatattcttggcaactttcttgaaaatgagttcactatagttttatggatttgtttctgggttctctattatgttccattggtctatgtgtctgttttaatgccagcaccwtgctattttggttactatagctttgtagtgttaatataatttgaaatcagataatgtgagtcctccagttttctttgttgattttctgcctggaagatctgtccaatactaaaagtgaggtgttgaagtgtccagctattattgtattgaggtctgtctctctctttagggctaagaatatttgcaatttatatctcagtgctccagtgtttggtacatataaacttacaattgctatatcctcttgctgaattgacctctttatcattatataatcaccttctttgtttcttcttacagttttcatcttgaagtctactttgtctcatataagtatagcaactcttactcttttttttggtttccattggcatgaagtatctttttttatttcttatttctgtctgtgtttatctttataggggaagtatgttttttataggcaacagatcattgtgggttttttaaaatctattcwtctactccatgtcttttttattggagagtttaatccatttacatgtaatgttattattgataaataaggacttactcctgctattttttttctgttttttttttatgattttctctttcttcttttcttccttcctgtcttccttttagtgaaggcaattttcattagtggtgtgatgaatttattgctttttatgttttgtgtatctgttgtatatttygatttgaggttactatgaagcwtgcaaatactatcttataatctattattttaaactaatgacaacttaaagttgatggcataaacaaacaaatgagaaaaaaactaatagaaatgctacactttatctcactgccttttaactttttatgtttttatgtattcttgtactatgtcttgaaaagatgtaatcctttattatttttgattggttcatcattgagtttttctattacctaatacataaaataggagtttataccctcaaattacagtgttataatattctgtgtttttctgtgtgcttactattactggtgagttttgtatcttaagatgatttcttattgctcattaatgtcctttccttttagattgaagaactccctgtagaatttcttgcaggatgggtctggtgttgatgaaattcctcagcttttgtttgtctgtgaaagtatttatttctcctttaggcttgaggatattttcaccagtaatactattgtagggtaaaagattttttccttcaacactttaaatatgtcatgccactttgccctgcccataaggtttccactgaaaagcctgctgccagatgtaatgtagctctcttatatgttatttatttcttttctcttgctgcatttatgatcctttttttattttcaacctttgggagtttgattattaaatgtgttgaggtattccactttcagttgcagctgcatggtgttctataaccctattgtacttaaatattgatatcgtagattttggaagttctctgaaattatccttttgaattaactttctaatcctatagaaagtagtgaagccagtcatgtttgtgtccttctcttcaggatagcaaattcccctaaaccccaggcaggtccagcaatgctagctgtgaaccagggattagagtcaaaacccttagaaatctaccacatgttctattttactgtggctaagctggcactcaaaccacaagacaaagttccttccattctctacttcttcttttagctcgataactcttagatttggcctttggaggctactttctaggcctaataggtatgcttcaatttttaatacatttttttcatttatctcctctggttgtgtattttcaaacagcctatcttcaagctcagtaattttttttttttttttttttttgagatggagtcttgctgtgtcaccaggctggagtgcactggcacagtcttggctcactgcaacctcctcccgggttcaagtgattctcctgcttcagcctcccgagtaactgggactacaggcacccaccactacatctggctaattttttgtgttttttagtagagacggggtttcaccgtgttagccaggatggtcttgatctcttgacctcgtgatccacctgccttggcctcccaaagtgctgggattgcagacatgagccactgctcccatcccaaaactcactaattcttctgcttgatcaattctgctattaggagactatgatgcattgttcagtatgtcaattgcattttttcaactctagaatttctgcttttttttttaatttcagtctctgttaaaatcatctgatagaattctggattccttctctatcatcttgaaattcattgaactttctcaaaatagctatttttaattttctgaaagtaatggcagtggctgctccagattgcctgctgttgccatcatgccagctgcagcaaggaggcatggccagggctgcattctccatggagcagctgggagctggggacaagcaggagccctggcccttgcaagatggggcaggagctcccagggtactgctgcagccagccaaactgtggctgcagactccaacctccagctccatggagccagcaggagccccaccccccaaccctgggcgcagttgtggctgcccaaatcatggctgcagacttagacatccctgcactcttggggtcccaggaaggcccccctgccctctcaggatcagaagtgcctgctcctgctgcctggcttttccctgctctcagtgtggtgcccactctgatcttggaggaaagtcagggccaagcccaggcaccatgaatgacagcaggaggtggacagattgctgggtggaagggggtacatccctggtgaggccccacytttgggccatagagggcctgaaagctggggcctgggctgccagtcccacagactagagtgggaacttgtggtgccttttctgggcccaccaatggtykcccatgagccaaatcagtgcacacttcctcccatttgaggcccataaaagccaaagtctcagccagaggtgagcagacaatgggatgaccagctgcagagagtagttaccttctctgctgagagtgggagatgtcagtatgaccagaacctgaraggagctgcccactttatggcctcctctttgctgagagcttcagaaacttgcagagaagtcaggactatcagctgtagagaacagcaacccactccagggccttctctttgctgagaggtacaaaatgatggcatgacctgcctggagaggagcttcccactccttggtctcttctgtgctcggagctgaacactcatcaggataccctgcctgcagaaaggagctaccctctgtgggacttctgtgagctgttatattgctcaataaaattccccttcatcttgcttaccctccacttgtctgcctacctcatttcctcctgttgcaggacaagaacttgggagccactgaatggcagaactaaaagagctaacacaaacagggctgaaacatgtcccttgtttgccatgttgcaggagaagagaagaagagctgtggcccctcagggatcccagacctgggagctcccagagtcagggctgtgactccctctttgggtttctgtagttccttgtgtctctgagcttccgggcaccaatgtgcttccagggccagccagggaagctgcttgcagtgtgcctggttcaactatgccttgcagagagccagcacctgtagctgtctgccccactgcagcagctggcatgtctgactgagcagtggccggaccccacactcactcacccacccctcattgctctattgctgactcacccttggcaggcatgggatctaggctggtagcgtgagctgagcacagcctgccaggcagggtgggaagaatgagcccagtgcgcccaagcaaaacttgggcaaaggcgccaccaggcagaggtttcaggccagaaaagcaacaccccaaagatcccgtaacaaaaggtcacatatctctctttctccaggattggtctctggtgtcttatttactgtgtttggtgaagttttcttggctggtstcaatgcttgtaaatgttcatctgtagctgggcatttaagagttaggtatttgttttagtcttcacagtctgccttgtgtgtacccatctttcttgggaaggcttttcagatattaaaaatgacttcgacattgtgatttaagctgtatctgctttaacggggaccctaagcccagttacactagggttattgcagcctcataaatgtgccgcctttgttgtcttggataagatccagaagaattctcygaattaccaggcrgattgtttttctcttttcttactttctctcaaatgttgtttctctctgagctgagccacttggagctggaagtgggatgacacagggccccactgtggccacatcactggaactsscctaggctagacctgaaatcagcacagcactgrgtcttgctcaaagcccactgtaactactacctggctactgcctatgttccctcaaggacctagggctctacagtcagccagtggcaaaggcagccatgtttrtgtccttcccttccgggtggaaagttctgcgcaggcccagatggagatgctgtctggaagccagggattgaagtmaaaaacgttagaaatctacctgatgttctattctactgtggctaagctggcactcaaaccacaagacaaagtccttcccattcttccctacctctttccataggcagaggagcctctccccaggtccatcaccaccatcagcttgtggagagttctgccaggccactgccaatgttcatttaagacccaagggctctttagtcagcttgtggtaaatgctacaaggtctgggactcaccctttagggcagtgggctcccctctggtccagggcaggtccagaaatgctgtccaagagtgtaggcttgtattggggacctcgagagcacacttggtgctttaatccactgtgactgagctagtacctgaagccagcatgtctcaaagtctcacccaaggtccatggcatactacctgggtattgctgctggttattcaggacccaagggctctttggtcaacaggtggttactgggttcttcccttcaagggagcgagtctcaatcaatttacaagtttattttgccaaggttaaggacacgatcatgactcagcctcaggagactctgaaaacatgtacccaaggtggtcagactataacttggttttatacattttagggagatgtaaaacatcaatcaatacatgtaagatgtacattggtttggtcctgagaggcaggacaactcaaagccggggcttccagatcatagatggattcaagtattttctgttcggcaattggttgaaagaatttatctaaagacctagaatcaatagaaaaaaaggaatgtctgggttaagataaggggtttgggagaccaaatttcttattatgcatatgaagtttccaggtagcaggcttcagatagaatagagggcaaatgtttgttatcagacttaaaaaggtaccagacttagctaatctctcctggatcaggaaaagacctggaaagggaagagaattctctacagaatgttgattttccccacaagaggcagctttacagggctgtttaaagatayatcgaagaaatatatttcagggtaaaatacttcaatttcttacagggcctggtatatgtcattttgtgatgtatctgattgccacaaagagtctgtttggtcagtcttaagatctcttttttaatgttaacactgatcaattgtgcctgaattccaaagggaggagggcataatgagatatgtctgacccctccttcccatgatggcctgaactagtttttcacatttactttagaacatcattggctgaaagggagatccattctatcagttagggggcttagaattttattttaagtttacactgttcaattgtattaacatgcctcaagaatatttatccattcttctattaaaggatgtttagacttttctcattttatggactattatgaataacaatgctatgtacctacttacacatattatttcatggaattcaagggaatttttatttctcctgcttaaattttattgttagtaatgaattgccagggtgagggctaaatatatgcttaatttaagaaactcctctccaaaatatttgcacgattttacactcccatgagcaatacataagggttctgactggtccacatgtcaacatttagtgttatcagtccttttgattttactcactcttataagtgtaaaatagtatctccttatggttttaatatgcatattcctggtcatataggatgttgagcattttttcattgcttatttttttatcaataatttttcatatttttacttttggcagttcttcgtatgttcttgatagcagtcctttgctgaatatgcgtactgtcaatatatcattttcgtctccaatctgtgtcagtggcttgcttctccattttcttaatggtgtcttttaataagtgaaaagctgattttggtgaaatccagtttagttttatttttaacggttaatgctgtttttttctctctttgtattaatctrttttctgttgtttcaggtaacaggatacctcaaactgggtaatttataaagaaaagaaatttattttttacagttatggaggctaagtccaaggtcaaaggtccacatctggtaagggtcttcttgcagatgagggctttctgcagagttctgaagtggcacagkgaatcacatggcaggggggctgagcatactcatcatcttaaggccccacctcttactgcygccacattggggattaaatttcaacttgagttttggaggagacaaatattcaaatcatagcagtcttgycctaaattaaaaataataataattaaaacagaaaaactggcagctccaaggttttgaaartattctcctgtattttgttttaggagtggaatggtcttagatttatatttggttatrttagatttttagtattcccatgtatttggagttttctaacgttattttaatattttaatttgattttacataggttttttgcttaggttaatatttaagacaattatttaggtcttaccccttttcgttttatttggcaacctctggtattcaaattcatggtttctttctatagccatatcattgcccagttaagtagctcacgtgaggaggtgggggggctgggggtggggggatgtttaattgttcttttctggccacagtcacataatagtctcactgtgtttgtgaatctaatggcttttgattatttctcaatttctcagttttctgattttaaatgatttccgattatattctcctaaggtcttaatatcctcaaagatatgttgtaagaccatttgaaggaaatttgtaagatttacttaactttgtaattggaacaatagctgagatgattgaaaaggtcaacctttattttccttaattttttaactttctattttgagttactttgagattcacaaagagttgttagaaaaaatatagaaacatactgtgtatcattcaactgtaacatctggcataactatagcacaatatcacaatcagaaaatcaacagtgatacatttcattgaccttactcaattttgccagttttacatttacccaattgtgtatgagcatttattttgtttttttttaacccttttaagaagacaattaatatttaaggttttgtttgtttgtggttgttctggttcagtatgaatgagtttgaagggctcatttttcttcttctctacctgagtttctcattcttatgtgtaaggcaatccatgggtcactacatgcaaaacattgtttttgtccttatttttatttgaaatccttatatttctatttcctaaaaacttgttattttctccctgactaaacggtttcttttcttttgtaaatcacagcattgacaaattttatttaatactaaacaatgtttttccattacttaaaaaacttttgaggttgcttagattactcttaccactgttctttgtttacatcattcaatatatttatttactcaaaattcatcctttggttcttgatgtctctcttctttgttatcaaagattttctcttcatttttagcttgatgtttttaagcarcattttcagttatccctgtttttcaaactttccaatatttagagatgtgaggtttctgagtttgctcccaatctctatttttaaaactttatttattttttgttagmaaaaaggttaacaaagagcatctgttcctttaattttgtagtctgttcctttaattttgtagtactatagcgcatctggtaacccagtaggctatttgtttcttacagggatctgtaggtattataaagactattatttgttttgtccggctagtacatattcagaagcccaaagatgaaaacacgtggatgatacaatgcttaaggttaagataactgtgttttataaacagaaaaaaagtgtgataatttcaaatgagccgtttacataagttaatgttgatgttagagttgtgatttgcatttcccgattttggttcttcatytgaartgttattgatttatttccatagggctttacttttagaatcctggagtttcctaagaaaatagaaaggtagaaagtggcaattatagcccacattcctactaagcagctataaatgcwaaaatatgctgatatatcaattaccattataataaaaatacaaaaatataagttacacaatgtaggcaatgtatttgttaacacttatggatatctataactatagatatagattaatctatatagctctagattattatatctataccatagatatctataccatgtagatccatctatatggtatagataaaataaattggccagagttttctactttagtgtttatagtttcttttttttagaatagtgggcagaggaatttaaactaaacacattgggcaaagataatgtataggattttgtgtcaaggaaaaatgcccaatttaacagttaagtagcctagtaacatatgccacagcaacatgtcttgtcccaaacaatgcgcatagttgaaagagaataygaaaaaaacaacaaaccagtatcaatgccacctgaaactcataagggaaatgcttaaaatgttccatgtaaaacatatatgaaatatgtccacctcaaaggataatttcaaagtaaactgtgaaatgctgctagtgttgtaattatagcctcattttatttctgaatgatgataaagtgcttttgtttttgttgatgttgttgttgttgasagtgcctaatctattaggctttttcaacacggtttctgaaagaggctatcgaaagacaattgtagtactagtccattgcaaaagtgaacagtctacccactgattttaagggtaatataccccagactggggagcagaagattgggcataatcataccttagcttttttcaatctccaaagttaaaagaataaaagcagaagactagcatacwttatattttagaattaaaataaaatgtaattaaatttaattaattaattatattttagcattaaaataaaatgtaattawttgtaaaatcaattgactaattaaatgtacttaatcaattaattataaaataaaattgtaattaattgattaattgattattgaaaactaccatgtttccaatactcttataaatatattatagttcttatttcttttcctttgccattgcttaactcttggaccatattatatacttctgatagatgctgtcatatataaccctgtatttcatttgtcatttcatttactgaatggcattagagtttctttgttgattctccattaactataacctcctcataaatacaaaccatattcatcttaccaaggtattactgacagtatttttyacattggaaaacaaaggatgcttacttcatggtcacataaaacaattatttttcttaaaaattatccagtaatgcatgtttataattgaaacattagaaattatattttaaaaatgtaagaataaaatcatttgtagtcttatcacccagagataactatttcaagtgttttctgtgaagatatwtgaaaaaaattatayatatatatatatttggacatttattagtattccaaaatgggatcagattatacaaattattctccaatctgtttttactcccatttaagtctgccacccataccctcattattgctctctaagttagtcatcgcatgctatttttactgtgtatttcacaaatattatgaaggcaaatcttttattggctgtctatacaactatttctggaatctggtaagacaagaaatttgagtttacaataattttttttgtgacaacctgataatttcaaataactattatactgaaattctagatttctcataaaataaacgtgtctaaaacttatctgtaagatgacactataacattataaaataattactatcaccttcagcttgtacagtgggttcctgctcattaaagatcccttctttcagacttgagttatttaatatttataacctgatgtacccctctccccgcctcagtaagatccaaggaagcaggagttggatatttaaatttcatcacttttgcttccccaattaaaagaataaaaagcaaaaactatagggtgaacctgctttatattttggatttgaaataaaatgtaaytaattaatagataaatctatcttttaaatatggacttgtcttttccttcaagtagyatgaatttgattattttatatgttgaaataagcatagtttctatgacaatttagaaaaaaaatttatcatttatagcaaatgatttgatttgaaaatgcatagaataaatttattttcttagamgaaaccacagatgcaagaatttgggaaaataactcattgtaataaatgataaacccactgtaccataatgtcaagtatcaaagcattgatatggactttgtatgattatttagaattttaaatttagttaatacaagacttgactaatgtgctgtgcaattttgtaaattactgatactttgaaaaaaatggttataagacacttttaaatgattggtttattygctgccatttttatggttggaactcagtcttacgtagccctaaaaggcaacttctgaatcaccactattgtaggtcattattgcaattgtaatactacatattcacaccccttttaaaaaaaaaaatcacaaaactctattatgtacttggtgttctgagaaaagtacaaagcaaatgttgaagccaatcatgcttcaaattgcttagaaatatctcttgtattaaatagtcagcatttcgggccaaggaggatcgaataacaaaatatacacgtcatcatgtaaagccattgcttgatcttaacaattatgattttatttctttcaaatacaacaattcccctgatgtttcaagtagcaagccacagaatgctataagaaaattgggaaggcacaaacctttgctaatattgtacattacttttctattggtgggtagagaggaagccatcctgccttccatatacatattcagtggttgaatataaaatctctttccttttttataattgtggatatagatttagatatttcatattctttttttgggttattattatgatcattagtttttcagacatgaccttgctctgttgcagtggtgtgatcataagctcatggcaggcttgaactcctgggctgaagtgatcctcttgccttagcttcctgagtagctaagaatacaggtgtggatcaccatgcccagctaatctttttaagttttttttttaatttttagtggagacatggcctcactacattgcctaggctggtctcgaactcttgggctcaaaccgtcctctctccttgacctcctaaagtgttgggattgtaggtgtgagccaccatgcctggctgtatttgaggcttttatcaactatatgcagctagtatgtatgaaaaaataaactttcaaaatcaacagctaaacaaatcctaaatgaacaaaagcatgttggaaagataaacctggaaaaatattttttctttgtatctcctgtgtattttttctctgaaaacccrataaattatcataaagttgaagagggtgggaaaacaatttcagaaacaaaatataaaattgctactgatttgatgattttacattttccttaaaaattatggatagttctgactttagatttcccaaatgcaatrtattttataaaaacygacaggtgacattccctctaaaaagaakaaattgtgcttcctcaaggaaacctaccaaaatatcttacagattaaatattactaaatatttagataattgtggcagcttcaaaatatattcaatctgtctatttcattgccacataactagtttcaagtgtagctttcctgagaatttgtatgcttgctatatgtttgtatcttgtcatttttgtaattggttggtctaattctgtaagacaactgatctaggaaacaagataaaagtaaataaagaagagatactttattcataagaaaacttgtgtttagttctgacttatctttctttgagcttttctrtatctcattgtctccgtttgttcctttgtttttccattcttacttttcctaatttacaggtattaagggaagataaagatacacatctttgtcttcttctcaatgagactacaaacaacccaaggggagagacttaaaatttcctttgtcttttccataggtagagtgacctcattttccaaaaccaaaaatgggaaatggatgtgtcaaaagtgctactatgagaaaatagacgtgagaaaaaatgtttttagtcaaatcatccttaaaaaataggacagatggacaatttattcaatgtatatgagcattctttggatcttatagacaatgataaatggacattaaaataaaacataatctgaaatcttgctaaatctggccctycawttgtcagattaatagctttgttcatttttatcataactatctgggtatttgcctttcacackccaatatcggatatgttcatggcrgatctattttcttatttacttgcttccartttaactaaatatgtgaccaaactacttagaactatccacgaaaattctacaaatatacttaaaattagttgactcttctttggaatgtgaaactagtcacttaaagaaggcattaggtagctttgagatataattaggctatgattatatgtggttattttaaataacaatgatgattaataaaataattattttatatgtcaatttattttatatatcaggataaataattttataaatccataagttggtattatatcttatatgtaatagaatattaataaaactataataaaatacatttaataataaatttatagttatttttaataccatagataatacctttaaaaactaaaaattggaaataaaattttaaagcatgaaataaagaagcagcacaatttgatatattgtatacttcttattttttactatgtaacattactaccaaatttagtggtttaaaacaacgatatttattacctctcattttctgtggatcagcagtctgggtataatttggcttatcctgtctgaggacctgtcacaagactgcagttaagatgtcagctagggctgctgtctatctgaaggctcaacaagcgaaaggtctgcttcgaagcttacgtggtcattgacagaattcagttcttctcaggctgttagactgattgttggacagagactactttcacttccttgtcatrtgtgctgatccaaagaacaggacacagcatagcagatggcttcaattgcaggaatcaaatgagaaagtgagaaagagcctgtgaaggagattaaagtcacagtcttttrgaaggtaatctcggaaatacctctcacttttgcttcattctgttcataagaaacaagttaatagttcaagcctatactcaagagaagggagttttgcatagttgtaaataataagaggaagggatctgtgggggccattttaaaattgagttacwacaccttgcaaaataacagttgattctcatgatacttttcacctgccttagggatgtaggtcaccatttaaggatttcctacttcatgttgtcagtctcaatcaaatacttgtaacacaattttataaaaattagatcttttatatcagacacgcaactacaaatcatatattatgtatgtggggtgcataacaaccrtaaaagtttctcaaagatcaatgttcaatcatccttcacacacatatcttgaatccagcaatattttccaggcatgtgtgtgtttggctgtatgtgaatgtgtttgtctgtgtgtatgtktgtatcttcaactctaaggagcacaggagtcctgctgtttagtagggggagacagattcttgttgaagaaccatacctgatttatgaccaaatatatatatttttggattatttatttggtaawcatgttgttgaagtgtaacatatgtaaaaagaagtgtaaaataaaaaatataaatgactttatataaagtgaaaacacccatgaaagcattcatggattaagaagttgaatattatcagtaccacaagaaatatactttgtgtgcctacccagtcattaaccttttaaaaaggagtcatttttccctatcaccacaaattaattttgcctgttattttttagttttatataaatggaacagagaacatatgtacatttttacaacaggtttattttattcaaaatagtttgtgaaattcaactatgacattttgtttagtaaagattcatccattttccttactggaaaagcattctaagtttttaacaattattaataatgctgctatgaacatycttatacatgtgctttaacacacatttaagtacattttcaattccacctgggagaagagttcttagatcatcatcaagyataacatatttagctttagaagatacgkcaagttccaaagttttatatatatgtttaatccaccagaagtgaaatagtrttgctttttaagttggtccacattttggccaacactcaatgatatcagtccttttaattttaactattctagtctatatgcagtgctggagcactgtaatatgcattttcttgataaatatggaagttgagaaccattttatgtgtttattgatcatgtaaatttctattttgtaaagtacctatttaagacactcataaataagttatctgatttttaaaattgatttataagacttttacatattctaaatgttattcattggtctgatgagtgtaatgtgaatatcttcttctactctgtggcttactgttcacttggtagcttattttagaaaaataatttttattttaataaaactagtacatcaattagatgttccctttatggttagtgatttttgtgtcctgcttaaaatataattgctaaactttaaggtcatgaagatactgtgtagaaactttattgtttttcctttcatatttaaatgtatcatacaccygaaattttttttttttttttttttttttttttttttgaggtggagtcttgctctgtcacccaggctggagtgcagtggcgcgatctcggctcactacaagctccgcctcccgggttcacgccattctcctgcctcagcctccccagtagctgggactacaggcgcacaccaccacgcccggctaatttttgttgtattttttagtagagatggggtttcaccatgctagccaggatggtctcgatctcctgacctcgtgagccgcccgcctcggcctcccaaaatgctgggattacaggcgtgagccaccgcgcctggcctgaaattgattkttgacagatgttgcagaaggtaaaagttaagatacaattttccccatgtggatatcctatagacctagtaacaattatcaaatcaatcatcttttctctttttacttcaaggtcaactttgtaataaatcaagtgattgtataaatgttacactatttctgctcctggatatatttttaaattccatgtaatgtttgtccttgcactagtatcagtatatatcttcctcctttgttcttcctattcagtattaacttggtcatttctggatcttttctacttaaattttaaaattattttttaaatttgcacagaaaagtcctgggatttttatgtacattgcattgaatctattgactaacttgaagagaactgaaatctttaaaatattgaatcaaaattgtattagttttaatttacttaaattttaaatttattagttttaaattacttaaattttaaaattattttwaaaatttgcacagaaaggtcctgggatttttatgtacattgcattgactctgttgattaacttaagagaactgaaatcyttacaatattgaactaaactgtattagttttctatagatgtatagcaagttaccacaaatttatcagcttaaaacaacataaatttattatctcatagattttgtgggtccatagtttaggtgcatattgtctggggttcctgctcaaagtcgaactagactgaaatcaaggcattggacagtgtctgattttgggggaagttattactctctttaggattaactctgaaaacctcaactstatgtaattagaacacactgtgggttgtatttcattagatattcttggatctgtatcttctgtttagactgggaaattaaatttctgtttagatggtgaaacagaatttaatccttagcagtagcagtatagcattgagatagtttattcagtaatactaatttgatcttgtaaaatcagagagtaaggaggaggagtagagagagaatgggggctttgtttgtcagctaattgtgaaactgtcagctttctcattgttggtattcttaaaaatacagctaaagcatacacatgtctgtggataattggataataattgctagtctatttagttttgcatttagcttctctagtaaagagggaggataaaataaagtaactttattaatttaaartatatacccattcccagatattttattttgttttccctttaccctgaaatgaatgtgctgactaaaaccactaattacattgtataaagctatcttagtgtataatgagggaaaacagcatcaaaatcaggagccaagaagtcaagctccacttggatcaggttacaatcttaaacctccatattctggaaggattcccccttccccatgaaatgtttcagagggacaactgctagatattagaatatttcaaatgacttcatcaaaggaaaaaaaagcactttacgattcagtaaatcttatgatttttttttctattacgaaatatcaaaaaccctctgaggcatagatactagggttatatagtatcatatatgcatatagagaaaatgaagtgtctggccaggattgtctgcaagccaagaggagctttccactgcagaaaaaagaaaagcaagagatcctcagtagtccacattcccacgatgaatactcacactcctactaacaggagagmttcacagccattgcaggagctgagtcaagtatagagagctgcctggagtccatgcaactgcattgtcccagaaagaaaattcacattgggtcctcttcacctccaaagacccaagctgccacagcatggccccatttttagagaagagccaccacctgagtttattcttccctggggcccaatagcccctgcacctccatatccctggggcttgctgaccttccacctcatctaccaggaaagctgcagcatcatgacaaaagatgaacatagtggtgcagctgtaactttgttaccagagcccaggcagagctctatacatcagggcataaatgatccagcacactgggaaggcagccctcaggacatagtgacctgacacactcattccccagaatccaagagccacctgcccagggctttccatcaccatcagggaccctgcttcatccaaaatggggccatcacaagactgtgcacrctctccataaacttgaggactgtcccatgaggagcctgtcaccrccacaggcaatcttgacccctccacaggcaacgtgactgtgcacctctgtgggctctcctggagaccaaggaccaaccaacctggcatccctgtccccagtaaagctctgccacagatttcacaaataattgcagcctagaccrctgatgcactctcagacactgatgacattgattacagctttagaaatcatatggataatatacaacagtgcccacctagaaccttaaccaaagcactctatccaacccacattattgaaaatatctacaggaaaaagtctttccctattaaaactattacataaaattggaagaagggactgtcctacaagatcttaaatatcaatttaagaacaggaaaaacatgaaagagcaaagaaacatggcattttcaaagcaacatcataattctcyagtaacagacccaaatttaaaataatgatcttaagtaaactcagtgagacatgagaacacaaatagacaatccaagaaaaaataatagcttatgatctgaaagagacatttagcaaagagatagatattgtttaaaaagatccaacctgaaatcttgaaattgaaaaattcaataagtgaaataaaaaatacaayagaaaaacttcaatagtagaactgaattaagcagaaaaaaaatttctgarggtgaatagagaaattacccaatgagacaaaaaagaggagaaaagaaaagaaaaacagaatgaaaaagaatgaagaaactctataggatataagagacattattaagcaaatacatagttacattatagaagttacagcaagagaaaagatgctaaaaggcagaaacctatttaatgaaataatagctaaaaatgtcctaagtcttagaagagatatggatatccagattaagaagctaaaaaaattacaaataaattcaacccaaacaggtgccctctgaggcaaactatactgaaattgtccaaagacaaggggagaatctaaaaacagcaagggaaaagcaacaagtcacatacaaggaaatccctatcagactaacagaagatttctcagcagaaaccttacaggccaagagagaataggatgatatattcaaagagttgaaagaaataaaaaaaacctgtgagacgagaatattatactcaggaaagctatccttcagaaataaaaaagaaataggatcttttttagacaagcaaaaactaagaaaattcatcaccacgagaccagccccacgtgaattgcataagagagcctgacacgtggatgtgaaaggatgatatctgccattatgaaaaamcacaaaagtataaaactcactggtacagcagatgcacaagtaagaaagagaaagaagtaaaatgatctcactacagaatacctccatactgcaatgttaaacaataagaggmagagaagraaacaaagggtttacaacacaaccagtaaacaattaacaaaagaacaggagtaaattctcaacattcaataaaatctttggtaaatggtttaaattatcaaattaaaagttttgctgactgggctatatagatttwaaaaattgacctaactatatgctgcatacaagaagctcactttacctggaaatacacatgcagactgaaagtcaaagaatggaaaaagttattccttgtgaatggaaaccaaaaatgagcagaagtagctatacttatatcagataaaatactttaagtcaaaaaacattaaaagagacaaagttattatataatgataaataaattcagcaagaagatatcacaattataagtatatatgcacccaacaccagagcacacagatatatgaagcaaatactattagaacgaatagaagaaatatactccattacaaatagtcggggacttcagcaacccactctcaacattgaacagagagtggacagatttagacaaaaaatcaaagaaacatcaaacttcaactgcaatatagaccaaatagacctaatatacaagtagagaagatttgatgcaacaactacaagtacacattgttctcatcagcacaaagttaggtcacaaaacaaatcctaataaatttaaaaataatcgaagtcatgtgaggtatttttaaaaaataacaatgaaataaacatagaaattaataacaagaggaacttcagaaactgtacaaatgcattcaaatcaaacaacgtgcccctgaatggtcaattagttaataaaaaattaagaagaacatgaagaaatttcttcaaagaaatgaaaattgaaagacagcataccaaaacctgtgagatacagcaaaagcagtagtaatatagaaatttatggcaaaaacacatcaaaaaagaaagatttcaaataaacaacctaatgatgcattctgagaaattagaaaagcaagaacaaaccaaacccaacttagtagatagaaagaaataataaaattcagagcaaaaataaacaaaacaggcacaaaaaatacaaaagatcaataaaataaaaacaatataatgatagtgttttggaaagataatcaaaattgaacagttgttagtgagacaaacaaagaaaaaagagagatgacccacataaatcaaaaatcataatgcaggcattacaacagataccacrgaaatataaaggatcacaagagaatrttgtgaacaactatatgccaataaattggaaaacctagaggaaatgaataaatttttggatacatccaccttcgaagactgaaccaggaagaatttgaaaatctaaccagaccaataatgagtaaggatgttaaatcagaaataaaaaatctcccaataacaacagcacaaagcctaggaccagatgacttcactgctaaattctaccaaatttttaaaraactaaaatcagttctcacaattttgcaaaaaagtaaaaaggagtacaaactttcttactcattttataagggaagcattaccctgataccaaaaccagacaaggacacaacaataaaagaaatctacagaccamtattttgaatgaacatagacgcaaatatcctcaacaaaaaactaacaaatgaaatccaacagcatatcagaaggattatacattgcaattacrtgggattatttttctaggaatgcaaggatagtttaacatatgcaagtcaataaatgtgatacatcacagcaacaattgaatgatcacctcaatagtggcagaaaaagcatttgataaaattcaacattacctcatgaaaaaaaaaaaaacacctcttaacaaattaagtatagaagtgtacctcaacacagtaaaggccacatatgacaaaaccacagctaatatactgaatggagaaaactgaaagcttttccttgaaaaactgggataggacaatgatgcccactttcaccactcttatttaacatagcactggaagtcctarccagaataattaggcaagagaaaggaataaagtgcagctgggtgcagtggcatatttgtgtagtcccagctactcaggaggctagaatgagaggatcacttgagctcaggagtttgaaaccagcctgggctacacagtgagaccctatctctttaaaaaagtatatccaactcaaaaaagaggaagtcaaattatccctatatggagatgacatgatcttatatataggaaaatctagactccaccaaaaaaaatcttagacctgataaatttggtaaatttgcaggatacacaataaatgagcaaaaataattagtctctctatacaccaataataaacttagtgaaaaataaattaagaaagcaattatgtttataatagctgtaaaaataataaaaaaatacctaagaataaattcaaccaaggagttgaaaattctctacaatgaaaattataaaatattgatgaaatacattagagtggacacaaataaaatggaaagacatcccatgttcatggactggaagaattaatattataaaaatgaccatactacccaaagtagcctacaggtttaatgcaatttccatccaaacttaggacatgcttcaaaaaaaaaaaaaggaaaaaaaatcctaaaatttgtatggaaccacgaaagacctcaaataactaaatcagttctgagaaaaatgaataaagctagaggcataatactgcttgtctccaaaatatactacaaakctatagtaatcaaagcagtgtgatactgatataaaaacagacacatagacaaatggaacagaatagagaacccagaaataaatccacgtatgtatagccaattgatttttcacaaaagtgcaaagaataggcattgggaaaatggcagccttttcaataaatggtgctgacaaacctagatatctgtaggtggaagaatgaaactagatctctatctctcactatatacagaaatcaactcaaaatgggtgaaaacttaaatgtaagacccaagtctataacactacyagaagaaaactagagatattggcctgggcaaagtttttgtggttaagagttcaaaaacataggctataaaagcaaaaatagaccaatggattatataaagctaaagagctcctgtgcagcaaaggaaacaacagagtgaagaatgaagaagtaacctgtagaatgggagaaaatatttgcatactactcatttgacaagggattaatattaagaactcaaagaagtcaacagcaaaatayccaaataacctcatttttaaaatgagcaaaatatctgaatagacatttctcaaaataagacatacgagtggctaataagtatatttaaaaatgttcaatatcactaatcatcaggggaatgcaaattaaatccagagaggtataatttttccccaattagaatggctgttattaaaaaaaaatcagaaatrttggtgaggatgtggagaaaagggagctcttatacactgttgatgagaatgtaaattaggacatctattttgaaaaatagtataatgtttcctccaaaaattaaaaatttgaataccatatgatccagcaatcccattacttgatatttacccaaaggaaataaagtaagtgtatcagaaagatatatgtatccccatatttattataacactattctctatagtcaagatatggaatcagcctaattgcttatcaccagattaatggataaagataatatagtatatatacacgatggaatactattcattcwtatatatatatatatatatatatatatatatatttgaataaaatgaatgaaatcctgtcattcttggaaacatgggtgagtctggaggggattakgttatgcaaaataagtctagcacagaaagattaatatcacatattctcactcatgtgggagctaaaaacttgaccttatagaagtaaaccgtgaaaactgtgattattagaagctgggattggtaggagggaggaaaggatagagacgttggttaatggatacaaaattacagctagatgcaataaaggaggaataggttatagggttctatagcattgtggggtgactatagttaagaatawgtcaatgtatattttcaaatagctagaagaaaggattttaaatgttcctagcgcaaagaaatgataaatttttgaggtcataaatataattattctgatttcatcattatgctttgtatatatgtattgaaatattattttgtaygacataaatatgtagaattattatgtgtcaattaaaaatgaaaaccaaagaaaaaaatgagattggacttagaaaataaagaaaatcacagttacaaactaaattgagactgctttcaaaaaactgtaaggactatgaattttagtgtataatgccatttaattgctatataagttatcttataaaggaccttctgagatttctatgtttggttcgtattttaagaaagccacatccttccttttggagtagacatttcttagtacttaaggaagyctattagttaatgtatagatgaattccttcatttcatcttctcaattacattagacaagttaactgggccagtgagaattggatcagtgtctgactcatctacgcccttcttgtaggaggaaaaattgtaagagaaaatttctaccttaaagcaaatattttagtatcatattcttgtatttcacgttgttaccatgacaagcaatataatattatatgacatttctaaataccaagccttctggagaaagtattttctataaattggcactacctggtgtggtggaaaagcgtggagtataaaatgtgtcaggcattagtttgaatctccactggataaatctttgttgaacgcttcctacttgtattagtcagagttctccagagaaagagaaccagtaggagattgtttatatatatgaagatttattamgagaaattggcttacatgggagctggtggtgtaaatcagttggagtttgaggacctgagaaccaggggagkcaatggagtaaatcctactcccagtgtctgagaagatatgagatgcctcagctcaaacagtgaggtaggaaaactgtagtgaatttcccctttcttgctttttacatttttatttatttttatttttttagagacagggcctcactgtgttgcacaagctagtcctgaactcctgggctcaagtgatcctcccatctcagcctcccaaaatgctgagattacargcttgagccactgcacccagccttttgttgctttttgttcaactcagaccattaaagacttggatgatgcccaaccacattgtgaagggtaagctacgtaactgaatccaccaattcaaatgctaatctcatccagaaacaggctgaaagacacaaccagaaagaatattttatctggcaccctgtggtcaataaagttgatacataaaattaatggtcataccactaaatattaatgtggtgatcttgggcatgtataccaagccaataattgacaggctgggtaacttatacttgtaaacctcacttttcttatgatgtcttatcagtgcttattaccattttcaaaattcaaaacaaacaaatacctctgaaaaatagaaacgaatcttgtaaatcatttggtggtaaatcttgtgcaaataagaagttattgatagtcttttaaaaatcctatttagtgtgaataatcataacttttgcctttgaacgatgaacgtagtagaaaaagaaacacatgaattagttttctaaaatctgaaggaatataaattcaataacatgttttggtctgaagggctgctataaaaatgtacaaatgtacaaatacttaattttcataagtaacccattacctaacatacttaggtagtttaaaaatgctaaacttcctttctcctgcttggcattattctttagacatgtagagttttattccttacttattttccctcgtytatattaacttttcctaatgtccagaaacattacaaacaaaatattgtccaaaagatgcatttcagggatgttcttaaaggtcagcttaaggaaattataaacattttgttaaggttttctgtttgtttgtttgtttttggtttttgtatcttagagcttagatgataatttgagcacgtgaactttgaaacccaaatatctaagtatccacactctaaatacactaaattatataaataaaacaagcttaggacaattattacaaagcaactttaaaaaacaagagtatttgaccagttgaactttgtctagaagagaataaccttatagaaaagaattagttttatttttaagcagctgctttatgaatacctgcaacgttttagtgcctacctttcttttctttctctttacttttctttccytttctcttttcttttcttttccttttctttcatttttttctctctcccccttctcccttcttcccttccctttccttcctccctcccttccttcctccatccctcccttccttactctcttcctctcttttctttctttctttctttctttttctttctttctttctttctttcgttctttctttttctttcyttctttctttccttctttctctctttctttattttcttctttctctcccttctttccttccttcccaacttaatacacagtaagtactgaaatattttttaataaatgcataaacacatgagtgaaaaagaaaataacagaataattttgggtctatggtcaaaattacagtgtttgagttaaacaatattgaagctaatagtaagtagctatgcagagaatgtgtagacatttgcatgagcaatggccctttctacacttatcaaatacagagtagtaatgactcctggttatacgctgtgtaggggtgggtgtcatttccataagattactgcaaaatatgaataaaaacaaaaagtgatgtagaagtaaaatcaaagaagaaaagagaaatcagactaagagagttaacagaattgatgggtacatgagaaaggtagagactgctattttctaccaaatctttcaagactctgaggagaatacccataatcaatatgttttatgtcatcaaagtgaaccaattttaattaaaataataaagatccaatgacccattgattggccaataacctaagtcataaaaatgcaaggcccttttctgtaattgtacttaagctagaagcctctcaccttctatctcccttaaggcaaatcccaaaatgcaactcaattacttccaagcattgcgatttgattctaaatacaaggtctttgtaaaattatacttgactgacaaattgtagcaaatacacacactaaacatgacatgagattcccccgctcccagcatgttacattgccttgttaatacattcaaaatacttgcttttaactacagcttctaaaagttaactgacctatcattcattcattcatctagcattttgttgttcttgtcattgttaaatggaagtatgttctcaattgcctgaaaactattactaagttatatttggttgaatgggtaacacagtgagatttagtaatagtagtattgaatttaaagtgagtaaaatcagagatggaattgaggccagctcactgctgttgaagggrcagaggaaagagcactagttgttaagatctcagtgcagttcccatgctcttttgacttaaaaattaagaagcttatttttttctgcagggcatccagaattgatctgagttaccgtaactggcttctgctaacatgaccacatrtcacttacataaaaatcagaatgcttgtttatgatacaggtcacaaataccagctagcttagaaacaaataacaggtagctagtgaactgggccttctctaggaaaatttatgagttaagccaggttataattagatggtgtctttgtgaatgtggtatcacaaccagatgagctggtgtaattatttaatgtcatcagttctatgcaatccttgataagattagacactggccaaatgaattcatattacctggtcagaatatgtgctctcctgaatagtataggagacacacttacagcttcttttgtttgctattttcctccaaaagtgatatggacagagggcagggaaatactgggtagaagcgggcgatccctggcgagggccctaccatcaagcctggacccacggcccaaagtgagaactttacatccctgttttctggcttgaatgttgtctttttcaaaaccactctggcccacctcaccccccatcctgtacctataaaaatcccaggctccactggcagcatgtggcagagaaggagagaagagaagcagcttgatgttggtgagaagcagcttgacttcagagggacggcttgatggtgggactgtggagaagagtttggctgccctgaactccaggggaagaccaccttcccactcccctccctttccagcttcccatcctgctgagagccacttccatcggcaataaaatcccccacatttaccgtcttcaattcgtttgtgcggcctgattcttcttggatgctgaacaagagctcgaaatacagagggctgtcacaatgagctgttaaatacttaagccgtccgtagacagcaaagctaacagaccacactgtatcacacaccctcttcagctccaggggtcgcaggtaccctccaaaactctgccacggggccacacagagttctgcccctgctggcgcccagaagcactcatcccagcccctgcaccctctcaggggttgagaactaccggctgagtaaacaagtcagagaaaatttcctgtttcaaaaggatacacttcaatatgttagagatatgttctacaaattataatcacagttcacttatgcctttctgaaacaataattstgagcatctaaactgtgcttaaaaccacattttttgggaaaaactccagttatttctgtgtcagataaatcttacccatgtttctgtgtttgtggatatctttattcttcttcttmttattattttttgagaccgagtctcactctgttgcccaggctggagtgcagtggcgtgatctcggctcactgcaacctctgcctcccgggttcaagtgattctcctgcctcagcctcctgagcagctgggattagaggtgcgcaccaccatgcccagctaatttttgtattttagtagagatgaggtttctccatgttgaccaggcttgtctcaaactcctgacctcaaaggagccgcccgcctcagcctcccaaagtcctgggattacaggtgtgagccactgcacccagcctttattcttaagtcttattaatcacagtagtagtttcctattgctgcataacaaattaccccaaatcatagtggcttgaaaataggacatttattatccaaaagtttctgtggatcaagaatgctggagtggcttagctgaatgattttatctcagttgtctcatgaggtttcaatcgaggtgttggctagaggtgcagtttcaaaaaagaaaaaaaaaagacttaattgggactagggatctgactctaaggtttctcatgtggctgttaagaggaggattcagtttttcaccatgtgggctacttacatcatgtctttctttaaagcaaatgatgagagagagagggaacaaaacggaagccacaattttctataactgaatctcagcagtgacacactatactattacttcagtcacattctattggtcacatagactgatcctaatacaatataggagggaccatgagaagagtgtgaaaccaggattcagcaatcactgggagccattttggggcctggatgctacagtttttcctctatctgctgatgattcatatccctcccacactgaaaacacactcaccctttcccaaggcccctcgccacccacccccgacaccccacaaagcctcatcctattacagcatcagctcataatctagaatttcactatatgaatcaggaccagttatgataagttttcttgggtgcagttctgtaggtaaagctccagtacgtttatcttgatttatagacctgtaaactcaagagataagttatctgttcccacataaccaacatacgaaggtgggacaagcatatgaataaccactataggtatttctaataagaaaggagaacaatggaagttacaaaggagtctttgttcctaggaagttttaaattcagtcaggaaaaatttggaagtttcttgattaggactctgtcctgtatctgcccaggagttattcatcaaagtcaaaattctatgaacagtgtgtaaaaggctctttaagatatcactagcagtcttctcaaaatctttagagtttattcagctccattcattaggtggttccaaagccactcttacattttaagtttttattttggcatcactgcacttttgtgtcaaaatatatatttgctgtgtatgcttgagtaacaaataacacaaaacttagcttcttaaggaatctggcagtgtcttagctagttgagtttggcttagggtctcttaaaagrttacagttgaagtgtttgctagagttgtagtctctgaaggcttaactggggctgaacgattcactttcaagtttgctcatgtggtttttgcagaaggcttcagttctttagaactgagctcgcctatagggttccttccaacatgacttccttcaggccatatgaagagagacagacagagagaaagagagagagagagatgaaaccacagtcttttacaacctaatcttggaagtctaccatcacttctgttttaaactattgaccacacattctaaacctagaaaaatgtgggaggggattacacaaggctgtgaatattgggaggaggcagggatcattggggaccatattgaaaatattgcaagctggctactgttctagaaaaaaacaggttcttgtcatatggcccagaaaatttaggcatgcggacacattgcagggtgagtaggacaggyttattaggtgaaaagaaaaaaggaaagaggaactttcagcaaagtgagagactcctgttggcaggtctcctgcctcacagattgaatcccaggccaccacacaggagctggagaggcctggctcctcccctctgaaaacagtttaagcttctcctggctccagctccttcccctagtgcgcaggtgggcattattcagagagaatcagttaggaggtgacagacttcatctggtacccgcagtctggtttttcagtcttcaggctgccytaggcttgaaggtggagtttcgcyggacctccygctatctcctgtctctatccctaccacagccatcatggatactgtttatccaaatatagtaagtactaaaataactaaaatacagtggttaaacattaatccttttggggggagaaaatggcagtttcttaaaaacaaacaaaaataaactaaatatacatttaccatatgacccagcagtcataattctagatatttaccacagaacaatgaaaatgtatgtccagatgaaaacatttacatgattgttcatagcaagtgtatttgtaatagtgaaaactggaaacaatcaaaatgtccttcaacaaatgaatggttaaacgaactggaatatccatcccatacaatactattcatcaataaaaaggaacaaacttgatacatgcaacaatttggatggatcaaaggtattacacaaagttaaaaaaagttaatatcaggaagttatatattgtatgactcctttcttttttttttttttttgagatagagtctcgctctgtcgcccaggctagagtgcagtggcgtgatctcggctcactgcaacctctgcctctcgggttcaagcaattctctgcctcagcctcccaagtagctgggactacaagcacccaccaccacgcccagctaatttttgtatttttagtagagatggcgtttcaccatcttggccaggctggtcttgaactcctgacctcgtgatccaccctccttggcctcccaaagtgctgggattacaggcrtgagccaacgcgcccggctgtatgactccatttatataggattcttgaaataaaactatagaatagagaacargtaagtggttatcagggtttagaaatggttggaggagagtgtagttgtgactgtagaagggtaatatgagggagatcttcgtgataaggaataggtctgtattttagctgtggtgatggtagttacaagaatctatacacaagataaaatggcatgaagctatacacatkyattgcaccaatgacaacttcctggtatttatattgtaatgtagttatgtaccacagaaccattggaagaaactgggtgaagggtgtaggttcctctctgtactatcttgcaaattcttgtgaatataatatttaattattttaaaataaaaagcattaaaaaatggctcctcaagtcagacagactgtgtttacatcccaactctgttacctattaactgtgtagctgtggatgcattgcttaaccattttatgttagttttttaaaaatccagttaatttgttatgatgcttggtagtaaaaacaaaacaaaacaaaaaccttttatgctgttctgcaatagctagatmtgtgcaaatttatccccaaagtctaaggaggctaagaggccaaaggaagaggctgacatatccagttcctcagaaagaaacatttactatggatttccaaagagaagccctagtcatgggtgacagtgagacatgatggtggatccccacacaattacctgccagatccaggtcttatataccacagtactgtkgatcttgatttgtagacctgtaaactaaagatataagttgtctcttcccgcataaccaacatacaaagrtcggattgaagttgacagatttccaagggaaaagcaagaatgctatgtaaatttgcctaaggacaggatttatggtcaaggatgtttggcctaagggcaggatttaccctaacaacagacaaggtagaactctgagaggctttccctgaacaggggttaatcaagagtcaacacggcagattagcatccaagatggatttgcattagcctccacatacaatgaggccagtaataaaataactgaaagtaaaagcacaggaggcttgagagtttgccttcctttgctttctacttctgaaatctgtacaaaaagggaatggagaggtagtgtgagagaagcagagggagacagtgaaattcctccagaatgtaattgttaatgccaattgacaatgtcaagacatgacttgtgccttccaccttgggcagcattcttgaaatctttattttctttcttgggtgtaatcatgacataagcctatgatacctaaactccactcctccttccatggttcttatttagtgctattaataatttcattgtgtcttatcttaaaccttatagttttcttttaaatcatgaatagctaacaatctccctaccaccatcttagctttgtgtattaacagttactatatattgttctatttataaattttgagtaatgacactccttcctgctcttggtcttctaatattgatttgcaatgtaatgttttgatttccagaattcccagagatggagtcattgtatattttcatgtgtgacaggacagtgataccagaagtgggtagtttcctcaaatacttgctcttaaatcatcagtttcatcatatgtaaattgggaattataatatctaatttaattatagggatcacctgaggtaactgatgtaaagggcatagcacgttgcttgggttggctcaaacactgaaaaaatagtaactcaatatcccagcatctatttcttcccctgctgatgttcccttcagattkgatcatgcacgtgttgcttcctacaccgcctcctggtggcatccagtgtccacagttgagccacatcttttgaatattttcacctctcattggaaaccatcatccctgttatttcttgttccttactctgtgcacatgagattccaatgaggactgaaatcaagtcttccttttttttcaagtattagtttatatttcacaataacagaaatttctgcatatctatctatctatgcatctatctatctatctagtcatcaaccttggaagttttttcagtgagtgtctttttttcctaagacttactcatgagtcatgagtccatagggaattgggttgagagctagtttgagggaaattctttatatatactgagagtctcctctaccctcaggcagccacctggcatttttcaatggggattatgcccatcacttcttttttacttagaatatcctaggaagctgctcagttcctctagctaatagactaaaacggcaaagttagtatgtccctttacgaaaccagaaggaagagtcattttctttctcttctcattttgtgttcagaaaatccactaattaaatataatatatattttttctccctctctttcctgaaatatttaaattataagccttatgtagaaaatcagaagctgctctaaccaaatagctgtcttataagacaggagacaacctrtacttctaggaacaagaggaatacatttccttgaattgtccaggcagcctatctatatataatgaagtaaaaataaatttaatatgacaatacgattcaatatacaatcacaaataacrtartaaaatatacttaactaaaattttttgtccttattgtctgtcttgtgaaaaattataatatatgctgtttctccattttatatgctaggtggagatgtaaccctctgcttgcagttacacaaatattttgtatgaaggaaaagcaagcacaacttaagcaggtgtgactgcatgctgcagatttcaatgggcaccttttcctttgtttagcagggaagggtaatgttaccctgaagacagccaaagaggtagaatggttgctacctctgtgtgtttggcaggctgctagcatccctggcaatggagcctctgctgaatctttttttcttatcgtttttgctcatgttgactgctgaacacaatgcctacaaacacaatcctttcaaaattacacagcctccagtgctctttacaatgtttttggctactatcaactaaatccccaatttctgctgatttcatattttaagtgactcttttaaaacaatttcctgaattccactttcttgaagcacttctaagggaggaaacattttccttctaagaaattcaggtatggctaggggccaaagcataaaaatctgctttgcaaagcagtagcctactaccctttcttacacattaaacgcattaatgtgaattgagaatttaggcacccatttcccccttaaatatgtcttacaatcgtaggcactaggaaatactgtgaaataaaaggtttgagagtctcaaattagttcatagtatgtgatggttgagtccaaaactgatttaggaggccaaggtaggtcaatgttactgatattggcaaggtggtttcaatatttcttctcattagcttagctcatactgtattataagataataatgaaatatactggatataatgaaaatatactggagatcatctgcttatatctattttaagtactagtacaatgttctaacttttccctgacataggaaaaaatgtagcgtagtcagtaattcatctagctagtatgatatataaattaaccactatttgcttttaaaatatttaaatctataatgctatagtcagatgtatcaaagcaaataaagaaatttggaacactaaatgggacatgatgtagtggggatttttttttctacactcatcttcaaatatgaggatacatgatattataataaaatattttgcccatttaaatgtaatctcaatatcctatgaagttataagtagaaaattcagtaaaaagaaaatacctttaaattaaagcaaaactactttaactgtaaaactttggagagagaatatagtaaatgatattgtaataaatgtaatacattaatatgtcttaatacaacaaatttgtgtaacatggggcaaaaaggacatttctttctttctttttggagacaagagtctctctaccacctaggctctagtgcagtggcatgatcttggctcactgcaacctccgcctccaacctctgcctcccaggttcaaaggattctcatgcctcagcctcccgcatagctgggattacaggcatgtgctactaaaactactaatttttgtagttttagtagagatggggtttcgccatgttggccaggctggtctcaaactcctggcctcaagtaatctgcccaccttggcctcccaaagtgctgggattataggtgtgagccaccatgcttgcccaaaaaaggacatttcttatttttagctatctcttaatattttcctgaaagaaagctacactgaaatgatattaatacataattcaaatactaaattaaaaatcttttacaacagcacactactgaaagcatttgccctcaattactttgttgcaccctcttcaaaagcatcaaaaaaaagattaagcagaaacacaactccgaaatataaaagtaattatatttattagccaaaataataagaaagttaaaatagaaataaaacttctagggatgctaataagaaatgtttaaaaaattaacaacagcaaagtaacctgaatatttaggttctggctaagaaatggagaggttttaaaatccttaaagcacacatgtataacagattactataagtattattaggctgaggcattaagaaacaatagttgctggctgggcgcattggctcaagcctgtaaacccagcactttgggaggccgaggtgggtggatcacgtaaggtcaggagtttgagatcagcctgaccaatatggtgaaaccccgtctgtactaaaaatacaaaaattagccaggcgtggtggcgggtgcctacaaccctagctactcaggaggctgagacaggagaattgcctgaacttgggatgcagaggttgcaacgagctgagatcgcgccactgcattccagtctggagaaaagagtgagactctgtctcaaaaaaaaaaaaaaaaaaaaaaaacccaaaaacaatagttgctatgactgcaaaggaaatgttagacatgcacaaaagttataatctgaaattggttcaacaattcttgaaccacataatcacatccatagagagggacagtagacatgagagaaggatttttgaagaaaaacttgcctgttgggtccctccgattgcaactctgttgtggaattggctggtgtttggtgttccccatcatcgtggactcccacagtaaactccacctcttactaccaggaactcttatcygggcatgttgccctcttgggccagcctgtttttaaatggctccacactgaagattctactgcagatattagggttggcttctggaattcatcccctttcaatatctaggtgaaggggttgcttttaaactcaaacacaggcttgtactcggtactcactggcctctttagctttttcagatgtgaattaggctccaggccaaagcatcccccaactgcaggtagctcattcaagctttttttgtacttgcagagaaatcttagttcagggttagggaactgcttcccagtcttccttttttgttatactcacagcakagctctctctaaaataattgcttcaaggatgctgcccatatctgctgtccccatatctggagccctttagagcttttgtgtgacaaaggttgaagtgtaacatyactcatatgtagtatttcagtttttatgtgctgcttgaagtctagcacctcctttggaactctgcatccattatatgttcacgccttggccaaaatgtccatttgtgaattcctcaggctgctgtcttttcctgtgttgatggtgttactgttgcaactgtgctgccgtttggaagcattctgggaaggtagctagctccaaatttacattggtcataaatcaggcaattcattaatggtacagtatgatggaatgttcccaaaacgttgcttccctgagaattaccacttagtcctatagatgcccccagagagctctctgtttatgggaagtgttgtttctacaatttaaaatctgagaacatttcagagtatgtcagccacccaagaactgtggctttctatatgtacaaggtggcctaggccccaaagagatgctataaataattctatcattttcagtagatcacgttctaaacacaattgtaaactacatgtgaattattttgtaaactttatatggctatgttgttttttgttgtttactccatttgcttagcatcggattttatatattttagcatacactgatatctttcttacattacaaaaacacatattatgctattttatttaatgcaattttaagtggtacgttaacataaatttaaatttctgtaaaagtaagagtgtacctaaatgtatacatttatttatgtatcaattgaaaaaaaatcttatcgaaacaatagatttaccctggaattatgaaataagccttgctataaaggaagtctttctcattgctaactctaatacattatttacattatgtaataacttgggccttttaattttcctgtcaggattaaaaagtagtactcccttatttctcaatgcaagaaccctggactcaattgatgtgcaattatttagagtaagcaaagactctaaatcagatgcttttgttatctcgtttgccttagtaaattataggaagtggttccactatcattgccattttttccccatatcagctgtgtgttgaggtcctgcttcttggcatacctaagccatttcttcccatatatgatacagtttatttttaatgcctaaagattccttatcatacttacccttattttactccagctggtttgtgcaatattgttattttaaatggtcaattaaaaattaacccaccctgggtattatgtgtgttcgatgcattttcttatcattcattgttcagcaatatatttactgtgattttaagatccgagagccagaagggagcaccaagtcagagtaaagccttcttagccactacatttcttcttagtgctctctctgtctctgcctctatctctgtctctcttacttttgcatataagttgcttgtaggatagacttaaatgtttatgttaaacactataggaaaggcataaatacgagctactacacatacatgttttaacctaatgtgagaaacacatgctaaagttttccggaggacacatggtttactgtcctatgtcccagatttctttataagcagaaactagcttattactataaaatatggcaatatgaaaaaattggcttatccctgactcctctatttttttcatgctcttcaaaacatgtcttctaagatccttgtaatctctgactgcgttttctactctattttgtttattccattaacttcctcacattgaccttccttactgttcccttaacacgctggctatgatcctgcctcggggctttggaactagcttttctctttccatactccagatgtatgcatgacatgacctctctctcaccttcaactcttttccaaatgtcaccttatcattgagatgtaccttaggttccctatttaaaattgtaactgactcccatcttgttctctccatacttcttaccttgctataattctatatcatttactaatttatttgtttgtctttgtcctcactagagtgtaagcttcaagagattaagaattttgtcttttttccactgatgtatcaccaaatcttagaagagtcatgacataaagtaggccctttacatatttgttcaatgaataaatgtrtgactcatggcagaaatgatgttattactttaactggaaaattatttaatgtattgatatatccagagcttctaaatggcaggttagatatagccagctcattagaagatggggatagtattggaggacttttaaaaaatatgcatttgcataaaaatatactatattgtatttatacatrgtatattttactataaatataccataaaatatatactcattttacttggattgagtattcttaggatggttttggtgggatgcaatggggtacattgaagtggaggagactaaagctatccactccagtgtcccctgggccctttggtgactargatggaagaaatcctcatgttattaaaacagtggtacttatgtgagaatgtggagtgggtgaagtatatctgcggctgagggctgagggctggtggtggtcgtcatgtttaattatatatttgaaacaatgtttacatgcactgtaaatgtaacagaaggccataaaatgtcacttttcaaaatgtatactgactttactttctacccatttataaacttttatataaatctcttctttttaagttcctttcaagcgtgttcttgattttctttctcaaactattttggaaaggtttatttttttaaaatctattcactgaagatgatagaagcacccatggcgatatatgtgtggaaactgcacagtactatataaatgctatttattttagctattactatttagtgacaattgtattatggtttagttaagttttaccatgttgtttctagtatattatcagcctaggaatgctgctaaaatgatgctaaaatcatctgaggttgtcctttctctttgtaatctatttcctgttaatatgtaaagggagtggcattggcaggtttagaattcttttcgtttctctttcccttgtttgagtagctacaaaattactaagtcctgtacaatctccctctctctctgtctacttaattcttaccccgsagatgagaaaccaagatcattagtcgttcttcaccttttcctgagcctcatctattgcctaggaatcttgaaactataagtgggttggaaaattgagccctgataaaaatgtttttgatattctttcttcacattttctcattaaacattatagagaagttcactgatgctgacagagtagttgattgtgcctggaagaaatattgtggtggcaagtacaaattagatcatggtggactagtttgtattttgctgtttcagcttctgtgaatgactacagcacaatattttttttattaatgtgagtaaataaatcaggtagaaaattactttaaaagcagtggttttggcattgcagcaccatttcaattcaaattagcacaatagaacaacaagaccacataatcattacaagccctagtccttctgaaactcaaatttatatatttagaaagcgattattatatttataagctatcagtaaaattttgcctactccttttctcacttctgccataattagcttcacaatgtaaaacgcaacagtttttaaaaatgttggaattgttatttggcaagatagatacttaaattgatgacatgtctagaagatgggtttatttgggggctaggaataacatgagagcaaagaatatggctaagacatggataatgcttgggaaaacactccagctgttttatggttattgcggatatctcaaacatgggtgaaaaatatattgtgtattttaaatactgtttttctttggcaaaaagaaacacttctttctttggttgcatattatataaaggaagggtaccaatcccatacagtaaatatctcttctatgayggacctagacacatgttttgttttataaaatatgatagataagttttaagaatgttacccaattgcagcatgacttttaaggatcaaaatacataccttttagaagtatatctatatatagataggtagatatcattagatagatcattagatatatatctatatattaaataaatgatatattagaaaagcttattctttttcttccttagttagtcttataatctttctcttttaaagtgaattgtgttagataatattcatttgcactcactgaatcatacccagttctgagatgctacatggcaactgaatatacatgcacatcctcttatctgccaagagactgccattagaaagcattagacactaccaaggtataattttgttttactaattatattgaaaagtttagaggagggagagtgaatatacatttttaatagacagtaattaaaaggcaggctgttgaggtaggcagatgctggtcagtctgattctaccccttaaagcttacaaaagagtagttaggttgtgatacatgcccatgaataagaaacaccagaaaatataagccaatctttcattttacaaagaaaatcttctcttaattggccagtttaatgacaaaatcttctaagagtgtagatgatatggccaaatctctgcaaattaattaatatatgggttatatatgtttatgttaaaattatataaaacctatgaagtggtttctgatcacatttcatgaatttcattcccttgtgttcttcactggtatcttgagatatcagtagcttcatcttctctgagtcctcttaaacagttttctagaggataacactctgaaatactcaagtgtatgaatctatgggtgatattatcactggraaatttatttcatgagtgttgtcccacgaaattaggccattcccgttcactcatttattctgtagacacatatacatgatctctacaagatagctgcttactctgataaggcagtctttgaaaggtttatttgaaattaygtccaatagttaacaattattagataatatcccagaaatagtgactaagttggtgttatatttccttgactttttcttttaaatgcatataggttatcgctacaattaccccaagctatgattgatggattcttccctaagtatggtgatcaaaataaaataatttagagcacacctagtaaaaggactaaatttctcacttctcacttctaagtaatatttatgtaacaaaagtacttctcttatarttgagtatatccactaaatttttggtcaaattagagggtaatgatattgctgatttttctggagtgtaacaaggtttaaattgacataatgtggttagttcagtgccttgtacataattaggacttgaacatagcaaataaatggtgacgtttgtatttataaaaagaatcaccaattttatattgttttttctttactattcttaaaagttctgttaaaagatgtacacataaataactcagctacacataatgacaggctttatggataaatggatcattttatattattataagtcagatcgcaatgaatttaaaaaattaaaaaatgatgacgctggtatgcatcaattaacatacatttaccaaattttaaagttttatttcaaatgtgtttataaatggaaattgtacctataactgtttttaaattttggtttacattttgtgtatgggtttttttctattcctaccttgcatacacaatggtgggtcttagttttcacacaagttagattctagaaatccattcttaagttaggagttgagaacttaagttatagaagcaaaatgattgaaggtattctcttccataatctgctcaatccacattattatcaaaatagtggtgtgtataatgaaaaattacaaaatatagtacagcaagttctcactaatgttttcagcaagttcttggaaactgygactttagtggccctcaaataatgttgttttattcaacattgttttcttacaatgttgatgattttwaaaaaatkggtgtcatcatacattgtttcaattaaagtcacagtttccaagaactatggaagaatttaaataaggacttactgtactatagaaattaaacataaaggaataagaaatagatattcatgttcaaaactatgcctggaaaaaaaatcaagcttaattagtggacagaaaagtgaaaaacaacatttttttgaacattgtagagcaggctttctcagcatgtttgtaagcttgacatattgctgacactgatttttaagacaaattttatctcaaaatttattactttcttttttattgatattgatagattcttagcttaattctgtggattggtaataaagcrcagtcttcatttctgccattaattatataataatatgtgccattagttatgtatgtgtttcttcatttgtcaaatgcatattgggcttccaccaggtgccctggcacatgccaggcacttgaatagacattagtaattccagcaggaataagctgtagttcctgtactcagactagtaagaggagacagacatttaaactgataaattccattctacattccatartcttaaaagtgctataatagaagtatgaatggatgtaagtacaagggaggaagtggtcacctttgggtcactaagagcacagggatactmgtcatttataggtgccaggagatagtattaattcctatgaggagatacacgtctggagctgaaggctggggcagaatcttggaggacatttgtagcatgccaaaactttagaaggtttatcttataagtgacccagaaccattgaaaggtttggatcagggaaacactcttgcaggtatgtgagctttagttctttaatctgtaaaataaaggaggttaacctgatattttctgtccctttttgttccaaaattttgtgatttctcagtcacattgggtcattattcttttgaacagtaagggagaggggagagactgaatgagaaatttagatgtgttgactggttaagtcagctaccaggtaacattgtcaaccaaagaacacttcactgctatgtggagtagcctagaagtgaagagatgaagtaatgtgagtagttcattttcattcttttatttaaaacaactattttagaagaatctactctctgtgaaagagctcttattgagcttttggagtgtgatgatggtatttactttttattcacgcttggtagctttattaaaaataaagatgacaatgtgtctgtaaaattgatcatagtcctacctccaaatttgggcctagaatttgtggtttttagatgctgaagatagagtagtaaatgtgaaatacgtggtctctactagaatttatattcttcatgggggtgtgtaaaggtgaacaagcagtaatatgaatataaaataacattcatcattaggtctctacagagaagatagagttagcaaataaaaatacaaaaccttgatttacatttgaatttcagttaatgaataaattatgctaaaaacataataaaagtattttgcttggtaaccctaggtgttcataatttttcagatgggttaacaaaattaggtaattgtagacatgatttttaataaaattttctcctttattaaagaaaaaaattaattataaaaacaatgttcaaagccagagcatctttctttggtgatgtttcaatatttgaggttaagcctatgttataattatggcccttgttatctttttttttgtccactaagattactctataatatttccataattactcctctgtttacatgggagtgagaacgctccctgcattacccaggactttttgaaaactcagaaaaatcctttcagaaaatctgggcttatcactattcagaaatatattttgtaatatactttgaagcatagccgcattttgaagtattatttatggctgttagtttatacttacaatcttgctcattttataatgaaattcatttagtctttatattgttctctaaatggggattgacttggattctttactgattcatctaacgtcattaatgatttcccctttstgttctgaagcatcttattgaccttttcaagtgtggccataatgcttgtttctcattaatggttggatcttctatcagaaaacagtgatggacatagatctatatggttgatcctggtccaaacactaaagttttgtttgtaatttttaatggtttgtcccatgaagcgtagcttagacctcagcagtggagaccagtagagactttatttccttatatttacatttctagtccatacagtgtgaaaagaaccccacactaaaaggaggaaaccttgctaaattagattcatctgagaaaatctatgaactaatatacatttagtacatgattaatgagtaattaattgatatcaccttaaaagagtttaaaatctcacccgtaagactagcagatgtgcctcagggagtgctcacaaaagatgatgagaggaaagagaagtagtatggtagaagagtcagagtttcaaggaaagaaaatgaaaatattgccagacaaacagcacaaaatagtcaaataagatttttaaaaaatcaatggtttaactaaaagtgaagaaaagtttgattacccagtctggtagaagtaaaaatttatgttataggtgctgttaaaagaaaaaccggagcaaaactacattcagaagcgtttaattgagcaaagaacgatttacaaatcaggcagcctaccgaaccagagtaggctcagagactccagcgcagtcacatggtagaagatttatggacagaaaaaggaaaagtaaaacacagaaattggaagtttggtacagaaacagccagattggttgtaccttggcatttgccttatttgaacatgattctaacaacagttggccacatttatttagccaaaacttggtgattgacacaagaggaggctaccgtctgtttacaattccatttaggttttagttcacggtgtactgagaaacctttagsctgaacttgatttaacagtgttgaggggagattgtatggaactgtgaaataaaagcaatgtaggatgtttgaaataaaagagagtacataaatgttaaacaatgatttgtttaaacttttgcagtaggtgcaatagctttctttggttaaaaatagatggcaaggccaggtgtggtggctcgcaccataatcccagcactttgggaggccagggtggctggatcacctgaggtcaggagttcaagaccaacttgggcaacacagtgaaaccccgtctctactaaaaatacaagttagccaggcatggtgccaggcacctgtaatcccagctactcaggaggctgaggcgagagaatcacttgaacccaggaggtggagatcacagggagccgagatcacaccactgcactctagcctgggcaacaagagtgaaactctatctcaaaaaaaaaaaaaaaaaaaaaagaaaaagtaaaaagacagcaacaatcaaatgagtataaacaaccaaaagagttgttataactgtgtgttctatagcaagtctaaaagaaacagcaggcaagctttggaaatataggatatacatattctaatagagagaaataagggtattaccgtaacaaatattttgaaatacggagagagtagataaaagaagtaacatcacgtggctgatgtcttctgataacttctgcttttgagaaaataaaagtgggattttggctgttggaggagaaggattagatataggcctattggagaattcatcagaaaagcaatacaaaagtgaataaaggaataccaattgctaatgaaactctggttgaaattagatgtcgaaatttacagcagggcagttcttctgccttttgccagtaacattaacaccaaccgaaaaaggtggtaggaaagattcaggatcaactattagcaacccagcaaacattgggaatgatgatggtgataagagagggaaaaaaatccttaggaaggcagacagttagtgaaggtaataatgatgcaactaaactgaatatttgtctgggtagtgagtaaagaacagtcagaattaagctagataagtaaggatatatagatatttatgtggataaagtagaaatgtattaggtaatgagaatgggattaaaatcacataagtttatagattttggagatggagaaatactgagtgataagtgctgttatgaagtcaggcagtgtagtaagcaagctaaagaaactgagtttcagggtgtcacatgggtcggcaacactggtttcatggtgtcagtaacaatggataataagaaaaatactaatctaaatgctggggtcatgagaagataggctgatttggatttcttaaatcattatttgtaggtgaaatgttttctacaaagtgcaacytaaagcaatttgccttatagcaaaatattgcctaagctttagctattaaattatattttatatgctgggtaatgtttaatacaaccagatttcagtaaaatgctataaccacagggatgtgattcatatgcatrtttcagaaataggaggattgaacagaaatataaaaggactgcccgtggtcataaattagaaattacatcaaggaaattttatcggatacattcgcagtgcaattctgaagagaagtccagtcattgtgacactctcatccatattttatactgaacttcatcatagaacttaagtcatcattccaaaactggctagttcagtatttattcaaaccgcttcagtacatttagtagctccagtcctatctcaaaatgtccagaacccttgcaagaactggcggtcaggtaatcactacaggttattttacttttgttcatgcttcagaaactgttcattctgttgaccttggtggtcttttttcttctaattgtattcttgcctttctgccatttctcactggagtttatatgaaacactgttcccctggtgcttaagccttcccttccctctcctcccctcccctcccttcccttcccttcccttcccttctctcctcttctccatgaaaccactttcaggcgatttcttggaaacaacccaggcctgattctcttcaagacaatatatgagtgtgtgtgtgtatgtgtgcgtgtgtatgcgtgcatacatacatgtgtgtacatacatgtgcttctttgtcacttaaaatttgtagaaaggtgtttaaaatcaatcaataatatgccatttatctgaacgctacttcctgttcatttgatgcccataggaatttagttaaaaagataactattggctgggcgcggtggctcacacctgtaatcccagcacttcgggagaccaaggtgggcagatcatgaggtcaggagatcgagaccatcccagccaacacagtgaaaccccatctctaaataaaaaaaaaaaaaaaaaaaaaaaaaaaatatatatatatatatatatatatatatatatatatatattatatagccaggcgtggtggcacacgcctgtaatcccagctaatcaggaggctgaggcaggagaatcacttgaacccgggaggcgaaggttgcagtgagccgagatcaccccattgcactccagccgggacggcagagcaagacttcgccttaaaaacaaaaaaacaaacaaacaaacaaacaaactatttggtctgaagtgtagtgagataatatgtctgatagtttttatgtcataaaatgaacgtaggataaaatgtaaagaccatacatacatagcactgaagttttgttgttcttttttttttgcttgttaaaatgtgtgttagtatgacactttaaagaatatacacaaatgcattccctttgtgtgcttaaaaacaaacaaacaaaaacacaagagtcaactaccagaaaggaagtatattaatttgggcagctggtatttcgtgagagtaggttgaaaacaatgtactatgttatattataatgcttttaatacagtcaatctttgaaattttttatgtaaaaccattgatgtttccactagctctatgctaactgatttagtaagagcacctaggatcacctttgaatccagcctcctccgagaaggtaagccaaggatctagtgccaatttagaaattcaggctggaaaacaaagtagggagtcatgttagcatcaaggaacattattcccgtgatggaaacaactcttcagcaaaaaaggaaaacttgtcttgggcaggataaaaggcagatttgattttcaagtgctggctactcacacttattcctaaagcagttgaaaaactactctatcatcttaattatctagaagtccagctgaatgaaaacatatttyttcaaaaccttcaaaaggaagaataagatccagcaatattatgtgttctcactaaaatgatgaagacaatgcaataatcatgaagttacaatgttcgctcataggacttttggaaaatatattacataaagtacattgtatataattatatatgctatacatttttggatagataatttttatttggctgaggaggtttctctttgtttcatatttgctaagtctttaattattaatgaaygtagaatttaattgaaaactattgggaagatgtgtttttctttataaatatggtaaattttttatagattatctgatgttaaataatcttgtatttctgagatcattattattattcacagtctagcagattcaatttgctagtagcattttatttaatatttctgctgtgtacctaagtgatactcatctatgtttttattttcttgttttcttcttgtctggttttgctacaaggactacaccrattcaccaaattaatcaggtagattcctcttataattaatcttccatgaaagaatttgcaaaactaagggttgtccttccgatagtttcagatgacagattatatgcagattaaacttggctctttcttcagatctcattaaaaacgctttgaaaaaatatatcaacacaagagaatagaattaaggaaaaaagctttccttggatgagagatgtcaatacaatttggaatattgaaaaaatgtttgagcaatccccacacagagagaaataaactgaaatttaattgtctttacacagggaaacaaaaagggagatagtaaaatttgctttctcaatcctcagaagaatcagatgtacagttagtctctatctgaggaacaaaagatgaagcctttattttcaaccctatttttctcctcctacaaaaaatgagtcacttactaatgatttttattcacctttgcctccttagagttattttcctgtatatttctctcgtatgttacttcttcctatcatctctgaattgaaatttttattttttcaagttggtaagcataggtctttctgtatcaccttaagcctggaggcttacatgaagctggtgtttgtcttaggaagaacagcgcaccataaaacagckggccyttactagtcttgcttttatttccataatccctggacctcaaatgaaactaaaattctttgtgacatgtttttgagaatttctacttaaggacattcttcttggctttcactggcctcttggtctctaggaagacagaaatctgatatcttgtccacatattgatttatattactaattaatgggaacattttatacattaatagagtatactttttttgcaggtgattattcttgttggataaatgaaggtataattgaataattagaggttagttatgataaagttatgtgatagagttatgtgtttgtctaggtttatgagatcaaagtagctgatcatttcttttgcatgtatgaacctggagagcaacgtggatagatrgatgatagatagatagatagatagatagatagatagatagatagatagagatttggattgagttcttaaacgcatttgttttatacatcagagtttgtaaaacagtaacctatgggttgagtataactcataaacagatctctttttagtctacactctgttttgtttttttgataagccaatatttagaaattctcttttatgtaaaaaaactctagagatccagtttgtaggtgattattctcactgggaaaatgaaggtatagtctttttgaaaaattggaaagtcaggtgacatagaccaatatccttgcatggtagtagtttcctagagctgggtagcagcatgctgtcttatgttcttcacactttccacactcctcatgatcactggatatgtgttagctgtaatttgtcctgcctaacataccaggttcaattcatgagcctgctctgatttactcagcttcatctgtctactgggcccccattcactagctcatggaggatcctggttgctggtgtcaccactgcagctgaatctacctcagattctaacacttctgtgtgtcttggctgctactggggtgagtaatgggcttcctggtatggcctccattgctccgttctgcctgccaggagccataatagctctggccatcaacctagtcagatttaaagaggctctccattctattcttactttactcatgtaaagtgtccttcaacaggacatgagatttggttttctcagaagccacctaaggggccaggtgatgtaacctgaaagtgagrgagttagttcctgagttaatcctaatgtgaatcagtaagggagggaagaagacatctagagttagcaaataaattccattcctttacttcctctgatatacagaggcatggagtttctggttggcttccctaaagacgtgatgtcctctatggccaagcaaccagttgggtcttttcctgaagttgtggccagataaaccttgactttgcctcactttttatgcctctctttcctttccctgtgcttgctggttcgggattgcagctctaaataaagtattagcacgtaagctttgtctaagattcttttctagggaaaatcagcttggattcctacttttctcattaatgttatcttgctagactttatagatttccaaatgtttaacctttgctttatattctcttaaactttctttcactattttttgtcattttacaatacactctgtatatctttccaatttggaatcttattataaaccccattcttttaataactacatagaatttttatgtaaacattatattattttcttttaataatttcctcgtttgaagcatttagaattcttctgatatgmatattcttgctaagaacatccaattgctttgtgtgtgtatgtgtgtgtagctaagaaacaattatagatckatatttttacacacaaatggcagttctttaaaatattaatttatagttcactactgtggcaatggctaacatgtgttcacccagcaggatgttgctttttcagaatctgttaacattctgtatatatgttcctcttaccataaaaatagaacttgtgcccaaggcaacatatgcaataaaaattagtggagatattgataatgctccattaatctcattctaccttaagcagcatagagacttactcctgttgacagctttccattgcaataaaggaaagattgaaataaaatgcattcaaagacttgcccaagtttgctctctcatgtggaaactcctggaccatctggtctgcttctgttgcagcacctggtttattattggtattgaataaatgtcactacactgctaactgagacagggctattatgtacgtatctccaaaaactatttgatcataacaatacaaatgaattagtctgcaataatattcattttaatattatttacattatccatgatatcagagagtactcataatcttagctaaatgtaaatattgcctttttaatctttcctttcctatttatttcacactggtggtatatcatatagcagctgtaagattgcattttagatagttctgattgatgagaaagtctcaatgaacctcttttcagtagtgttatatatagagaaaataaagggtcatctttttttaaacaaaaaagatacagggaagctcttgatctgttctctaaatcccagtgatatctagttgcagtgacatctgtaggctccatttatcagtggccaatatgatcaagctccttttagttttattagatattccatctaaactaaacatgtatatgcccaagtctacctaaattatttaatgtcattttgaaagtatgcatgcagatacagcatgaagtgaggcatcctcggttgtacttcatacagcaaattaagttatttttatgcctagaacaaagttcattcctttgcattgattgcataacataaaatatactgagggattctcttcacctttgtggtggggaaaaggcaggatagagcctgattttcaacataaatgtatttaacctggttcttccagtgctggtctagaaaaactaggcttcagctggtgaataatgaggtgctgtgaggacccatgtctcatggaccactgtatgaggacagagaatagaatgtatgtacaccataaatctgagaaaaaagacacagtcgatattgtccttttccatatgtctgttttaaattcttgtaatgtgtaaatttcactcaatggtaagtttgtttagtttttatttatttaattattttttgagatggagtctctctctctgtcaccaggctggagtatagtggcatgatctcggctcactgcaacctccacctccagtgttcaagcgattctcatgcctcagcctcccaagtagctaggattacaggtgcctgccaccatgcatggctaatttttgtatttttagtagagacgggcttttgccatgttggccaggctggttttgaactcctgacctcaggtgatctggctgcctcggccgcccaaagtgctgggattacacctgtaagccaccacacccagcctgtttctatttgaaatctatccatttgggcacagcaaatgtttagtgagaaatgtaggcataattattttactgaaatattttacaaagaaaaatgtgctacttttgtgctatttttgtgctgttttaaaaagtgtctcccaggtcattcatgtggcccaaatctgtggcctcttaatgcattgctcataccttgaaactgttctctgcatttagatgatcaagttttgaaaatctctctggctgttccataagcatactgtttccagaatatgctatgtttaaatttacatcatttttttctttctctctgaaagaagacataatgggttatattataattatattcacagactatccaagtgctatttggctgtgtatggacaatatattcttgagtttaaaaacttagccttgcagcacttctgtgcccgtaattcttattgatttcaatgagtattatgcactcacaagagctatgagatggattattagcaaacagagtatagcccaggatatgttgccatgctttttagaaagaaatctgctatgtgttgtgctttcatactaggaagtatgaaataaagccaagcaacaggaataaagataactgaatggattactaataggtaattrttttgggaagcctctataaggttcacatctatactgtgctatattgtctaaaaatgatattagacaaaattgcttattttaagtgataatttctgaggtgaaaattcttttagagtctgtagttcagcattgggtctgagctttgctgattatatatggcttcttctcctttagctgtcatttcaactttcactatagctgctagtgaccactggttgctaaatccaatgcataattttcagtatttgccttgcttgatctttccttaggccctccatccctgttgaaacagactatccacttgctccacaacaccacagtcttatggtttttgtcccagcaattgtatttattgtcggactcctttgcagcagcatacttctctggccaggatctttctctgaccagaaaaaacctgaaggtttactctctgattgaaattgtacttggtttgtgtgattatttgattaattgtatctcttctactagacattggtttcttgagaataaatatcatagtttattctcagtccctcttttcattgtaccttctcccaatagaccttgtaaatggctttcgtgaatgctgataaacagggactcacaactttgttttttctaagtaaatacttttctgacttatttacaaactctattttccaaaattattaaggccctacatgtcagacgttatcctatatactgggaataaaataggtgacataaacatatggtccctgttctcagggaacaaatgtctggtggaggagatacaattaatcaagtagtcacacaaaccaagcataatttcaatcaggattaacaattttaagtaaatagaacttaagtgtaaggcaaaatatatgcaaagaaatttatttataccaagctggggaaatgtaaaaaaatgttttgggaaaggggtaaagaaattgcaaacatcataaagtagaagaaagagtgttatccttgaataaataaaggcaggctggtttggctggagtttaaagcacagggtagtgaaactagaaatgggagcaaaggtcagaccatccaaggtttttgtaacacatgttaagcactcaagtacttatcttaaaagtacaggaaaaataatttttaatttatacatatgcttgcttattctctataacttctgagaccattatgaacttgtggagttcacttatcagcttctttcttaccaaattaaaatgacgggaatatcaacacagattaaaactttggagtgatttttctcaaggctcttcttattctgtagcactcaaatatttgctgaatgtgcacatatttgcacaaaacacatttctttgttgtaaagtgttttctatgtgcactcaacctatagaaaatatttaattcttgggagtaaatttgtatgcatgtatgtgtagggtgtagttctgctggcgggggagtgtgtgaaggtattgctagaaggaagagccatctcagaattttaccactctggggtttttactgttcagatctatcttggtttgttttgtggtctataacagaataccaaagactgtaatttataaagaaataaaatttatttctcagagttctggaggctggaaaatctaatatcaagaggctgtcatctggtgaaggcctttttgatgtgtcatctcatggcagaaggcaacagagtggatggccaggggactgaaactcacttaggataaacccattcccacaagaaagaacccactcctgtgataatgacattaattcattcatgagggcagagccctcaagacctaatcacctcttaaaggtcctacctctcaacactgttgcattggggattaattttccaaaacatgaactttgggagaaacattgaaaccatagcaagggccattatggatagtctgtccccaaagaagagtcattttcaatagccagaaaatgagccatagatccatgatcatgaaagaatgtctcagaatctgagtgtctaggctaagtcaggaatagagatatacatgggtgctacaggagtttttttttttttttcaagtyatacagttcacattgaaatacaaatgtgggcagtgccaatctttgaacagcactgcacagcagaggctgctagtaatgacggaagtacacctatgggactgtagaaaacagattttaaagtttctgcatgattaggcctttttgaagaaagaaacctggtaattgggttaaaggaatcaccttggaagttaaaggatggtaagatagtgacaggctattctggagagattcacctccctgaggtatgtgtttacattacatggagggatgaaacacaggaccatggagacattttaagggttgtaaatccagaaggattgtcttattttattcctggagacccttatttctgttccaaagtgttaagaagccaagaacctagaatctctcttctcaagagaatttatttatcctacagagcaaaggtttttctacctttctcaaaaatatgtatataagttcttagatttagaacctctgggtccttctttgttagtgtcaaaatgctcttttgaatgtaaagtcctgtccacctgcctyttgtcacatcacactagaaagtataatattctgacttgatccagaaatctcactttttgcattcaatataacatgaataattctggattaatgatcatcttcctcaggcatacaattcccagcagtcttgtgggatatactttctgaaggtcatccgctagggggtcattgctatttacactcaagctatgaaagtggagggtcctggtccttcagaaaggtaggcaacatcttttgggaaggtgaacttgatttattcactcaattctttttcttttgaaccactgagagacaatgatgggccagttacttgagtgtgttatcctgctcagaatcaaatcctgtgtaagaggttacaggatgagaagacgtagaaagatgaggagaggtagaatgctacaaacgaaacatgcataagggacaaggaaagacagaacagattcaaactcacattttgctgacttgcatataggcaaatgactcctcaaagatttcttatgaaccatgtccaggagacattaactgagtagtggtttgtgaggaaagcataattaatctactaaatagattaattatctagtccactcagaccataaggcttccagactgatgtcaatggcactctatatctcagagtagcagagcattctcaggtctaaaagactactcttccaacagacacacactttcgtttccatcagttgaattatatgtcaactaagattcaayactgttcccctggatgaagaattcttgtttgacaggtttgtttttatttctctgccccaggactttgaccttgtcatctcattgtattcctgcctctatggtttttgatgagaaattgcctattactgttattgaagatccttcatatatgataaatcacttctttgctactgatttcaagattctttctttgttttggctttcaacagtttgattacaatgtgttactgtgtgtctttttaaatttatcttaactggaagttgttgagcttcttggctctgtagtttcacatgtttcttcaaatttggaaagtctttggccagtatatctttaaaaattattttcctttttctctttctcctctctttgtgggactgccattttaagtatattggtgcactctattcagaaaaaaataggccataaaaatgaaaggaaaatttaagacaataccagataaaaaattagagaattactcatttgtagaccttgtcataaaaatattaaaggaagttctgtgggctgaaaaggaaagaatacttggcagtaacacaaattcatatggaaaataaaggtaacatatacctaaatataaaaatacagtataaatttatttttacttgtaattatttttcctactatgtaatttaaaagaaaaatgaagaaacaatatatatatatgtgtgtgtgtatatatatatgtatatgtgtgtgtatgtgtgtatatatatatatatataaatctatagtaactaaaacagtatggtactggcttgaaaacaggaacatagagcaacagaacataatagaaagcccagaaataaaactaagcatatgtagccaactcattttcaacagtggagccaagaagacacaatggggaaataaatggtgtttggaaaactgaatatccatatgcaaaagaatgaaattggactcatactatacacaaaatcaactcaaaataaattaaagacccaaacataagacctgaaactgaaaaactcctagagaaaagaggaaatgctccttgacattggtcttaacaatgtttttttttttttttttgatagaactccaaaagtgtaggcaagagaagcaaacaagtgggagtaaatcaaactaaaaagcttctgcacagcaaatagtcaacaaaatgtaaaagcagcatacggattaggagaaaatatttgtgaaccatatatctaattgggtgttagtatccaatatatatgggaattatccaacttgatagcaataaaaatgaaaaacctaatttaaaaagtgagcaaaggacttgaatagacatttctccaaagatgtaaaatggctagtaggtatatgaaaaggtgctcaagatcactaatgatcagggaaatgcaagtcaacaccacaacgagatattatctcacacttgttaggatggcccttataaaaatatcaagagataagtgttggtgaggatgtggagaaaagggaamcctgatatactcttggtgggaatttagattaatgtagccattgtggaaaacagtatagctgttccttaagaaactaaaaatagaactacaatatgaccgagcaatctgggagtcattacttcataatgatacctacactctcctgcttattgcagcattatttacaatagccatgatatggaagcaaagtattgttacccattggataagtgggaaaataaattgtggcacacacacacacacacacacacacacacacacacagagaccccccctccccccacacacacacagaaaatggaatattattcagcttttaaaaataagaaaatcacctagagcacattatgctaagtgaaataagccaaatgcaaaaagacaaatatcacctgatctcacttatatatggaatcttaaaaaaaaaaacaagaaagactacaaagaaacagagtagtatggtggttaccaggggtgagggtggggaaatgggaagatgcaggtcaaagggtacaaaattgcaatgatgcaggataaataagtctaggaatcaaatgtacaacatgaggactatagatagttaataaaaggtaagtatgctagtacacttgatggtatcttttaggtttctggggcactctgttcattttcctttattctttttacttctgttgtcaggttaaataacctcaattgatctgtcttcatgtttgckgattcttttttctctccatttaaatctggtttggggcacctctagttaattttcaagcttagtgatagtatttctcaactccaaaatttctagttggtgattttctatattttctgtctctttatttctaagtctttgttttgtgagacttacttccataattttctttgaacatattcaaaattgcttaaagtctttrtttagtaagtccaatgtatgagcttccttagggacagtttctattcactgctttttttctccctgtgaatggccctttatttgtttttctcataattccttattgaaaactagacatcttaaataatataatttgctaactctctctgcctccttttcctatgattggtttttgttgttgctgttgctgttgtttatttgtttaatgactttcctgaattagttctgtaaaattagcattctttttatgggtggacactaaactttcttattggttaacttattagttagctaaaaaattgatagagattttcttacaggctggaaccaataagtctcccagcttttgctgaggagctcagggtgcacgttgtggtacaccttcaattcccagtcaggctgcttgcaacaccactttaggcctcacttcctgcttgcacagaagctcaacatcatctagagatgacagcatgacagcatagggccttctctagtttttcttgggcatacacaaacttgtaagcgttaagtgtggcattctagattcccaggattatcacagaacttttctaatccacctatgaataactcattcctagcttttccttttttgtggttgccttgttgttttttcctaactgctgtcaccagttcagctaaccacaatatttaacaattgctgctaattctttgtagtaactgcctacagggaaacagctttctgcactggataagctctgacttagctcaagtaacaagttttgcacgtgggattttccagggaacaagccaaatatttttgcacataggattttccagaagcaagtcaaataatgacagttgcttgggaattagattttggaggagctctaaatctattctgctccctccaggcattgctacacttctggtttttactatgatcgttgaactgctggttttcaaggcaatcacaggcttggagagagggagacaatattggggcaagttaaaacatcacaaaacttcatgttttaccaagattcagcgattatttttctaataaacattacctatataattgaaaccttttgcttaatctccagagtcctaaaaaagttgaagttcaccttttttttgcagtgttcttgttgcttttatggagaagaagatttttggaagtaatattgggattactgctgcccacaacgacaccaaattcttgatagtcttcattgatgtttaacattgtttgcacaagtagttaataacaaatgtcctgaatgccttttcttgactggataaaaccataaaaccagtcttgacaataacctgagttcagataattttatttctttaaattatatttcagagtgagaattctttaaatctcttattaacatatgaaatgttgatatatcttatgataatgcagatgaatttctaatttaattcagttggaattatcaatgtgaagcatcaagtatttaagaaaatgatgaagattttctttaagcatacacattttaagcatacttatcttcttaatctctccttaagacttaaattataacactgacatcactagtgaatttttccaaagttgaatttttactttaaaattgtaagctttccaacacacactcatctctctctctctatctctcacacacacacacacacacacactcacattttattttgtttttaattgacacataataactgtacatatttggtacagtgtgatgttttggtacctatatacattgtgtaatgatcaaatcagtgtaattagcatatccattgcctcaaacacttgtcagttctctatgatgagaacattcaaaatctctcttctagctattttgaaatacacattagttcagactatagttaccttactgtgcagttaaacactagaacttattcctcctaactataactttgtaycyattgaacatatatatttttatatgtgtgtatgtgtgtacatatccgtgtatatatatgtgtatgtgtatatatatatagagagagagwgtgtgtgatgagagagagatgtttgtgtatacatatatataagtatacatattcacattgacaatatactttatttgggttcttatctaaatattagataagacattttaaaaaatccacaactacccttcaaaaaaatctgtaaagtattacccatatataatttttactttttggcttgtaaacttcagacaaactttttttaattaaataatacattgagacactcaattttgatcatttctgtaaagctgaaaacctacaggaacctgggactttggaattcattagattcactaatgtggtaacattttagacaaattttgcgtaggagagcaagcttctctgtgaataaaatacattactgaaatcttgatattttcagacagattcctgatgtaaagttttatgtctttctgtcatttttsgtgcagtattattatatagatttttttcaaatgcattgttttcatgaattcatttataacttttaatagctcatttcaatattttgttacttatggaggtacaaataatgctctttgaagcatttttaaaaggtatcctaactattaagtgggggtaaggttatatctgaataatcttcagaacttttatttaatattgctctagattactgttgtctctggtatttaccatcctccaactctatctactaattgtgttattcaaaagtgatgtttttctctatttatttaccgaaattgttattgctattgtaaataaaaacctcattgtttagtacattgtttctaacttagtaatcaactaatttagaagattcagtaggaaagataggagaggtcttatatgttatacccagtcaatagctatgctagtggtgagtgctatgcacacagttgcatgggacatgacaataattacttcatttagaaagtttagagcaaggccgtacaaaaatactcttccagtgaatattcaacaacagtctaattcatgkcataacagtgttgttctgcacatcagatttctctgaatacaaatattaaaagtaaagagataaataaaggtgtatctggtgaacactacccataataatacttatgtagttaggacaaaatgcattagtaggaataaagagtatgaatgaagagagtcaatacataatgataagaggtttgatttgacaggatgatataacaattttatatctgtactgataagcacaacattggctaaaagtatacaaaggaaatacrgaattaaaagattaagcattgtcacgttgttccaatgagaacagtctgaaataatagagtccaggaaaagactttcatatctatggaaacgtgatttatagtatagagttaacgttgcaaaacaatgacgaaagatagacttcttaataaatgatgctgaaaaaaattggttatttgtataataaagggatttatctctttcttagaactgtacaacagtagattctagattatttaacatttttaggttataatatggaacaatacctatattacctcagaggcagagaaagttttactaaacaaaatataaaattgtataccataaaaataaaatttaggtaagtttaactacattaaagttaaaattttctctttttttgtttttgagacagagtcttgctctgccrcccaagctggagatcagtggtgcaatcttggctcactgcaacctctgcctcccaggttcaagtgattttcctgcctcagcctcctgagtagctgggattacaggcgcccacccccgcgcccagctaatttttgtattttttaatagagacagggttttgccatgttagccaggctggtttcgaactcctgacctcaggtgatctgcccaacacaaagtgttgggattacaggcgtgagccgtaaaattttcttttataaaaacctcatacacaaaatacaagttataaagtgagaagatatttgcaacatataattgataaagaggtagtatctagaatatattaaaaaaacaccttcaattcaataaggtaaaaagacaagcaaactgagaggaggattggaaaaagccaaaaaattgaataggcttttcatagaagatgaaacacaaatggcaatcaatgataaaaagataattggtatataattggtatcaataaaacccacaaaagattccttttactactaaccaaaaagaaaaaaagtcacaatgtcaagtgtttaccaactatgtcaaaaataaatcaacatttaggtaaaaactctcgaaaactgctgcatttgtaaatcaagaaatatgtacaaaaacattcatagaaacattactgagaaaagccaaagtgttaaccccaacccaatgcccattggcatagtataggttaatttttattgatttgtataattgaatagtccatagcacttaaaaagtggaaattgataagctacacttatattcagcagtatccataaatctcagaaaaaatattaaatgtaaaaacaaggctccaaatgatatattcaatttaattccattatacaaagttataccttcacgataggttggattttattgattgaggtaagagaaatgcatatctcatacagagaaggcaatgaataaaaggagacagaagttatatacatatatacaatatgggaacacatgggcatggtgtgtccactgaactttatttacaataaaactttatttacaaaagagatagagagccagatttggcccttggcttatgtctgtccaaatcctgtgctagggcatggactgtctaaaggtttgttctgtgctgtttttcttcctgtgagtagtttttctccagttgatatagtagccattttgtgattttggaatataaatcccctttcttgatggatttcttccctcctctccgaggaaatgtgtgaaaagtcctctgtgatagtgaacactctgctgggtgaggcctctggagccagactcccgagtgagagtccatttcatcacagtgtggtttaaagaaaacgcacatttaatgttacgttcaccttcacgattttgactcagggtaagtttgacacataatagagtaagtaataaataaatttaaattattatagaccatggtttcagtcttgtgactgactttgttgttcacgaggatggacattttgctttcattttaggatcttaaattatttcttttaaaaaaaaatcatctttttttggcattaagatcctgggagtttggccatgttgttaaaaagtagacagattgagtggaaaaagaaaattccacacattggaatgccgtattttgaagtacatgggtcttggcataatcagtcttaggaaccacatgagatgttcttatttagaaataaatgtatccggccrggcgcggtggctcacgcctgtaatcccagcactttgggaggccgaggcgggcggatcacgagatcaggagatcgagaccatcctggctaacatggtgaaaccccgtctctactaaaaatattaaaaaatagctaggcgtggtggcgggcgcctgtagtcccagctacttgggaggctgaggcaggagaatggcgtgaacccgggaggcggagctcgcagtgagccaagatcgcgccactgcactccagcctgggcgatagagcgagactccgtctcaaaaaaaaaaaaaaaaagaaatgtatccacaagcaaatgtatgagcattcttaccttaaattggagatcattcatgactttgaggctcccatacttgattgtaagagattatatttacaaattacaaataaatgggaccccataaaatcaaggattaagtatggaatgggaattgttttattatttggcctgtgttttacaaatacttgttaggatatcaacaatacagattattggtttgtggattatcataggacatttttacacaacattagcaattgcaaaattatctatatttccagtttgaacaatatgatatcatcctgttatttcaagcaataataataagcctaaggggaaagtaactggatacaacaataatgaaaacatgcctaatggtttggggatttttaaaatattatttatttaaatggctttaatgtaactgattagtatgtcaaagaactataatttggaggtagatttaatctcttcttaagcataccaactcaaaaaccaaataaataaaaataacaattgtaacactgaaatgtgaatattgtacacttgtctgatgaatttagcttagtaaatacttctcagggtgtgttcagtgtacttagccactgtgcaaataccatttgcaggtatgttaatgagctttttaataataatggggcttttacaaatataagctttcaggttagcactctggaaggaactgagggtgggagtgtgtagctttggacaaataactaaaaattatgccaagagaatgagcatcaaaggcctagcattacctgtcatttctattaacaaagaaagcaataataataatagagccccaaaagttattgtattatttgaaggtgaacaatgttatgtttttgtattttagagtttaagttctgaaactgtgttacattttatttaataactgacaattctgcaaattggcagcacaaatccaagtactgaagaaaattttatttcatggtttacattaagtagaaaatataaatgtgattgaactaaaagataatgaggagaaaacataaataagttaacacaacggttactttcttttaaatttagtgaaagtttatgaatataaatttctcattttgaagtccacataagtctaaatgactttttactttgcttttgtactcatagtgttttgagtcagcacacttacctctaagtgatccctgaatataaattttcttaccatcagtcaaatcctctttgcctttttatacttggactagaaatggtccatttggatgacctagtattttcatatggtctttaatttatgatcacaacttgtatttatgtaagtggccactagatggcagacctaccactaaacagaatttaggccggaagtaaattcttcaagtaatgaattacacagcagagtagtgtttcacttcaagcttagctcagattctcaggctaagcactctctattgttttagggaggcatgctaatgaagatgacgtaacatttttacattcacttaaggtttaatagtttacaagtttatgtaacttctcagaataatcttttcagactgataagcactgccatattgcggatgaaaacrtgagtttcccagggcgtatggcaaaggttatttcttgtgaaaactgcaaggagacaactttgaagaattttgcttcagggctccagaatttaatgacattactttttgagatgtattctgggagaaattggttttgtatctgatatatattttctgcttatgccctctacctttatgtttccaaaagaagttcaatccctctaggagcccggagaatcaattagagctacaaaactcttccctcctcaatgatactgacctctgacatctttatgttctcttgccctttggattttggagcagaattatctttatccagcttcctaccatttcatcttttgtattcactaaaacctactgtcaccatcacttagattgcctcttgatttctgatgttcagcactgggctccagctcattttcggcttttgaaaataggccagcagttttctaaagaactaacagtgatcttttgcagaaattagaagtgtgtttatgtatctgtgtgcacacacacttccagccaagcaaagcgatatgaaatgattcctgatgctgcttttatctaattggcagcatacagccataatatgccgccattaggtcagcatctctagggttcagaactaacacttttaagttttaaaagcaaacttaattttttataaatttctaagatagaaaaaaagcaaagctggcacatctactattcaacccatactctttattcaaattacaagtttatactctagctataaaataccctgaccacaggataaaatttttcataatagacagatggtgaatttagaagttgcctctcatatatagaacattgtattgatgtgaacacaggaatgaaactgtatcttaaaaatattttagattacaagcatattatattttgtctttcttattaccacagcartataagtttcccgtagaaaaacttaaaaatttaaatgaaaaatggaaaaaaaatctcaaaaacctagaagagctttcctttgtgattgcctttatggagatcctttcagagcttgcaaattatttatttagccatttatctttaagtagatctatttattttgagataactatagatttataggcatttataagaaataatatggagagacccaacaataaataacaccttgcaaagcgatagtacagtattccaaccagggtgctgatattgatacaattaagatacaggcgattttcatcaccataaagattgctcctattgaccctttatagccacatatamttccctccaactcccaacccttcctcaaccagtgtcaaccattaaagtattctctctacaatttttcatacagtatatagcctttttggattgactttttttcactcaacgtaagtctggagattcatccagattcttgcatacgttagtaggttcgtttttttaattgctaagcgagattccatgatatggctatactgtagtctgtttaatcattcactcattaaagcatatcaggatgtcttccagtttggggctattatgaattaagctattataaacattaatatacaggtttttgtggtgaacatagcttttattttctctgggataaattcccagaaaggcaattgctgattatgtaatagttgcatggttagtttttgtaataaagtgccaaactcttttccagggtggttgtgtcattttacattccaattagccatgtatgagtgacacagtttctgtgtcatcactaacattgggtgttgtcattattatttattttagccattctgataggtatgtaatgatatttcatgtggctttaatttataacttcctaatggctaaagatggtgagcaaatttttgtgtgcttactattcatatattctcctataaattatctgctcatgtattttatccattttccaactggatttttttaatgttaagtgttgagaggtctttatgtattcttgatactagtcctttgttgatgttgtggtttttaaatatgtgctccaactctgtagcttgttttttgaatcctcttaacagagttcttcacagagtaatataatctaatttggatgaaatccagtttatcaatttttccttttatggtatatatttctgctgtcaagtttaagaactcttaaggggtgtgtgtgtatgtgtgtgtgtgtctgtgtatgtacctctctctttctatatctgtgtgtgtatatatatatatatatatatatatatatatatatatatatatacactttcaaggtttgtagttgtatgttgtacttaataaactatatccctatatatgtgtatacacatatatatgtgtctgtaatatatacacatacatatacactttcatttcaaggtttttaattgtatattttacttaagaaaaaaaatagaggaatgtatacctaatccatctctctagcagaagtcctgcaaatttgtttttattttacaaaagagaagctaatttatatttagtttttcaagtatgatgtcttcatgcataactggaaaagttgaaaaaaggattcaaaatcaggtaagagtttataaaataaaattgtaggatctttgcattaatatacccagtatcatatcattaaaaataaaaaatgttagctaggcataaacattacttcattgaaatatgcctgccttctggacatgataaatgttcatgaaaaaagaaaacaaaattatgaaaagaaatatgcctgccttaaactaaattttaccaataaccaaattgaatatagtttaaaaaagtaataatcaaaaatgtttcttatttracaaatagttggaatgtttacattatgcatagattttttarttacccatcgatgttctaaaggcactttttatcaaaatggcctacttctgactagattctgggtaaatcacagaatatttaaaacatgtatataggtacccagtagaaataattcatattcatataaaatgctcacttacgttttggtatgtttagtataaaataactgctactgtttgtaattagaacggtaaaattcttcagtctagggctgccaatatgttgcaaagctcatttttaaaaaatcattaacaaaatcgctttttatcgttcgtctagaattcaaaaagggagattatattggtctcttttttttcaaaattgtgatattttcttccctgaaaaaartagatccctccaaaaatgcagtgttgttcttgaaataaagaacaaaatttttaaaaatctggtgcatttagatgtatgtttctactcattttttggacctagtgaatcaaaactgattattttcttactttttatgaaaatatcttctctcatttttgcttctaaccttaaaatccaggaaatttggaaaattttatattgatttctttttcttcagtttatgtaaacagatttttaaatgtatatttgcatttcagtgaaaataaagaggtcaggaaaagcttaaaaatctttagagctttctggcacacttccccaaaacattcaggttttcagcagtaactggttagatttaggttgtgcgtgggtgcatgtttattctgcattgtgagtgttacacggatttaagcctttagagaattatgttaccgtctgatccctccttcgcttagttctctaagttcaagagttccttttaagtaagaacacttttttttttcccttaagaaactatttgcagtttcctaagacttcagtgatttaaaaatatttcacaatcatgaggtcagaacagggtttatgtaagcctctgccttagtctgtttgggctgctgtaacaaaatgccataaaccgtgtagcttataaacaacagaaatttatttctcacagttctgaaggctgggaagtccaaaatcaaggcatatttggtgtctagtgaggttctactttctggttcatagatgacacttcctggctgtgtccttacatggtagctagctctctggggcctcttttataagggcactaatccctcatgacctaatcaactctcaaagccctcaacttctaatactgtcatcttgtggggtaggattttaacatatgaattttagggggacacaaatattcctctgctttttgtgaatttttgtgaattttacatatatttaagacttttaaagaatagtaagttactatctgatctctccattgttcaattctctaagtttaatagttccttttatgtaagagcatcttttttcataagaaactatttgcagtttccaaagacttcagtaatttaaaaatatttcaaatacataaggtcagaacaggtttatgtaagcctccatttgcgtgtctaaatgatggttttcagaagcattatcctttctccttttctttactttcagaccatcaactgtcacattctcttaagaatctttttacttcttcatttaattgtataattatactctttcacaaatacatgtgcrcacacgtatgtgtgtgcacacatgcacacagacatcaactgaacttgttttaaagccrgtgctatggccacaatgaaagggctmtgcagatttctttacaattataatgattatcaccaattacgtttcctgaaatacagaaaataaaactgttcacattttatgattaatctccagctgactgtgatagaaaaattacctaattataaaagctgaatggaactccaaagaattcttgagcttatccctgtgttagactattgtagagttgtcagcgcagataattttgtaagcatgtttttcattgggtcagcatcagcataagtttaacccatgataattcttttgttatgaggcactttcataagaaatttctgaataatggcatttttgtggttctttaaataaatatggttaatgaatcctgagtgttagcatcagtctaaaggccagcacctggaagggaaattaatctgcagaaagattagctgacagtaaccatatagtctccattgtgactggtgagttaagcagaaaatcttgtccattgacaataccctcctctcaccaatagctggtgtttccaccaaatgtctcaagctcctacccttttgttatttgtgttaactgcctcaaaagcagtccttcaccctgactttttggaggtacccacaccactgtttacccagctctacctggtcagtgtttggtgatatccctgtcttttaaatgcatatccctacactgcatccactggtgttgactcgactctattttctctgaaatggtattttatagtaacggaagttgcacattctacttctatacctattctattcatagtctgtatctttcttattgtactctgcttattctattccctcagttgtagaagaaaagagatatatacactccttgcaagatctagaaggagcatggatatgagcaagtcagttaacctgtcatggctttagctgagggttgtgagtgtgtgtgtgtgtgcatgtgtgtgttgattctgtggggccgacatagcagttgccacatagggtcattgttggggcaaaataagatatcatgtagcttctaccccaaggaattgaaattggtatatgattagctcatggtgaaaatgaaatcttgtaccttctttctcaatatctgaggcaatgacacattgattatcatttacatatattttatctgacatggtgttctaggccaagcattactactgcttgtgtgtgtaactttaagcaaatcacttaaattcacgggttgaatttttcatttgttaaatgaaaatgtaacaaagttcatgctcctattggaaatgcattgaagaacaaaggagatagcatatgtgaatataccttttaatgtatgaagcactatataaatacatttgtccctcagtatacatgggggattggttccaggacccccatgtttaccaaaatctatgcacactcaagtcccacagttggctctgcagaacctgtatattcaaaaaattagccctccctatcgaatcctatcaggtttcacatcctgcaaatactctattttcgatccctgtttggttgaaaaaaagttgacatataagtggacccacatagttcaaacccatgttgttcaagggtcaactgtatgttaatttaattaaaatgataaaagtagaaatataattgtacataccttctttgaatgcctactatgtactagatgcagcgtcagtgttttgcacataatttaaatcttgataataatcatatataattgtatatatttaaaattttcagttatgtaaaaatgcacaataatattgtaaagaaatatattaaaaatttggtagtagttattgctaggtagagttattttctttgttatattttaccattttccaaactttttccaaaatgtctctaaataaaatatttgcatagtattatactaaataagagcctgggccttgggatcaggcttccttagactaaaattccaatccgcctttttctagctgtgtgagcttgggaaagttacttaactttgctatgcctcagtttctttacctaaacaatgatcagcatagcaatatgtcacaggactgtagtgggtactaaatgaagtaatgtattgaaagcatcagagtgcctagaacagagaaagaggctatttttttgagactagggacacggattttgaagtgagactgcctggctcctaatcttggcatcttcagcttaccagctgagcaagttacttaaaatctttgtacctcagtttctgcttcttgttgtatgcttataagagtacctggaacatagtaggtgctcaatagatgttgaatgcacaaataagttgtagctatgaatataaatatggttatttaaatattaaaataaaaaatatgtacctaaattctctgtgttccttagccctcccattaccacatttgctctctcaatgtactgcaacagtcttttttgattttttttgagatagggtctctgtctgttgcccatactggagtacagtgacatgatgatggctcactgcaccctctacctcccaggctcaagtgatcctcctgtctcagctttctgagtggctgaaaatagaaatgcataccaccatgcctggctaatttttttttaatgtagagatggagtctcattatcttgcccaggctggtctcaaactcctgggttcaagcaatcctcctaactctacctcccaaactgaaaaactcaatattctttgttaccacattaaatactaaatcttccatttaaatccttgttgatcacctagaacattcgatattgctagacatctcctcctccattgaactttcttgtcaattggcttttatatctgtgttgtttgctgggttttctcaaaatatctcatactctaccttttctttttctaccccttcttttgcctgaatgcaaacatagatgttttttaaggttccacaactcacttatcatggtaaatgttcaaatgtattattcttattcacttagtgaaacccttctaatagattaggatgtacatgaaaagatgtgctttttcataaaattccctttgcttctcctcaactctctcacaaccacctctgaatttccatagtcctttgtatattcccctttaaactccctctctcaggctccactgggtcagtgtatgcttttactgtcttcttaattgtgcattatttgagggctgtaaatttgttgtatctatctcggcatcacccaagacagctattataatgccttgttcaaattagatgccaagttgtttttattgttgttgtttgctcgtagatgtgtttgttttgaacaagtcatctaattaaaatgatgaaattttttgtagctcagggtttagatatgaatgtgaggacaagctagctgcaacacaggctccagggttcattcaactaatgggttaaggaccattttcttcttcactgtatatgaattcttctgaaggtgattgcttgataaaacaggtatttctttcctaaagaaataccatcaatttatcatagatgcaatgaatgaaaaattacctggaaattttctcgcaaataatggtcatcaaaatcaaaaaatcataacaaaatgtctgaaataaacaagaaaaataaatatatatacacacatacataaaataatatagataaaataaacaagaatgttaagtctaaaattaaaaacaaacaattacataggataatgtaaaacatattcaattattcaggttacaaaagttctataacttacaggcagagagttaattgagccaaatactaaattaagttttgtaattatacatttactgcaggaaaacaaaggctttgctaaactaatgaaaagatcattacataaatttgtgttttctatcaaatatagaaactctatatttttaatcatatctttcacaattatggtttaaaaaatagtgagtttcttgctgctctctcatttggtcatatacttaaactttcaggaagcatataacatcaatcatataaattagcttttcatctcataagggatacatgtaattcagggcaacaaaggacaagcaaagtactgtgaagaagagatcaaacaacgccagtgtattttatcaataagtgagcatacttgctctttgccacctgattttgttcctaattccattagcgaaattcatatgagatattagaggatgatatagatattgacactgataatagaagttaagtctgtaatatgaaaatgtttccagctgcccagcagcattgatgattttttttaattttttttgttccctcatgatttcatggtttaattgtactaagtatgtaattaaattttcaataaatccagggtctgccattcttcatcacaccacctgcaaaatcatggctccaagtttcagctaattccatcattagaaccagtactgctcgatttcttccatacttggctagtccaaacctggatgagcctaaccaaacaacagtttttctagaagctttgccaagcaggacatcataacgaacacatgcttaaggtccatagattgtgcacatttaatttatgtcattttttatattaaattttttttttttttgagatggagtcttgctctatcacccaggctggagtgcagtggcgcgatctctgctcactgcaacttccgcctcccagattcaagcaattctcctgcctcagcctcccaagtagctggggttacgggtgcccaccaccatgcctggctatttttttattttttagtagagatggtgtttcaccatctctggtgatccacccacctcagcctcccaaagtgctgggattacaggtgtgagccactgtgcccagcccaaagttaggatttttttttttaaataaaggctagcatagttagttttttgtttgctttttaaaattaagattagcctaatttacaaactttacaaggacttacacatattatggttccttattttctttcaggtcattgtgagatatttcttttttttggagatagagtcttcctctgtcrcccaggttggagtgcagtggctccatctcggctcactgcaatctctgcctctcaggttcaagtgattctcgygccttgtcctcccaagtagctgggattataggtgcctgccaccacacctgctaatttttgtatttttagtagagactaggtttcaccatgttggctggggtggtctcaaactcctgacttcaagtgatccacccacctcggcctcccaaagtgctgggattacaggcaagagccactgtgcccagccccttgttagatatttctttcagttttttcacacttgctgtttcatctgctagaaggctcttgccttcatatgttcctaactacatacccttcacttttacccagtaacttttttttttttttttgggtaaacattgctttctctgaagcatcttctctgatctatataactagactaagccttttatatgcagttttccctacttggtgccttttttcttcaaagccctatctcagtttgtgatattcrtttctttgcatattgtgtatatctctctttccaagtaaacactaagtctgtaaggattttatctgtttggatctgcattgtatctccattttttcaaaacattgcttggtgcatggttggtatcagcagacatttgttgaccaaatgtagtaatgttttattcaagaaaattctaaaagatcttgatatgtaaaacttcaaatttttcagaagcatgcaatctagtgttttattatttatgaatttgtggaaataaagttctagagaaattgccttcttgaatgccatatttctgttgttccaaagtctctgttgttcagagctattctaccatctaaaaaaaaaaaaaaaaaaaaaaaaagacaatgaggaggagaatgcaactggattctcatctctcaccttatacaaaaatcaactcaggatggatcaaggacttaaatctaagactgaaactataaaaattgtagaagataacatcagaaaaacccttctagacattggcttgggcaaagatttcatgaccaagaacccaaatacaaatgcaacaaaaacgaagataaataagtgggatttaactaaactaaggggcttttgcacagaaaaagaaatagtcagcagagtaaataaacaacccacagagtgggagaaaatcttcaccatctatacatctgacaaaggactaatatccaaaatctatggaactcaaacaaattagcaagaaaaaaccaaacaatcccatcaaaaagtgggctaaggacatgaatagaaaattcttaaaagaagatatacaaatggccaacaaacatataaaaaatgcacagcatcactaatgatcagggaaatgcaaatcaaaaccataatgcaataccatcttactcctgcaagaatggccattatcaaaaaataaacaaataatagattttggcatggatgcagtgaaaagggaacacttctacactgctggtgggaaggtaaacagtacaaccactatggaaaacagtgtggaggttccttaaagaactaaaagtagaactacaatttgatcccagcaatcccactgtaggtatctacccagaggaaaagaagccattacatgaaaaagatacttgcacacgcatgtttatagcattacaatattcataattgcaaaaatgtggaaccagcccaaatgcccatcaaccaacgagtggataaagaaactattatatacaatggaatactactcagccataaaaaggaatgaattaatggcattcagagcaacctggatgggactggagactattattctaagtgaagtaattcaggaatggaaaagcaagaattgtatgttcttactcaaaagtgggacctaagctctgaggatgcaaaggcataagaatgatacaatagactttggggacttgggggtaaagggaaggaagggagtgagggataaaagactacagattggcttcaatttgtactgttcaggtgatgggtgcaccaaaatctcacaaatcaccactaaagaacttatttatgtaacaacaacaacaacaaaaatagacaattaattggtacatgagaaggaatgcctggagcaacttaagaaagaatagatgactgttaggaggtgagggaaaagtaatttctaagcaattagactgtactttctatttggactataatctctagtgagggaagaaatcatatctttgaattctcagacccattatagcaactgaaatatagaagtcttcttttgtcaattattattcaacaaatatttattgacttttagctgccaattgctagtctagatattgattatatggtagagagcattagttctatgattttccagggacacaaatctacaaagactggagaataacaaaatgatattattgcagttactagtaagtactataatataaaaaagcaccagtaattggatagctgttgttggatgacaaggtgctagtttagatgagctgatcaaccaaagcttcattgaggtagtaatacttgcactgaggtctgaatagtgtgagagtccaacatgtgaaaatctaaaagaacattccgggcaaaggagagtatagctattactattctgaggttataatgagtttggcttgctcaatgaacagaaaaaaaccactgaacgatagtgtacagtaagccataggtgaaatataaaagatgaggttgaaaagttaggcaaaggccagactatgtgtatttttttaaaaaaaataataaatggataccttaactagatgagtggacggataattcagtggcctactagaaacggtggcattgcctgcctatagctgtggctctcattatctttcaggatgtcacttcacaatatggtatggggagtttccatttgtgacacaatataagaactacaaagtaatagaagtattaaattccagtagaatagacagctcacagttatatattgttcatcaaaaataaaatgccaaaagctctttttaatgttgcatgagatcatgtccagccttaagcaaagtgactctggcacccataggaatgcacctcttagatctccaaccacaaggagggcaattggccaagagctccagctgtcatgctctgaaacccatgattgcatctatgctgaggctatgtctacatttcccatgggctgtgcttagccgatgactaggtgtatctgggatattaaggcaggccaatttctggacacacttgatgcctctggtggctacctgtgccttgggactcctcagtaacttcacttcattttcctcaaactgcacagcagtctaggaagtttgtacccaatcatcctttcttctctccttcactcaggttaataatttcatcatgatctgactgttctcttagccttttccagcttcctcctgattttaatcccatgagatgtctgcttctcagaggayatagattaacaaagtaataaagtagatcaacttgtttttgatgtctctttaaataactttctaccttgccaaaaattaaagtaaaataatattataaacattcttattttccatgattttgatttaacacaattattagtcaattaaagatcctacttctaagtaggaacttcaaaagacgttaaaatcttttaaaacgattcatttgtacttggtggtctattaagccccagtgatctctagggcagatacaaagacattgtaaatctcacaggaaacttaacgtttgctgtcacatttgtaaactatttagtttttctaactgcttcaattcttatagatttgaagtatattctttagtaatctaacatataattttttttctatttgcctccttttaaaataataattgttggcagaaaggtggaattacctgctttaaaagtagaacattttatcacacttaatctctcctcttttttacatacagcacagtgtcctatgtccctttctcttatttcatggtaccttttctttctgagaggcatatgtgactattttgtttgtgaaaggcatattgcatgttacaatacttcagtttttagaagcaaatgaaattccttcaagtctaaattgctctgccttactttccagtttcctttataaagtgacatcacctttttcttcacacctctccaacctcccattgtatctccaaagctccactcctcccaccaaactcaagcttcctgaaatgtcccttactgttacatgaactctatcgacacctgttcctgttttatgtatcctttaggacacattgaatatttttctttttctgccatcatactaactgatcacactaaccttcattcaccccttcaatttaatcctattttaattttttttgctgttataatagttaattatgtgattacttctctagttgtttcatgtttccatgttttgattatgcctcccacattgtcacatgagatgcaaacttcgaaaatatgttatgtaccacatagagatttggaaacagctgaactgagactagattctacctctgtgagttaccagttttttgctttttgtttttaaccatagataagctacttaatctttctgaaacttcttcttttttttttttttttttttgagacagactgtcactctgtcccccaggatggagtgcagtgcagtggtgcgatctcagctcggttcaaactctgcctcctgggttcaagcaattctcatgcttcagcctcccaggtagctgggattataggtgcccatcactatgccttgctaagtttttgtatttttagtagacaccggtttcaccattagtagagacaggtttcaccatgttggccaggctggtcttgaactcctgatctcttggactcctgatctcaggtgatccggccacctcagcctcccaaagtgctgggattataggtgtgagctatcacacttggcctctgtgaaacttttttcttaaaaaataatgcagttaccttcttgaaggttttgtttgaggttcaaatgagataatttctgtgaaagcatttttgaaaataaattttatggctgggtgcggtggctcacacctgtaatcccagcactttgggaggccgaagaggatggatcacaaggtcaggagttcaagaccaaggtggctaagatggtgaaaccccatctctactgaaaatacaaaaattagccaggtgtggtggcaggtgcctgtaatcccagctacttgggaggctgaggcagagaattgcttgaacctgggaggcaaaggttgcagtgagccaagattgcaccactgcgctccagcctgggagacagagcaagactccatctcaaaataataataataataaaataaataaataaattgtattgtgtatattgaaggtatacaaaatgatgacacatgcacatatataataagatggtaataatacttcactacagtgaagtaaatgaacatctatagtgccttctctttgtaaataaatactatatatttcaccatttttcctctatcctatatatgagcttttgagaagactggcattaggrctcattgggtttttagaaatgatgactaaccaacaccatataaatatttagcacatactattttcttttgttttttataatttcagcttttattttggattcagagggtacatatgcaggtttgttacctgggtatattgcataatgcaattttacttagagtaaaattgatgtatgattgatcccttcacccaggtagtgagtatggtgcccaataattagtttttcattccttgttcccctctcttcctccacccccttcactctagtggtccccagtgtctactgttgccatctttatatatggcatatgagctatagggtccccattctttagctgtatgaaacctattatttagctctcacttttaagtgacaacatgtgatatttggttttctgttcctgccttaattcacttaggatagcagcctccagttgcatccatgttgctgcaaagtacacgacgttattcttttttatggattcatagtactccatggtgtatatagcacatattattttcatttagggtattgtattctgtatttgatcttgactaatatgccaagtgtcagataggaacagaaattttccctttttcctttctttctttttttgaataataattagaaactactcccaaatataatgtgacctacagaagattcatttaaaaaacggcaaatcacatttgttcccctctaaaatgatacaatttcatgtaaatagaaccagtgttggaaggatgaatactgatttatgttttagtatcacaaatttgatcaattgatattattaggtaagaatctctcatgtttaaaatcactattctagaataaagacaaatttcacatagaacacaaccatatttttatgtattgtgtcaattgttctataattaaataacatttacagagattttctttctttttctagttcacgttgggattatttaacttaattctcagacagactctgtgttgttaatttggctcttattgctatgtgtctgaggggaagagggaaacatctaaaaaaaaaaaaaacagtgtccatatgtccaattccatgtggaaactggttagctgttcttggataccttcctattcctgaatcaatgattgtggccaggagaacaggacactttggcaatctatgacctatattcccaatagtgcaatacagagagaagagaagttgcccaaatgtacaaatgcaggacaaaaagcagaatatatctactacaataacttccactcaagaaattagaaaataatagttctcattaataggtatcttgatggtatttactatatacatcatatttgggtttttaattttaaaattaaaataaaatgtgattggcctgcaagttagaaaaaaatatttaatttttggttacagacaaattttatagtgccttccctgcccctacaataattactgatgtgtaaatagtaagcatctgagctatatgacattagcacgctctcaaacagtttttcaaagtcactagagtatgaaccctcttaaggaaaataatttttatgctttctcccatgttgcttttaattgttttcattacaatgttactcaaatatgtaccaacacaaaaatgacatagcaaacacttccatggtacttaccatgtctcaagctatttgaagatctttacacatataacacatttaatcccaataaaagccttctgacttgagtgctattattgcaccatagatcatatgaaaacattgaagatgaaagaggctaaataacttgaacatggtcatgcagctagtgattgtcagtctgggtctggaatccaagtttttaagcatcactgccaaaaaatataatctccttgtgcatatagcttatatataataatataactgaaacccagaagtaagaagtgaaatcaactgcaagaacaaaccagcaatcccaagaggacccagagaccctctgaaggaagcagactgctcctgcaaaacgtgggagacactgcaaatactgtgagtgtcctaactgaagaagtgggaaagggagaccctcctctctcaaacacgcacccccactggagaacctgaaggtctgtttgcaggagaaatttctgactttacctggagatgagtcaatttagagaaccaagagaaatacaggggtagagaaagcagcagaaaggccctgggagctcactgggtcccctagcagcctattccttcctggcaccacagagatccattgggagggtggccagaggagcagggggtaaaactccacagggaggaggaaatcactaacggaactttgtaaaaatttgaacagggtgagaagcctcctggccagaaatggggagagggtgcaaatcctgtgtgcagactccacaggagggggaataaccaagcccttttctttcatagctgaaaggcaggtagcctggggcaagttttcaagcccatctcgcccttcacctggaaacagacttggggctgttgcaggggtaccatgggagtgagaccagcccttcagtttatgtgggagctgggtgaggtctgtgactgccagctttccctcacttccctgacaacctgcatgactcaacagaggcagccgtaatcctcctaggtacacaactccagtgacctgggaatcttacccccaccccccacagcagctgcagcaagacccgcccaaggagagtatgagctcagacatgcctagccctgcccccacctgatggtccttccctactcaccctagtagtggaagacaaagggcatataaccttgggagttctagagccccaccactgtcagtccctctccatactactatacctgatgctctctggaaatggccacctcccagcaggaggccaaccagcacaaaaataaagcattaaatgaccaaagctaagaaccctcatggagtccatagcaccccccgacccagcacctccactggaagaggtgctggtatccacggctgagagaaccataggcagttcacatcacaggactctgtacagacaacctgcagtaccagcctgtagccgggtagactcgctgggtggctagacccagaagggagacaacagtcagtgcagtttggctcacaggaagccacaaccataggaaaagggggagaataactacatcaaaggaacattccttgggacaaaagaatctggtcaatagccttcagccctagaccctccccctgacagagcctacccagacgaaaaagacccagaaaagcaaccctggtaatatgacaaaacaaggctcttcaacatcccctcaaaaaatcacaatagttcaccagccatggatccaaaccaagaagaaatccttgatttacttgaaaaagaattcaggaggttagttattaaatgaatcagggaggcaccagagaaaggcaaagcccaatgcaaggatatccaaaacaagatacaagaagtgaagggagaaatattcaagaaaatagatagcttaaagaaaaaaaaaataaaaaattcaggaaactttagacacactttcggaaatgcagaatgctctgtaaagtctcatcaatagaattgaacaagtagaataaagaaattcagagctgaaagacaaggtctttgaattaacccaatccatcaaagacaaagaaaatagaataaaaaaatatgaacacagcctccaagaagtctgggattatgttaaacgaccaaacctaagaataatcagtgttcctgaggaagaagagaattccaaaaattcggaaaacatatttgggggaataattgaggaaaacttcccctgtgttgctrgagacctagacatccaaatacaagaagcacaaagaacacctgagaaattcatcgtaaaaagatcattgcctaggcacattgtcatcaggctatacaaagttaagatgaaagaaagactcttaagagctgtgagacagaagcaccagataacctataaaggaaaacctatcagattagcagcagatttttcagcagaaaccctacaagctagaaaggattggggccctatcttcagccttcttgaacaaaacaattatcagccaagaattttgtatccagcgaaactaagcatcatacatgaaggaaagatacagtcattttcagaaaaacaaatgctgagagaatttgccattacctagccaccactataagaatggctaaaaggagctctaagtcttgaaacaaatgctggaaacatatcaaaacagaacctctttaaaccataaatcacacaggacctataaaacaaaaacacaagtaaataacaaaagcaaaaccaaaaatccaaagtacacaagtaacaaaaagcatgatgaatgcaaaggtacctcacatttcaatactaacatttgaatgtaaatggcctaaatgctccacttaaaaaatacagaactgcagaatgcatgaggactcaccagccatctggggccttcaggagactcaccttacacataaggactcacataaacctaaagaaaaggtgtgggaaaaggcatttcatgcaaatggacatcaaaagcaagccagggtaactattcttatatcacacaaaacaaactttaaaacaacagcagttaaaagagacaaagagggacattatataatggtaaaaggccttgtccaacagaaaaatatcacaatcctaaacatatatgcacctaacattggagctcccaaatttataaaacaattactcatagacctaagaaatgagatagacagaacacagtaatagtgggggactttagtactccactgacagcactagacaggtcatcaagacagaaaatcaacaaagaaacaatgaattaaaactataccttggaacaaatgacttaacagatatatatagaacatttcatctcacaaccacagaatacacattttattcaacagcgcatgaaactttctccaagatagaccatataataggccataaaatgagcctcaataaatttaagaaaattgacattatatcaagcactctctcaagccacagtggaataaaactggaaatcaactccaaaaggaaccttcaaagccatgcaaatatatggaaattaaataacctgctcctgaatcagcattgggtcaaaaacaaaatcaaaatggaaattaagaaattattcgaactgaatgacaataatgacacaacctaacaaaacctctggaatttttagcagaggcggtgctaaaaggaaagttcatagccctaaacgcctacatcaaaaagactgaaagagcacaaactgatattctaaagtcacacctcaaggaactagagaaacaagaacaaatcaaacccaaacccagcagaagaaaggaaataacgaagttccaagcagaactaaatgaaattgaaacaaacaaaaaatacaagagataaataaaacaaaaaacgggtcctttgaaaagataaataaaactgataaaccatcagcaagattaaccaagaaaagaagacagaaaatccaaataacctcactgagaaatgaaagaggagacactacaactgacaccactgaaatacaaaagatcattcaaggctgctatgaacatctttatgtaaataaactagaaaacttagaagagatgaatatattcatggaaaaatacagctctcctaggttaaatcaggacaaattagataccctgagcagaccaacaacaagcagtgagattgaaatagtaattgaaaaattaccaacaaaaataaaatacaggactagacagattcacagcagaattctaccagacattctaagaagaattggtaccaatccctttgacactaattcacaagacagagaaagaaggaatcctccctaattcattctatgaagccagcatcatgctaataccaaaaccaggaaagaacataaccaaaaaaaaaaaaaaaaacagaaaacaaaaaactaaagaccaatatctttgatgaacatagatgctaaaatccttaacaaaatactagctaaccgaacccaacaacatatcaaaaagataatctaccatgatcaagtgggtttcataccagggatgcagggatggtaacatatgcaagtcaataaatgtgatataccacataaacagaatcaaaaataaaaatcacatgattatctcaatagatgcagaaaaagcacctgacaaaatctagcatcgctttatgattaaaactcaaagcaaaattggcatacaagggtcataccttaatgtaataaaagccatctatgacaaactcacagccaacattatactgaatggggaaaagttgaaagaattccctctgagacctggaacaacacaagcgtgcccactctcaccactactctgcaacatagtactggaagtcctagccaagcaatcagacaagagaaagaaataaatggcatccaaattggtaaagaggaagtcaaactgtcactgtttgctgatgacatgatcatttaccttgaaaaccctaaagactcctccagaaatctcctagaactgatacaagaattcagcaaagtttccagatacaagattaatgtacacaaatcagtagctcttctatacaacaacagcgaccaagcagagcatcaaatcaagaactcaaccccttttacagtagctgcaaaaaaataaaaataaaaataaaatatttaggaatatacctaaccaaggagtcaaaaggcctctacaaggaaaactacaaaacactgctgaaagaaatcatagacaacacaaagaaatggaaacatgtcctatgctcatgaatgggtagaatcaatattgtgaaaatgaccatactgccaaaacaatctacaaattcaatgcaatttccattaaattaccaccatcattcttcacagaattagaaaaaacmattctaaaattcatatggaaccaaaaaagagcctgcatagccaaagcaagactaagcaaaaagaacaaatctggaggcttcacattacctgacttcaaactatcctataaggccatagtcaccaaaacagcatggtactagtayaaaaataggcacataggccaatggaacagaatagagaacccagaaataaacccaaatacagccaactgatctttgacaaaacaaacaaaaacataaagtggggaaaggacacccttttcaacaaatggtactaggataattggctagccacatgtaggagaatgaaactggatcctcatctcttaccttataaaaaaatcaactcaagatgcacacctaagacctgaaactataaaaattatagaagataacatcggaaaaacccttctagacattggcttgggcaaagatttcatgaccaagagcccaaaagcaaattcagtaaaaacaaagataaatagctaggacctaattaaactaaagagcttttgcacggccaaaggaacaatcagtagagtaaacagacaacccacagagtgggagaaaatcttcacaatctgtacatctgacaaaggactaatatacagaatctagaatgaactcaaacaaatcagtaagaaaaagcaaacaatcccaccaaaaagtgggctaagggcatgaatagacaattctcaaaagaagatatacaaatggccaacaaacatatgaaaaaatgctcaacatcactaatgatcaggaaaatgcaaatcaaaaccacaatgcgataccaccttactcctgcaagaatggccataataaaaaaaacagtagatgttggcatggatgagataatcagggaacacttctacactgcaggcgggaatgtaaactcatgcagccactatggaaaacagtgtggcgattccttaaagaattaaaagtagaacttccatttgatctagtaatctcactactgggtatctacccagaggaaaagaaatcattattcgaaaaagatacttgcacatgcatgtttatagcaacacaattcacaacttcaaaattgtggaaccaacacaaatgcccatcactcaatgaatggataaagaaagtgtgattatctatctatctatctatctatctatctatctatctaymtaymtatctatctrtctatcatctgtctatctatctatctatctatcatctatctatctatctayctacctacctacctacctatctatgatagaatactactcagccataaaaaggaatgaattaacagcattttcagtgacctggatggaattggagactattattctaagtgaagtaactcaggaatggaaaaccaaacatcaaatgttctcactgatatatgagaactaagctatgaggatgcaaaggcataagaatgatacaatggactttggggacttgcgaggagtagtgggagggggacgagrgataaaacactacaaataaggtgcagcgtatactacttgggtgatgggtgcaccaaagtctcacaaatcaccactaaagaacttactgatgtaaccaataccacytgtaccccaataacttatggaaaaattttaaaaaaggaaataaggaaagcaaaacaaaacaaaaccaaaacccaaatgcaaatgaaatacaaaactgaaaatcaataggttacgtcctcctcatcagtctgttctcaacaagacagccatagtcaccttatttaaacacgtcagaacaaggcaatgccctattcaaaattatacatgatccctctccctcagcacctttcacacacttagattaaaattgagccttattatgagtgaaggcactatatgatctggcttcccactatgttggaactcaaaatcctaccagtctccacctcattaaccacactttggatacaaaggcctagttactattctttgaccatgccaagaccactcccaatgccatatgtgaaatatcatctcctctatctttctatatgttcactactgtttttttttccttcattttcaccacttgacatttttattgtttgtttattgtctgtttccctaactagattgcaaacatcttgaagagatggtgttggcattgctcactgcttatttcctagcwtctataattgtacttggcacacagaaagcattgaataaatattttaaattaactttctaattttaactgtatattcacctgtgaatttaagaagtaatagaagcttcacaaatcctttactagttttttcctgatggcggtatttgtaaagtgtggtccaacatcwcaacaaaatcacaggacatttacattgatagagtcaagatatagaacatttctatcatcacaaggatccctcctgtttcctttctttagtcggtwscaagcttctttaggcctgtggtcagcttcttcagctccaagtctgggatatatgagggagaataaaaacccaggtaattcaccatcatgctgttccttgggtcccaagatgcctgaccagtctaacttctgtctacctttcagagtttcagcatacrtaatctattctggtggatgtgtaatggtatagcatgactttaatttgataactaattaacttgaagtcttcttaaaatatactattttggccatttggatatattctttgataaagtgtcttttcaatcttttgttcattttttctgttgtgtttccttttccttactgattttttttgagttctttctttattctggraaacgctcctcacactgtggattcattgactctattaacaatgtcttttaaaaaacagaagttcttggcttttatatagttcaatgtatcaactttttatttgccctaagaatatggaattgttctctaatgtttgcttctaaaagctttattgttttatattttacttttatataacacatttttatgacattaacttttgtgtatggtgtgagatgagaatctagatgatgtttttctcatacatatatccacttgacctagtgcaatgtattaagatggtcctcygctccccacagcaccaaagcttcatattattgttgttgctgtagatcaggaacgtgtgtgggtttgtttctggacttttttccattgatcagtttgccatttttagccacaggtatttcttttattatttcctgattaagatataacttttatagaatggtgccacttttgaaatcaaaatgtgacatgaagtttagtttatttaatttggtggcacaagtataacacagatactgattttccagttgagtaggacagcagaaattccataatttgtatctctcgccaagtgtcttmgtcacttggcttatggaatcactgaaataatgagttctcatatcaatacctaggaagttactgttaagatacaagagttaagttgcctttaagatgcaagagttctctctaagttatgagtctctgtacttctgtctgctttgggacacataaaagaatgctggagaagttcaatggcaaattggaattgtttcacactatactcttgagcaaagattgaaaaactacagcccgcaggccaaattgcctgccacctatttttgtaaataaagttttaatggctaattttgtgctacaatggtaaagttgagttgttgtggaaaatattgtatgcctcacaaagcccaaaatatttactgtctggctgtttatagaaaatgtttgtcaactctttgtcaaacaactctagagaatgtgcacatattcctctaaaagaactgtttggttaccacagctgtactaggggcttaaacaggtcatcttgttatattgctttctagtgagtgttaaaaaattaataggacattttcctaatattgagcttcatataaattgttcaagggaaatatatatatatatatatatatgaactttttcaaaaagtagagagagaaaaagatgattgccagaaactactacagggagtttctaaaaacgaaatatactatcacttgcctttgacgaaaattgttggtggaagccactgtcattgtgagtagytttcggcaaatgggaaaatgttgccattaacagtagcttgcaagtaagagccacagctaatgtaaaaatccacccttgaaaatgaatatcaagatatttttaagacccactaaaacaaacatcctttgcagcagaagatatatttgtaggctgtcttttgtgaatgtgctatataagtaagattccaaaagacctgtcgtagtatgggagagggtgggtagtaggtatattttactctagttgctcaatgttaaaagagctgattgtttaagtctacagtagactaatatccttgataaggagacctgagagtcaggagtaatttaaaatataagtccaaagaggatttgctggattataaataaaagagtagaaccaaggattaagtaccagaaataaaccaattgaagctggatatgtttggggataagaaatatctccaaaaaatacaagtcttggacaataattactaccatcagtagtgactgccttatttatttgctgaatattttgagctgtgtttaaaggtatgggtttaatcttgaccttatgagtgatgatagagattgcagcccttcagattaattactaaaagttccatttctggtatgatagagtaaggagtaagtttcaaatggtccagcccgccaacagatcacaactataaacaaaaaaacttattatgtataatttatattatataggtatgtgtgtgtgtgtgtgtgtgtgtgtgtgtgtaaacaaattattaagtatcagaggcagatttggagatgatacaaaacttggaagacaggaccagcataggatacgttttcattttttagtcttagtgtaaggacagtctgcaggtgcagtggactgcaaataactaacactgtggtagagaatctatcctcttggcatccaggaatgagcctgggataactgcaggtactagaaagtaaggtggagaggcatctcagaaaagagaaatccagaagataagagcccccaaattggtatacaaactttgcccaattctcaggctgacaggtgaattgagcatgtctgcagcagactcaaaacatcctgcagctaaggctaaaagaacaacactgagattttggctgtctccctccataggcacacaaagtatgtaatttgagcctaaccaattaattgccttctaatataaaaatagtawctttctttggaggaatattagagaatgcagaaataatgacttggatacaatacagactggcttcacattcaaagaaaaaatatatgattaacagagtccaaccytgagacgacccagatgttgaaatttcagataaagactataaatcagccaataaatctatgcttaataaaataaacttaataaataaataggaaatctcagtaaagaaattgaaaatattttaaaagaactgaatgcaaattataaaactgaaacatactgaaacacgcatatttgaaaaagaaacattttatgggctttatagaagaatgaagatgacaaaggaaataattactaaactttaagatagatcaatatgaagaaaagagaaaaaaagttaaagatatcaacagagcccaagttgtctatgagataatattaaaacttttaacatatatttaattagagtcccaggtgagagtgagaatgaggcacaaaaaatattcaagaaaataatggcttaaaactcaaactgaacgatgacttactgaaaattatttacacattcctggagctcagtgaattggactactttcaataaagagaaaggataacaaagtttcagtagggcactttagaaggctggaaaatgtagtcaaagctcatggtagtgtacagcattgccagaagaggtgataataggaaaragtcatactttcttttttatttcaaaaatgctcttgagggtcataggcatagtttgcacagcattttgaaaattaccaagaatcttagtttaaaaacttatacactctttctcatcttaaaatcatttttagttattattagactttgattaatgtctataagacattctgatacagtgaattcagaatacatgttgttagttttctttatattgtgaaagtatacatgagaatttttatactttgtgttgttagaacattcttagttttcattattttactttttgtcccattatgtatatctgtgcttcctgttttggaaatataatttagctaatgagttgtattagttatcaacttccatcatagtatatcatttacaattaatatctgtattatcagtgcctgtatctttattttctggtatttttccaagtgcttgtaaaattggatgtatatttaactttcatggttattctagcattctgcttattcataattcaatatcttgaaaacatcttctgctgtcttaatatttctgtcaagtttagtagaatgtttttgaatggtacttatttttccttctttttacagcaggaatgaaatgattctgtgtcaattatgtaaaaataatttgtcatggttatataaacaagaataagcatagatacaatatgatttccacattcttggttatttggattatctgaaatgatgatttataggactccttaagttccctggcagaaatgtagccacataaattttatttctatagcattcaatctatgtgttccaatattaatatgatccagatgattatcatttctagttaaatcaatgattaagctataacttattattcaacctaattttaaaaagaattgaagcatgtatagaaagtgactgaggaattggttggtgcttttaactctggtgtagcttaactcaaactttaatatgtcaagacatttaaagttattaggaaggtgcatgatatcatccttagggatgagcttgtcgttcttgtttcccttcagtggctgaagaacagaggcaagtatatctctttttatcagatatttacaggagatacttctatctttagtacattctagaaatccaaagatttgtaagtgaagaaatcctttcttgctaaatgagtcacgtgtgactcatttgttatgaaacttttgaatttggtctttttaaatttcatgttaccaaacataagaaaacaaactgaagagcatcagaagtaaatatcctcaaaattctatggatattccatgtgtcattataactcctaatatttgcacatactattatcattttttagttaaaacattttcctttttctcttttaagaaagtctctgaaagctatgtcagatgtgagcttcttcgtgaaaactttatcttatctcagccctcctatcacacttccttcaagctagaagtaaccagtccttcataagttgtccccatagtactttatctaaatatcaatttagacatgacattctgaattacaattaagtcttttcttgtctatttctgccactagattgaatacatattatattaccaactcttgaaccaattattgacatcttatgaaggaataaaacatatttgctcaagtgatgaatcaattttataattgcattttaaaagtttattaaatacagtttatacttcgtaagagaaatgcaaatatataaattagacaaggacctaataatggattgaagccactgaagggaaacaactcaagaaatacagtcccatcccttattaaaaataattgtattgtacacttacaatgctacactgtatagcataacattattcctcagtaaaagtattaaaagataagtttttaccttaagaaatcaggtttaaaacaaaaatatgtgattataatgaactagaaaatcagctaataaaaataaatggaatgataagtagttttacctgaggaataagtagtgttcaatagcattatagggtaactatagttaataataatctattatatatttcaaaatagaagatatttagaatgaccccaacacaaggaaatgataaatgcttgagataatggatatcttagttaccctgatttgatcattacacatcgtatgctggtatcaaaatattacatgtagcccataaatatgtatgactattatatatctataaaaattaaaaataaaaaaatagaaaaaaattaagctatttttttaaaagaccrtaatagatatattttggcaaacaccattgtattagtctgctttcacactgctgataaagacatacccgagacgggcaatttccaaaagtagaggcttaagggacttacagttccacatgcctggcaagrcctcacaatcatggtggaaggcaaggaggagcaagtcacatcttacatggatggtgccaggcaaagagagcttgtgcagaaaawctcttgtttttaaaaccatcagatctcatgagactcattcactatcacgagaacagaccaggaaatatccacccccataattcaatcacctcccacggggttccccccatgacacgtgggaattgtgtgagttacaattcaagatgagatttgggtggggacacagccaaaccatatcaaccattatggaaaacaaagaaaaaccaaaataagttcattgtggattagaaagattatgaaataataatccaagtccattgttaactcaaggacatttagaaaccataaagaaggaaaagaaaaacttttattgaagtktggaaaaacatattgaagaatatttaccattacaaataaatacaagggcctgatacttttatggtttaattttttttgctataataatgagatagtttattccattgttwttaaagtgaaakactataaaaatggatgatactcagcttaatttaatttataaagaactgtaattttaataatctgaaaaagatrcataagaatgtaaactacaaactaattttacttatgattaagaatgctaccattctaaataaagtaaaagtatatcaaattttacagtgcaataagaatatcatttgtgatcaagaatactttattttaaaagtgtaagggtgttcatacattagaaaaactaacagtataattgataaaaacacaataaaagaagaaaaatataattgtatagtgaattccacaaaatgatttgattgaattcagtacccatttaactaatgaagttattagttaatagttatggctggcttaattggatatttacatggaaaacaaaaaactgacagctacttacaatgttcaataataatttttaaagaaattaataatctaaatgtgcaattatatatgttgactttaatcttatgtataatgaacattccttatatttaaatatacatatgcatatattttaatgatatggctaactatgcagttaactataaatatagagttatatatatttatatattatatattataactagttataattaactatatagttaactatatttagctttatatatacatatatatgcgttagatatatatgcatttattcatatttagatatatgtgcacataattttactatatagttaactataattgaactataaactataacaagtattgttaactacgtagttaaattacagttaattataactatgtagttaaattatatacataaatatctaaatataatgcatgttcattacatgtaaggtcaaaattaatgtatataactgtacatttagatttgtaatctatttaaaacttattgaatatgataagtagctgtcagtgtacatatatacatagcatataaatatatatttagttttaaaagctagtagttactatttgtgcaacattttataaatacatacacacataatgccttagcctgaacctgctcctgctgctataacaaattactttagagtggataawttatttatttatttctcatagtcctggaggctgagaagtacaagttcaaagacccagcagctctggtgtcaaatgagggctctctccctgcttcagagatggcactttctcactgtattcctcatatggaggaagcaggaagtactgtatcctcacataatgaaaaggggaatgctgtgttctggcagaatgagccaaagggactccttcagtcactttgataagggcactaatcccatcctcgagggcagagacctcacgactaatcacttctgcaaacatctcacctattcataccaacaccatggggattagatttcaacatgaattttcgaggaatacattcaaaccatagcatatatatattatttttaaaaactagtagatactatttgtgcaacatttttgtggtgagatttttcttaaacaagccaggactggtttacataaaatataactaaaaatataggcaatactatactataaacagagtaaaagaacaaaaaattgacaagaaaaatgtttttattgtaaatgacccgacattaatgcccataatatatgacaagctcctgaaaatactaagaaaagcaaatgattcatcagaaaaatggaaaagtaaattacagagaaggaaaatatttgagcaataaggatatgagtttcaattctgtttacaatcaaggatataggaaataaaacaataatgagctgccttgtatcacccttcagaagaacaaaaatggggatagcatctagtgtgactaagtatatggtgatgtggattttgataaattaataaactagcagtctctatacaaattaaaattgaatccagagttcaatttttataaacacatcttacatacttttataagcatattaatatacatacatgctaatataaacatarcatactatacatacatactatacatactatacatacatactatacatactatactaaacataatatgcatactaatataaacatattttacatacttttataaacgtatcttacaggtataaaacagccactaaatatagatatatattgaaaggtatttttctactgttaagagcattggcgcaacaacgacaaaaaaaaaaaaaaaaaaaaaactgaaagcaacctgagtgtccctcaaaaggctgtctgaaataccatggtacagttattctatggagtattatgtagcctttaaaaataaatgagggagagtcatctgttgttctacaaacaaagasatgatactacagatgcataaaacacctggataaaatgagaacactatatatcatatcattttgattatacttcagagactgagaaaggaggacaagtggtaaaatattagttctttttaatctttgcaacttttgttacaaacaacatgaattatagctgtactttaaaaatctaatagaaactttttttaaaaaagaagaatattgggcatttaattatatttcatagaatgattgtccctgaatcatattaccgataagttcactattacagagataatttcttaatacttagaagagagacactttcttctatttaaggttaatcctgtaaattcttctctggtaatggcactgttccccataccccagatttaacaagagagatataaatataataataattaaaacatgaagcaacaaaacagcaaccaaaaaatttcaaccttcaagagcaatttagaaggtttatatcctcagaacaaaagcatttctttctgactttctaaccagtcaaaatttgcatattctacaggaaaacttttcatattatttcaacaaactgccctttactgcttctgcctctatcagatctcctaagtactaatattttccctggttaaaaataccaggtgtggtggctcatgcctgtaatcccaatactttgggaagctgaggcgcgtgaattgcttgagctcaggagtttgagactggcctgagcatcatggtgaaatgctgtatctacaaaaaatacaaaaattagctgggcatggtggtgcaggcttgtagttccagatactcaggaggccaaggtgggtggatcacttgagcccaggaggcagaggttgcagtgacctgagatcatgccactgcattgcagcctgagttacgagagtgaaactgtggctcaaaaaaccaaccaaccaaacaaacagaatacatgctttattaacagagtgccatttgtcttatcctattgtctgtaattgtctttatgctggaccccaactcatattcctttagatcctatgtggtgtccagagagtgggagaggtctaatgaatacttgcatgaaagtttggagtaactcctgttaaataaagtatctattactcagtgtaaaccagatcatattctactgaggcaggtctagttctttttattatattagatttacactgttgtattttattcagtagaggcagttgctactcctggtttgactagcttcagccatctgaaaatgacctggaagggccagtattttgaattttactaagactcaaattttcacctcatagtataaagctgagatataaaaaagccacttcggccgggcacggtggctcatgcctgtaatcccagcactttgggaggccaaagcaggtggatcacaaggtcaagagatcaagaccatcctggccaacatggtaaaaccctgtctctactaaaaacacaaacattagcagggcttggtggcgcgtgcctatagtcccagctactcgggaggctgaggcaggagaatcgcttgaaccggggagatagaagttgcagtgagcctagatcatgccactgcactccagcctggcagcagagcaagactccatctcaaaagaaaaagaaggaaagccacttagtgagtgagtgcagctgataaccagcattcatgtctcattttgattctgcatctctatgtgtatctatgaataagcagcaatgcttatgaaaaaaaataaaaaacacttaatgaagagaaacaaacccagatgaccctggaggctcattcccttccctgttacttgctttgcaataagctggctcagcaggtccaagttagtgcaatgaaaatgactgctgttatcaggcattgagaaccagtggttacctctttccacaagaccattttcttcaccaagaaggacctatttttacatagtcatttagagtagagaaacccttccccactttctctataaatgatatatagagatatttgggtgtcaggaactctttcctggagtcctttcaatgatatatttaaagcaactatgcccactggggcaaagcaaacctctctggggcataaggacagcttcatgggcctctctgctacttccatatctgtaggctttctctattccactctagtttacctgtacatgatatggtgctaatgtacattcccctttgtctttgtgtggagaagggccttggaaaggaaagccatgtgctagagctgtggagtagcccttacaggttttagagtcttgaacggcatatggatatacttcaaaggatggctaaaaggctattcttttgattcctggtaactagtaataaatacttagtagtttgtagggtctcctttatgaatgaagatgtctatatactgatatgagttgttcataaggaaatattattaaagaaagcaagggagagaatagtgtatatgcataatatagaagctactttttatacaaaagtaggggtatacaaatatgcatttcattacattttcctaagagaaatactgaaataaataaactagttatagagttccctaaaagtatgcatatgtggaaggggagtggatactggaatagaaggcaattttggtattgagacttctccatatatgtcattttatatagcattaactgacattaatgcctgcctattaaaaaattaaatagaaggctgggtgtcatggctcacgcctgtaatcccagcactttgggaggccaatgcgggtggatgatctgaggctgggagtttgagaccagcctgaccaacatggagaaaccccgtctctactaaaaaatacaaaattagctaggtgtggtggctggtccctgtaatctcagctactcaggaggctgaagcaggagaatcacttgaacccgggaagcagaggttgcagtgagcggagattatgtcattgcactccagcctgggcaacacgagcgaaactctgtctcaaaaaaaaaaataaataaataaatataaattaaccagccaacaccatatatttttcttaagatggtcgaggctacaaatacattattaattaaattcctaacattttcagaatttagtaatgtttcctaacatgctaagtttgataaaaagataaaataaaataagcaatacatgtataaattctgcatagatttgtataagtgactgaaaaactattttcttgcataaccatggaaacaaaacataagtatttgtgtaatctgatttcaatttaagaaaaaatgcatgaggtagttgcgataaattccattttgctctcaattctatgcccaaactgtaagaagagattttagagatgctgcagtaaaaaaagaaatcacagaaatgcaataaaatgcagtgaagtcacgaaataacaaaaataaattgtcttagcaacaacaaaaaatagaattctatcagggcatagaattattttgtgtgtatttaaaggtcccatgggggaaaacagtacaatcattagattatactatgacatattttaaacttataattgagttattaataaagcagccatccktttaattaagcacctaaatcaagattacatttttacattagaaatgtcatatggtttaaagttttaagataaatcagactctgaaaattgtaacatatatatctttaaaattcacattaaagtgtctgtgtggcaaagggaatggaataagtggaaataactggtcctgggaccacctgcggttaaggtattactttggtagtttaattgaaatctcattggtccacccctgtctcctcatcctcagaacttcttctacagaaatgttttaaaaggaattagaggaagtaatgaagcataagaaagtcatttcatttatctctgtttaagttattgtagccatttaaattaaatttgatttgtggtagctttaaacattttagttttgcttaattaattgtgagtagaaacaagatttgtggcagaactgctgtgtgtaatagacagagggatgatatatttgacgaccaaactggaaagtgacagttttactttatcagtgccataagttctcctgggacctatttcaatttttcagcaagaaacttaaaaacaattatggaccagttagccctctgaagaaaattttttaaaaacctgattttaattttataaagtatactcctttctatttcagcggctattgcttggtatcataatatcaagctttaaaaacactgaactaactctatgcttttttggtactgtaagcatattttgatcaataatgcatatgtattccaatttttcaggatagccaatttctgtcaaatggttcatatttttataattgagttccataataatggtggtggtatattctattaggaaatatatgagaccagatatattaaaatatttttccaataaaatacataaagtattgtatattacactgtcagaaatttagtgtatttaactgcttaaaatggattgctattctggaagcagagccagaaatcagaaacatttgagatgatctactaagtattattcaccgccttaaaaagacacaatccttttaacttttcttcctctgcaactgactttttctttccatatgcttgtcttatttattatttttatactctgctcttttcctagaaaatttctgccagtaatacctatagcattagaattcactgaagaaaactacccaaaaacaagtattatgcattgtggtgaggtctctaattcttaaaatgtctttgaaatatatcagttttaacctgtgatttatggtkgtttaattgctgtcacagtgtcatagcaaaaggttaatgttggagctgaacagatcttgtttaaatcctgtttcaaaactggctctattatttccaacttgatctacacattcagtgtaatcccaatcaaaatctcagaaagttattttattgacaaaatgacttgaaagtatatatgtagagttaaaagacctggaatagacaagacaatatttaaagaaaagaaaaaagttggaggaccaacattgagttcaagacttaccataaagcttccataatcaagacagtgtcatactggtcaaataatagacaaataaatcaatggaatagaatacagagcccagaaatagacccaactaaataaagccagctgaccactgatgaaagagtcaaggcaaaacaatggtgaaaagatagtcttttcaacaaatggttttggagcaactggatatctacatgtaacaaacaaatgaaaagaatttagacacagactttatatgctttacaaacactaactaaaaatggataaagacctaaataaatatacaaacctataacatttctaaaaggtaggagaaaaatctaggtaaacagctttggcaaagacrttttaggtacaacaccaaagccacgatccatgaaagaaagcattgataagctggactttattaaaatgtaagctttctgctctgtgaaagacactttcaagagaataaaaagagaatccacagacatggagacaataattgcgaaagacatatgggatatatctttaataacctgggctatccatcttctctataaggaaacatctgcctcagaatacacattatcatcaatttgttggcaatgcttgaattcgaatagacagtgttttgcttgttttactgttttcagtgactctctaagtacaattttaagtcaacctctcttatatgtgctgttattttggggatattttgtcactatcagatgaataaattatttatcrtttatataaaatcaattcactggagtatgacaaaaacaataaaactttaatctatatttatctgtacctcatccctccaaatctcacttaaatatgttgaggcaagttaagatacatctgtcttaggatggagattttctccataattggagaatttttatgtctctgatcttggcaaattatatgttgattttacagtttaacaattgtttaactgtttgaggatatcttcattcaatcctaaattctggggagtcatctctttgcttttttttggtataaataacaatattctttaatgtaaattttaacctcaaacattcttgaaattttaaatattaaactaattactgttaagcaaactatactgcaattaaacattttctcagaaatttttctttctttctttctttttttttttttaatctgagacagagtcttctcactctattgccaggctagagtcaagtggcrtgatctaagctcactgcaacttccacctcctgggctcaagcaattctcatgcttcagcctcctgagcagctgggattacaggcatgcaccaccatgccaggctaatttttgtttttttagtagtgttggagtttcaccatgttgcccaggctggtcctgaactcctgagctcaggtgatcctcccgcctcggcctcccaaagtgctgcgattataggcgtgagccagtgtacccagactcagaaaattttctattgaaatgttcttagattatgatgtttcttaaaccctgcttctcctcaagtatcatcacaaccaacagcaacaacaatgacaaaatctcttaaataaaaacataaagaagcatagactaaagtaagagagaagatactctccatgaactatccaagcaattaagaagaaaagtcagaactacttctgttataacaaattgtttaaaaataacaactggcacttcctcacataggtcttttacaaatgagttggctgcatttcctttttagccatgcaatgtgggatttgcagaataggacagaatgttcctaaagagttattcaggtatgttgttcaacagtgaccaataaacaataggtcattttattgctaggagagaacaaatacataaagacaaatggaaaccccaatacctaacgacattatgaatagggcttaaatcattagaaagataaaattagagaaatcgtaacatagatctctgttcttcaggttaattgtattataaaatgtcaggagactaaattttttctctactttgctcgtggattgtttatactcttgaaatgcatcttaacattaccttcctcagagttcactatacctcaaagataccagatacgattacattggtacttaacaacattcatctggaaagaattgaaaggaggagggattaattaatctccttgaagggggtttactrttaagttaaattgcatttcctctggttctctgcttttggtgcaaaaatttgaaggatgaggaacaactaataggttttctctctttaggatttctaagctctcttcatgttatgtggcgattagttagttagaattttggtccctactctgtgcataaatggagctgctcaaaatctcaacatatctgaaagttttatagctgctttaatgattgctatgcaacatgccagacatggagcgtgcagttacaagatactcatattcactaatgaggccaccttcaaaaccacaaaagcccccattgccacatacccagttgatcctcctagtccctttacaaaatcatcaggaaaagggagaaccggacgaaggcaaagtctctttattggagttcaacccaggatattcccttcttgtttgacctaaacatcatctcaggatgactgaggctggatttctatgtacaaactacaggcctgtctgcctgattcccgcccagagctgtataatgcttgcagtgtctgtccatgtccttcacttgaaaaatatgacacaatgagagggmcaattatgatggtctattgtagtgtgagaaatgtcataatttgaatatttttataaaaatayatataggagaaaaggggggaacacaaccctcactctcaaaatctaaaagtgacttgtaaaacctagaaagcaagagttgggaaacctctgaacacacataaagaggctttctttgaagtcattagcagggtgtgttattaataataaattgaatcaagagtattgtagtcaaagaagggccttgcatttgacagggaaaaatccaaggcagtacatggttgtaagccattcatatgacatatgagtggctcttaggagctgaaacacaaagccatcaaggtataaatggcatcaggggtaatcttgcctataaatattttcaaatttatagccttgggtgggaagaacatattgtgtgaggaaatacagtgtgaataaatggaaattgtgctccactgaagtaagaaaggggaaaatatagttttatttctcgcctaacatttcggcatcatgatatccctaagcgtgcagccataaatctaagaggaatcttaggaaatggtgtaaaagatttcattgctaatctgtcagattttagaattcccttcattgagtcaggagaaaaatcacacagggcagaggcaaacaacatgaccagaaagcctgggggaaactttggctttcctggtcatatagtgcagaaatttgaaattgtgaagaaatgaagaccaatgttaaattactcttatttagagagagtgatgtgtaaaggtccagatgtttgatcattgtcaatccatcttttatttttatttcatttcatttcattttgaaacagtctccctttgttcccaggctggaatgcagtggtgcaatctcagctcactgcaacctccacctcctgggttcaagcgattcttctgcttcagcctcccaagtaattgtgattacaggtgcatgccaccacacctggctgatttctgtatttttaatatttttgtattttgtatttttagaagtgaaaccaaccgggtttcaccatgctggccaggctggtctcaaactcctgatggcaggtgatctgcccacctcggcctcccaaagtgctggaattataggtgtgagccactgcgcccagcccaattcgtcttttaaataaggatttttatcatcaaatgagcaaaatacataaagaattatcatgaataagcctactattgttttctttgcctcaacaaaatacaaggccatatagaaacaatttttctttgaccattatggattgttggttatatagcatgatatcattgcccaaagatagtcagtattcaaagtytgttatctgtaacaataagaattactatgtcatcatgtggttggaggcattgagataatatagataaagtaaattgccagattcttgatccacacctgttgctcaataaatagcaactaaaataattgttctggattcaaggagaaagtttcaaactttgtctttgaaaatgcaaattttaaatttaatgcatacatatatacatatatttgggtttattattatttctttcatatacttttcaaagactgcgggcttttattttttctttggagtaattttgttcttttacttagatttaataagttttactattttattttctttgttttttctctatatagatatatatcatttattgttatttatatatctatgcacaaaattttgttgttattttcaagacaggatgtggctctgttgcccatgctggagtacaatgacataatcttggctcactgcaacctccacctcctggactcaagccatcccccgacattagcctccagagtagctgggaccacagggacgtgccaccatgcccacttacttttttgtaaattttttgttgagtcgggattttgccatgttgcccaggctaatcctgaactcctgacctcaggttatccacccacctcagcctcccaaactgctggggttaaggcatgaggcaccaaacccagtccacaaacttatttttgctgttccgcgtatctcataaaatcaatggcattctccagtataacctcaatattattatacttaacagatttaatgttgatattgtattatttaatatatggttcatattcaaatttctctaagtattgtttttagttttaaatttttttctgtccctgccccctgccattgtatgtaattgagattcatgcattgggttttcttgtcatgcctcttggttttctttaatccagaacagtcctcctactttgtttttttacatttggtattccatgacatttataattttgaagattccaagctagagggctttttgaatatctaacattctggattttcctgattgtttccttataattaaaagattaaatatcttttgtagaagtgctatgaagctgatattgtatcctcattgcgttgcacaggagtcacgtcaaagcagtggtttgctggaagctgattgctaaaaaaaagtctcaagaagtctctgagctagttgttaaacatggtcattattaaacattaaattatgtgaactaggctgggcgcggtggctcaagccactttgggaggctgaggtgggcagatcgcttgaggttaggagtttgagaacagcctagccaacatggtgaaacccatgtctactaaaaaaatacaaaaatagctgggcatggtggcacgcacctgtaatcccaggtactcaggaggctgagtcaggagaattgcttgaacccacgaggtggaggttgcagtgagctgagatcatgccactgcccttcagcctgggcgacagtgagactctatctcaaaaaaaaaaaattatgtgaactcacaaataataagtattaagcaaatgtaatagatactaaaatttcattccttcttaattattttaccaaatttacatctgtcatggagataatacaacacaatgctgtgttgtgttactctcttctaaactccgctttcagtgatgtcacattaatagctggaagtaggccattgtgcagtaattacattgcaagaattggcaaatgctacacatcagarcatggtttatgatactgattgtcagaaagtgatggagaaaagtgttaataatgtagactaaacttatattttgctgtgtgtataacaattaccttgtaacaccaaaaaaaaaaagtgaagaaattactatttagtgtttgaaaactattatccaatttartaaaaagtagcttatgccatgattaagttctggcatacatctttattgttttttgttggtcttactcattaaggtaaacaaacatattaaccaacatccatgttagaactacacttattcatcacttaacaaccaaaacatgaattgaagacaatttggcaataaaactgaaaatattctttgagaattgatttattatatgcagtttacaataaagagtattatatgttatttgtaaattgtgttacgtggcctggcgcggtggctcacgcctgtaatcccagcactttggraggccgagaaggacggatcacaaggtcaggagatcgagaccatcctggctaacatggtgaaacccccgtctctactaaaaatacaaaaaattagccaggcgtggtggtgggcgcctgtagtcccagctacttgggaggttgaggctgcagaatggcatgaacmcaggaggtggagcttgcagtgagctgagatcgcaccactgcactccagcctgcgcgacagagcaagactccatctcaaaaaaaaaaaaaaaattgtgttacatatcgtttctattaatatttgtaaatattatataagcattttgccctttttatatgcatgtgttttagagtcaattgttaaacatttagcagaacaccagtgcatgcaagctattttgtttcagtaatgatagataggttttacttagtaaaggcggtgtctgcaatatctccgcattgtgaagaaacactttttcttttgttcttaattatctgcttgaggatacttagagatcatagtaacatccttgttgttcaacaacacttttacctaatgaatttagcatccattgatgattcttgctttaatcaattagtacattactggtagcaaaatagtgattttattttattctttctatatgttttagctgtgayttttctacaaagaaaagctgtttcaatttctctctcactgttacagatgggattgatgaaatgrtttaatacattaacactactgaaatcattaatttttttagctaatttgtcccaaacatttttaggggagaacttttaaactagcttctctgtgtttttagtcatgatctctaggtttggggcagtttttttgccttctcgcccaacaaaatattcaacgttcattgcacacattaccttagccagaaagaaccatatctccaaacagttctagttccttgtagtgaagaattatatttagtcatcaaaacctcggtgttatgtgtttttgttgcaattgaggtgtcattcttttactgttactmgctaagaaatattgcattatgaaaaataatacctcttattcaaatataagatcaagaatattttcttatcatttttcattccagttcrgtatctcttcttacattaagaattctagttctccaatacaacaatatctttaaacattcactctatctacaatcacacaaaatattttcagaatcattttaccagtaccattaccatgtaaagttcaagattcttttgttataatatttccaaccaagartgtacagagtactgtgatcaaaatttccttgacttaaatctttgtttttctctgttaataactattaggatcaattcttatttttatatttaatttatggtttgctgtcttaaaaatgtgtatttattttgtgacattttgacctttatatgaataaaaaatcaccacagatacaaaygcatgcttgcacaagtctgatacccattcttaattctttcatccattcacacctgcatcttgtagttaaccattttggttaatgactaattatctaccctatgtttctgtttgaaagcaaatattcttaaatttccttctttcatacagaaaatgcttctgatacctatatattcttatacttgtttttcccacttaattgaacatcttgaatatcacttctaattatctcatacaaatcttcctcatcttatttttagtactacatagtaaaccatgtaatttgtttttaatattttctataatatctacaaataatgaacttctcatacagattttttatagaaattgccaaagattgatttgtatcttagaaaaaataactgttacaatctaaccaccagtgcatgaaagtgctatttctccacagccacaccaacagagtgtattattaagattttaaattttttgctagtctaacagggtggaaatgacatatttgtggagtcttaatacctcttatttaaaatgaagatcactttaatgttcttttttcttggtttttatgagttttttatacatttagagatattagctttttatcggagttgcatgttgtcgatattttcttctaattatttatagtttgattttgactgtggtgtttttgtcattcaattaatgtttaatatgcctgtagttgaatttatcaatcttttatttcattgcattgcattttgagtctttgctagagtttacccaaatgaggatgtaaataatttatccagatgttcttctatttctgtatgttacttttctattaagttagatttttaaaaattcatgtgaagtttattctgctatagagtatgttgttcacatccattttatgtcaagcctaatgagtatacagttttcctaacctcattcatttaaaaaagtctacctttttcaaacatttttgagatttcatccttattacctgccaaatatagatttatttctagactttcttttattgttacattgtgctgtggatatgagaaccagtatagactgatttcagatcacctagtgtatattttcatttctaattgggctaatcccgcttcatcgactttttttttttccaggatattcttagatgctttctcgctttatttctctctttcttctgttttttttgttttttgttttttgtttttttttttaagacagactctcactctgtcgaccaggctgtagtgcaatggcgtgatctcggctcactgcaacctccaacccccattcaaacaattctcatgtctcagcctcccccatagctgggatgacaggcggctgccaccacgcctggctaatttttgtatttttagtggagatggggtttcgccatgttggccaggctggtttcgaactcctgacctcaagtaatccacctgtcttggcctcccaaagtgctgggattacaggcattagccactgcacatggctagatatttttcccacaagttttattccagaaaagtatcttgtagtatttttattaggataggattcaactatattaacataggagaatttacatatttgtgatgtttatttgtagatcatggggtgcctttctattttttttcaagtacattttgtatgttctggagttttaaaaaaatgttattttaggtgctggggtacttgtacaggttgttatataggtaaacctgtgtcacgggggtttgctgtacagattatttcatcacccaggtactaagacaagtaaccaacagttatttttcctgatcctctccctcctgccaccgtccaccctttggtagtccccagtgtctgtcgttcccctctttgtgtccatgagttctcatcatttagctcccacctataagtgagaacatgtggtatttggtttttggttcctgcattagtttgctaaggatagtgtcctccagctccattcatgtttctgtaaaagacatgatctcattcttttatatggctgcatagtattccatggtgtatatgtactgcattttctttattaaatctgtcattgatgagcatttagtttgattctatgtctttgctattgtgaatactgctacaataaacatatgcatgcatatgcctttatggcagaatgatttatagttctttgggtatatatccagtaatgggattgctgggttgaatggtagttctgttttgagatctttgaggaatcagatcttccacaatggttgaactaataatttacactcccaccaacagtgtataagctttcctttttctccactaccttgccagcacctgttattttttgactttttattaatagccattttgactggtgtgagatggtatctcattgtggttttgatatgcacttctctaatgatcagtgatattgagctttttttcctatgctcattggacgcatgtatgtcttcttttgaaaagtgtctgttcatgtccactttycaatgggattgtttgcttttgtcttatagatttgtataagttccttatagatgctgactattagacttttgtcagaaaatatttgcataatttgcaaatatattcctcaattctgtaggttgtctgtttactctgttgataatttcttctgctgtgcagaagctcttagtttaagtagatcttatttgtcaatttttgcttttgttgcaattgccttcagtgtcttcgtcatgaaatctttgccccttcccacgtcctgaatggtattgcctaggtttcttccaaggtttttataattttaggtattacatttaagtctttaatctattttgagttgatatttgtatactgtgtaaggaaggggtccagtttcagtcttctgcacatgcctagcctgttatcccagcaccttttattgaatagggagtcctttccccattgcttgtttttgtcaactttgtcgaagatcagatgattgtagatgtgcggccttatttctgggctctctattctctattccattggtctgtgtgtctgtttttgtaccagtatcatgctgtttttgttaccatagtcctgtagtatagtttgaagtcaggtaatgtgatgcctccagctttgttctttttgtttataattgccttggctattcaggcctttttttggttccatatgaattttaaaatagtttttctagttctctgaaaaatgtcattggtagtttgatagaaataacattgagtctacaaattattactttgtgcagtgtgatcattgagcatggaatgttttcttcattagttcacatttattgatctgcatatgttgaaccaaccttgcatctcaggaataaagcattcttgattgtggtgggttagttttttgacgtgttgctggatttttgctggtattttgttgaggatttttgcatcaatgcttatgaaggatattggccggaagtcttcctttttgttgtgtctctgccaggttttggttcaggatgatgctggcctcatagattgagttgaagagggggcacctcctccacaattttttggaaaagtttcagtaggaaaggcaccagctcttctttgtgtgtctggtagaattcagctatgaatccgtctggtccagggcttttcttcttcttcttttttttttttttttggtaggcaatttattactgattcaattatagagctcattattggtctgtttagggattcagtttcttcatggttcagtcttagaaggttgtctgtgtccaggaatttatccatttcttttagattttctagtttgtttgcatagagttgttcataatagtctccgatgattctctgtatttctttcttttttttttttttttgtttgtttttgagacggagtcttgctgtgtcaccaggctggagtgcagtggtgcgatctgggcttactgcaacctccacctcccgggttcaagcaatactcctgcctcagcctcctgagtagctgggactacaggtgcgtgccaccatgccaggctcattttttggctcgttttttgtatttttagtagagacagggtttcaccatgttggccaggatggtctcgaactcgagacctcacgatcctcctgccttagcttcctaaagtgctgggattacaggygtgagccacagtgcccggccgattcttygtatttctatggagtcagtagtaatattcccctttctgtttctgatcgtgtttgcttggatcttctgtcttttcttttcattagtctagctagcagtttatcttattaatttttccaaaaaaaaaaaacagatcctgattttgttgatgttttgaatggtttttcrtgtctcagtcttcagttcagctctcactttagttatttcttgtcttctgctagctttggggtgggttttctcttgcttttctagttcctttaattgtaatgttaggttgtgagctggagatctttctaactttttgatgtaggcatttagtgctacaaatttccctcttaccactgctttagctatgtcccagagattatggtgtgttgtatgtttgtggtgggtgcaggactatgtgtgccctctgcatgtgttcatgctggcatggtggccgctcagggctgggggcaggtcactgttctgtgtgcctagtttagcactgatggcagtgttggcacaggggcaggatgctggcagaggtgaagcaggcaggtttcatgcctgccaatgctcctaggacaatggtggtgtggtggggagaagggtggtggggtaccctcatgcaggcagtagtggcatggcatagtgcagggttcatgtgcactgtcggggaagtaaaagcaagatccaacccaagggcacacataggcactggctaagtgatgtgggggggtgcctatggtgtgttcatgcaggcacagtggctgggggaggctgcagtgaggggaggacacagatggcctggtgtgtgtcttgggggccactctgcaggagcactctgcttatcaggtgcagtccacaagagcaggagctatgatgcagacacccacaggtacctgggggctgcactgcaagcaggcacggccaggctggggccccagaagaggccagtagactgagggttgcccaggtctaatcaaccccatctcagaggcaagaccgccctgcagagttcacgttcaacagttctcctatggctaaagtctcctatggaagcaagtcgagcttaaggtgatgggtgtccctggccatgctgcactacagacaatcccacaccaaaccctctgggctccaccctggctggagttctgatcctaccacttctctaagcagctttccctggcaactccaatgccatggtggttgaggaatttcatcctgccagtattccagaggcccaatgtgagartaggttgctgcttgcctgtaccttaatagaagttttttgtttgtttttgttttttgagacagagtttcactcttattgcccaggctggagtgcaatggcacaatctcrgctcactgcaacctccacctcccaggttcaagcaattctcctgcctcagcctcccgagtagctgggattacaggcatatgccaccacgcccagctaattttgtatttttagtagaaatggtgtttctctatgttggtcaggctgatcttgaacttccgacctcaggtgatctgtcctcctcggcctcccaaagtgctgggatttcaggcatgagccactgcgcccagccaagttttttttttgttttttgttttttttttaaacagactattttttaggttcacagcagaattgaataaaagttacagagatagcctccacaacacacacacacacacaaactcacacagcctttcccgttatcaacawcctccaccagagtgggtacatttgtttcaattggtgaacctacattgacacataatttttgcccaaaatctgtaccttacatcagggtgtattcttggttgtataatttatgagtttggacattaaacaccatcataatgtaatgaaagtagtttaactgccctaaaagccttctgtgttctgcctatacatcccctccctctaagccctggcaactgttgatctttattgtctccataatttgcctcttccagaatgtcatatagttggaatcatacagtatgtagccttttccgactggctttttttttcacttggtaatatgcatttaagtttcttccatgtctttttctggcttggcagcttttttttcatgcttgtgtcactgaataatatctattgtctggatgtaccacagtatatctatttattcacctaccaaaggagatcttggttccttccaatttttggcagttatgaataaagctgctataaatatatgtgcaggtttttatgtggacctggcatatttgaaagtttttctcagagaaatttagctcattttttccaaatttatttttaaataagttgttatttctattgcatttgtaaacagattattttcttttctctatattgactaagtgattattgtttgtgtatatgaagattagtaacttttgtatgttaatgttctaccttgttagttcctgaattaagaaaatactttatcttataaaacagttctaactgtttttcttttctttttttgagatggagtcttgctgtgtcacccaggctagaggacagtggtgtgatctcagctcactgcaacctctgcctcccagtttcaagcgattctcctgcctcagcctcccaagtagctgggattacaggcgtctgccactacgcccagctaattgtatttttattagagatggggtttcaccatgttggccaggctggtctcaaactcctgacctcgtgattcgcccgcctcggcctcccaaagtactggaattacaggcaaaacagttctagttttacagaataattgagaagatagaacatagcgttcccatatggcttatacccttattattaacatcttcattcatatagtacttttgttaaaaattaataagtgcacattgtaatattaagttcatgatttattcagacttctttagtatttatctcatgtccttttcctttcctagccctctatctaggatattacattgcgtttaatagtcatgcctccttagtcttttcttggctgtgacagttcttagactttccttgtttttgcgaacttgacagttttcaggaatacagataagagattttgtaggatgtcactttattggaatttgtgagtttgtccttatgattagtctgggaatatgtggttttgggaggaagaccagtgagaaaaagtaccatttttatcatatcatttcaagtattgatattaggtattgctgttgatgttgacattgatgacctggctgaggttgtagtatctacactataaagtttatttcccttttttttttttttttttttttgagacagagtcttgctctgtcgcccaggctggagtgcagtggcgcgatctcagctcactgcaagctccgcctcctgggttcacgccagtctcctgcctcagcttctcaagtagctgggactacaggygcccgccaccaagcctggctaatttttttgtatttttggtagagacggggtttcaccgtgttagccagcaggatggtctctatctcctgacctcgtgatccatccacctcggcctcccaaagtgctgggattacaggtgtgagccaccgcgcmcggccattttcccccttttctacactctaccctggacagaagtcactatgtagcccacagttaaggagtggaagttattttccgctccttgagggcaggctatataatactttggaattatttggaatttacttggaattgcttttcagggtatatttgtatatgttcttcaatttatttatatattcagtcatttatttctatcactatggacttatggatatttagtttatacattgggttagaattccatattgctttgtttattttactgctcaaattattccagatatggctattgacaactctttcagtgtgtacttgcagatttaaattttttagttcttccttattttttggcagtatctaatacttcaggttctttctatatatttccttcccagtcgtagaattagcatttctctaaggagccctggcccctttattggtgaatggtatcagaaaccaaaatctgagtgtcagccatgcttgttgctgctaaggtgtcatttcttttaggtgacagctgacagagcaagggaatatatgtgtgcatactaactaaggtaaatccacatgtccataaatgtttctacatctgtatctatatttagctaaacatgaatttatattctagccttcttcccttgttcatctataaacttctattctaacaatgaaaaacctgactcccatcaccatcatttgtttacctaactgtttaatttcagtacactagtataacattatgagaatcawtaacctgtacccttatggaaagtagctttatcaagtgcagcatattgcttactggtaattccttttgacttcagtcttatggattacattaattttcaaagtttattagatcagcaacttttccctctccataccccatacagtgagattatttgttacaatcagaacatgtgtaaataatgttgtcaaactttgcattctttcctaggatcctagccctcctaaatgattttttcaaaacttacataattgaggtttactctttgtgctgtaaatttctatggcttttgacaaaggtatgtcatgtatccaccattaatatatacaaaattgatttaccagtcaaaaaaggcctgygcttcacctattcaatcctcctcctctcrccttgaatcattggcagtctctcattgktttactgttcctctagttttgttcttttcaacatactgttcaattgggatcatatagtctgtagccttttcaggtgggattctttcacccagctataagcatttaaagttcatccaggtgttctcatagcttgatagttcatttctttatatttatgaagaatactccattctaagcatgaacatctctgtcttttaaatgatgctgcagacctttcacatttaaagtgattattagtatttctgttttctatgaattacctctgttgttttcatttcttttttcttttctaccttctctagttttaatcattgcatatggtttctattttgttttttattgtcagcatataacttatacttttcttaaaaaactgagtacttgccctagagtttgcaatatacatttacaattaggtccactttcataaaactgctttctgggtagtagggtcatctttcaatacagtattctcaattcctcccctcaactctttataatattgctatcattcatttaatttacctcaatgctacaatcatacaatatattgttactagtattattttgaacaaatgttacatattagatcaattaaaaataagaaaaaaagatttaattttaccttcatttagtgcttctctgatgttctttttttagatctaagtttctaacacatcatttcccttctcactgaagaacttcttttaatgtttcttgaagggcagatgtgctggtgatgaattttccaagatttgtttgtctgagaaagtttttatttcttcttcgtttttgaagaataattttgctgtgtgtagaaatgtagagttctttttcctaattgacaattcaaaaaatttactctactctcttatttggtgatatggtttggctgtgtcccctccaaaatctcatattaaattgtaactctcacaattcccatgtgtcatcggaggaacctagtgggaggtgatggaattaagagggtgggtcttttctgtgctgttctygtgatagtgaatgagtctcatgagatctgatggttttaaaaagaggagtttccctgcacaagctgtctctctttgcctgcctccatccatgtaagatgtgacgtgctcttccttgccttccttcatgattgtgaggcctccccagccatgtggaattgtaagtccattaaacctctttcttttgtaaattgccccatctcaagtatttcttcatcagcagtgtgaaaacagactaatacagtaaattggtaccagtacagtggggtgctgctgaaaagatacctgaaaatgtggaagtgactttggaactgggtaacaggaagaggttgaaatggtttggagggctcagaagaagacaggaaagtgtggaaaagtttagaacaccctatagacttgttgaatggcttttaccaaaatgctgataatgatatggacaatgaaatccaggctgaggtggtctcagatggagatgaggaacttgttgggaactggagcaaaggtgactyttgttatgttttagcaaagagactggcagcattttgcccctgccctagagagatttgtggaactttgaactttagagacataatttagggtatctggcagaagaaatttctaagcarcaaagcattcaagatgtgacttgggtgctgttaaaggcattcagttatataagagaagcagagcataaaagttcagaaaatgtgtagcctgacaatgcgatagaaaagaaaatcccattttctgaggagaaatgcaagccagctgcagaaatttgcgtaagtaatgaggagccaaatgttaagcaccaagacaatggggatratgtctccagggtatgtcagaggtcttcatgggagccccttcyatcacaggcctggaggcctaggaggacaaagtggtttcgtgggccaggcccagggtccctgtgctgtatgcagcctaggaacttggtgccctgcctcccagctgctccagccatgaataaaggggcaaatgtcgagcttgggccatggcttcagaggttgcaagcctcaagccttgtcagcttccacatgatgttgagcctgccagtgcacagaggtcaagaatttgggtttgggtacctccacctagatttcagaggatatatggaaatgcctggctgtccaggcagaaatttattgcagggtggggatcccatggagaacctctgctaggacagtgcagaagggaaatgtggggtcagagcccctatacagagtccctactggggcactgtctagtggatctgtgagaagagggccaccatcctccagaccccagaatggtagatccactgacagtttacaccctgtgcctakaaaagccacactcaatgccagcccataaaagcagtcgagagggagcctgtaccctgcaaagccacagggacggagctgcccaagaccatgggaacccacctcttgcatcagcatgacccggatgcgagacatggagtcaaaggagatcattttggagctttaaggtttgacttccctgctggatttcacgcttgcatggtgcctgtagccccttcgttttggccaatttctcccatttggaatkgctgtatttacccaatgcctgaacctccattgtttctaggaagtaactaacttgcctttgattttacaggatcataagcagaaggaaattgccttgtctcagatgagatgttggactgtggacttttgagtcatgctgaaatgagttaagacttttgtggactgctgggaaggcatgattggtttttaaatgtgaggactgagatttgggaggggctggggtggaattatatggtttggctgtgtccccaaccaaatctcgtcttgaattttaactcctcaattcccacatgtcatgggaggaacctggtgagagttgattgaattatggggccaggtttttcctgcactgttctcatgatagtaaatgagtctcacaagatctgatggttttaaaaagaggagttctccctgcacaagctctctctttgtctgctgccatccatgtaagatgtgacttgcttctcattgccttctgctatgattgtgaggcattcctagccatgtggaactgtaagtccattaaacatctttcttttgtaaattgcccagtctttggtatgtctttatcagcagtatgaaaatggtttacacatggtttctgattataagtatcctatcattcttatccttttttcactgacttcttcaagatgtctttggttttctgtagttgaatataatatgcttggctgtactttcttggtatttatcccgtttggtcttctctgaggttcatctatctatagtttgttatacatcatgaattgctgaaaacratcagccattatcatttcaatgtttcttttgcttcattttcttttttctttcttctattacatgyaatgtatgttacaccttttctaattgttccacactccttggatgctctttattaagtaattttttttctcttcacatttcaatttgggaagtaggtaatgacaaatttcaagctcactgattctcttctcagctgtgtctagtctactgatgtgcctatcaaaggcactcttcatttttgttacagtgattttgaatttttatatttccttttgatttttttcttagagttttcatctctctatttatattacccactaccttttgtttgttatctgtttttccattctagcctttattaagagtagtattttaaattctctgcctgataagtataacactggtgtcatgtttcaatctggttgtgtgggaagttgtcatttatgtgattaagtatttataacaaaaccatagcaatatgttttaatttgtaattggaaggaaaccatgaacatcttttgtaccagaaacaattttactggttgtctaagagcaaatattttaaaaagttggtaaacctcagcaactttttttttgagacagggtctcactctgtcacccaggctggacaggtggagtgcagtggtgtggtcttactgcaacctctttttccagggctcaagcgatctatccaactcagcctcacaagtagttgggaccacaggcatgtgccaccatgccttgctaattttttgtagagaggggtttcaccatgttgcccaggctgctcttgaactcttcacctcaagcaattcacttgccttggcatcccaaagtgctgagattacaggcatgaaccactgcacctggctacaacttttttcccacatgattattccaagttttgatctgttctaaaataccatgtgatttattaagctagtatatataagatagtgtgtgtgtgtgtgtatgtatgttgtattaaaaaaagaaactgaggaaatactgaggtggtgcaattttaaaagtctggagcttcttttgaaggaatacatagctaaaagaaataaagaaatacctatttctagctacaactagcagtgttttaaattaggtaaagagatttataagcaataacatttagtgattgttaacttccattataaattaacaaaattaggtcaaaggctaatagggatctttttcagtgaagaaacttgacataattttaactcttaatttctatgcttgagcttctgtgttgtacttagtctctcaaagaaataactcagggttctgatcactggtttgagagaaggctagtaggcaagatttttgtttcctagcttcagttgcattacatctccatttcatgttatgtatataggacacctgatttagattttacatggaaaaggacatcacggagagaagcttgaaatgtatgaaaaccattggccttcgcacctgggttattttcacagcttctgttgcatacttccatgtgcattaggggacaacaaggagtgcacaatcttcccattctgagtcacttcttgtgtcatttcagatctctcctgctttcttttcctctctttggactttcctttttgcctatacatgccttttaaagagaaaatagttttcagtttttaaaacttatttaaactttcactgtctgggtacaacctagcttctctaaaagttacttcttagtgttttcaattatctaacaaaacaaaatgtgagtgaaagtaaaaaagcaataatatttttaaatttcttaattgtgttagcagctgttctccaatttataatcatattatttataatcataatgctttaaaaattttcayataacttactactgcaaacttcacagtgccttgagatacaataaatccattttgcagaataaggaatctagactctaaaagttaacaaaaaaagacataattaaggtcacctagtcagtagataactggaccaggacaaattttctacattatttatttaatgtaattctaacagtattaactagacagtatacttaatatttattgacataagtcagaatgacatgayagctaatatttactgarcatttattgtgttcttggcactatattcagtactttacattactgtcatatattcctcacaacaaccctataagataggtacatcacaattgaaggaatttaatatgattaatgctacacaacttcttatccatggtttatcataatttaaaattaattatttgaatgtgcatggtatcaacttatcttctacactaccatcttagaaaagaaaaaagagaaggaagataaaatttttagtgagaacctactgtgtgctctgagctgagttataaaactagtttcacacgagaatgaaaagtgtgccttacatagtgtatattcagagttgaatccacatccttctccattgaccatacaaagtttacaatgagaaagaggtaaaatatagaacataaagaaggcagagacagctatctttattttwcaatatatgaaaccagatgccaaataagttttccagagtaacagaataaataaatattagacaggaaagccctttgataccacatgggctctttattggttcctcatcagcaactaccacagtatctggcatattaatgagtgcttatttaataaaaaaaattgattgaatacatgaacgaatgaaaaacaagaatgagaacctaattatcctgtctttttacctaagaatgactgaatttaccccttactcagttcaatatataatataagttatcttattttttcattatacaaataatccatagttaaagcctaaaaaagctttacaattacacagcctaatcccctaggagggatcaaaaagtgataaaacagcatgaggagtaaaaaatatatgtatacatttgtctgcaagatcctagaaaatcttgaagagtactctgctgttcactttagcactaagctataacaatttgtaaacattagagtgagagagagtaataggaacagcttgtagggtgtctagcaaaacaaaccaaactgaacactttgtaattaaatttaacaatttcatcttacaaataatactgtatgttgatagaaaaatgtgaacactgtttcaatattcatgaagttttgaataaaacagtacacagaacttgggcaatgttacattagcttcataatggtggtatcctcatctaatttatgacagtcccaccatacctagcatactgtacttcatacatagtaggtaatccatgaatacctgctgaatgtaatctgtatctatttaaaagttctctgttttaaaatttaataaaaatcaatgttttatatctttaaatttaaaaagaatagtgtggctgggcatggtggctcacccctgtaatcccagcattttgagagacagaggcaggattgcttgagcccaggagttcgaggtcagcctgagcaacatagggagaccctgtctctcttaaaaaatagtaataataaatataaatataaaaagaatagtgtgacacacaaacacagtcattgcggttaattcaattaaaccaagctgatgcttggttcaattaaaccaagtagatagaatatggcatgctttttcatcttgccacattgataacagtgatccttttccaaagtagatcagctctctcattgtaaaactaattttaaaacaaagtcacctttacagagacaaatgattattactggtttctgcatagtggatgagatctgcagggagaaaaagttctaagacagaacaatgttagaaaaaacattgttgacatactaaattactttgaataggtggaaagataagaatataaggtgacggttagaagggaagaaaagattattccaaaagagaggacagagcatagctaaagagtgcctgggacttatttcggtcatgttgtaaaaagaatgattgattttaagaatagtatatgttattattagttttctttagcatataccttcagggttgtaatcagatggtactaatcttgttcatcaagagatagcttgagtaggttttgaaaacaacatttcaatctatatatgcatggcttggccctggtgacgtctaagactactggataaatccaaagggagtagtaacagagagggaggttcctaaaaaaaaataggacaaagcaaagacataaggaaagctgatgaaatccagtagatgccacctgtacttattacaatgattatttgtaattgctttattattacttaactctggtatatttttaaataaactatagtcaaattagtcgtatataagaggaagtataggtgcataattttcttaaatcctccatgtttaactaaaagttggtccatgccaattcagtcagacataatcaaacatctgacggtaactctcccaggttacacagcatggtggtccctcagctgtggtctctctcttgggctgctttagaaggcgggcagggccagtggcctgatgatccagacttcacactgtatatccacacacaccagctccgtggtgttatggcttacttaggatagctccatagtactcttatatagttgtcaataatattggcattctataattttattaaaaatggttttactacttaaattacttttgaaaaccattgacttaaatgaaacttgctttgatatttcataaacactataaagtgataggagaatcacatttgctgccatattgccagccttattagtggtcctttcacattcacatccatatagaaaagcctacatttggtagcatgcttactaaaagctgcaatgtttcttgatctctaagttcctctggtgagaggactcatgaacaaggtgtctctcaactgaagctcatctttcattactcaacaacaaaatatgtggtcccctgctgcaaaatcaagttcattttttaaaatagaaaataagtgtgtatattaattgattaaaaatgatcttgtagcattactacttcttttatgtatttattcaacagaacttcagctatactatattatattagtagcatatataatatagtattttgccaaacaatgttacactatgtaataagagttcatataggcatttcacatttttgacagcattgaggcataacatttaataaaatgcacatttaaaatatacaatttaatatgttttattggcttatgtataaaaccccaaggctatcaccataatcaagataaggaacccatatatcaaacccaaaagcttactcataccccttcacaatctgttcactcctcccaccaactctcaaataaccacagatctgatttctgccactacagattgactggcaagttttagaatgttatataaatggaatcatgcagtgatatggtttggctstgtatccccacccaaatttcatgttgaattgtaatccacatgtgttggaggaggggcctgggggggtggtgattgaatcgtgtgtgcggacttcccccttgctgttctcgtgatagtgaatgagttctcaccagatctggttgtttaaaagtgtgcagcgcttcccccttggctctgtctctcctgctccatgtgaagatgtgcttgcttcccctttaccttccaccatgattgtaaggttcctgaggcctccccagccatgcctcttacacagcctgtggaattgtgwgtcgattaaacatcttttcttcataaattacccagtctcaggtagttcttcatagcagtgtgagagcagactaatacatacagtatgtgtttttatttagcttcttttactcagtataattatttttagatccataaatattgttgctttaatcaaatttattcctttttattactgaatcatatttcattaaatgggcataccatttgttaaataattcatctgttgattaagatttragttgttctcactactgggatattacaaataaatctgctataaatatttgtatacaagtctgtgtgaatatgtgtttctattcctctttggtaaatactaacaagtagaatgactagattctatggtgtgtatatatttaatatttaatatgttaagaaatacatggacattttaaaaaaaacaattctccacattaagtttgtttcctcatttgtcctaattcctttggtcaggacaagtctgtgtagaaacagcacaatgcatttgccatgagctagtttcacagccacttatatctgactacatcttatacaatgatgtattcacttgcctctacaaataggccttttagttttggaacttaaaaatctctttaaatacagagcataattcttccttaggtgttgtccaaatatttgttttgtcgcattctagttttctattttatatataagctgccaacttaagctactttaatttagcagtgtagggaattcttatgtcccataaagcaaacttcaatccagtaaccttgaataatatgtccaaaagtctaatatagatctgaattactgtcttatggagcaacacccccctacagtaatgtgtaatttctttcatatttttttttgaccagtgaaataggagtgtcagttttggccgtcctgcttatccttacttarcatccgtgkctggaacacagcaggcagttttttgctttattactgtgcctaggattactttgcaaatgtwaccagatgaatttggttaggattgktgatactatacctggcagcttaacgatttctgaaagtaaaagacatcgtgtcagtttatatctctatctctatctctatctctatctctatctctatctctatctctatctwtctatctatctatcatctatctatctrtctatctatctatctatctatctatctatctatcatctatctatctatctatattccccattgggaagtcaaaccacaacatctctttccctcaaaatctttgttatggaaaacttttgtaaaaccactttccaagacactgaaaatgtaatacctaaaataatgaagtaacagcttttacgcatccacagaacaaaaaagaccatacaaaacagggaaatagcatgggacctggtaagggacacttctctgtatctgctgtcaccaccccctttaatgtttgctctgataataaagacatacactgcaattttcctcttgtcaatcgaaagattttttctgtgtccacatcagcttcaaatatcatgcaacgttgatagacctattgcaaggtgacaaggccagctatactaccccactgcagattttgcaatcttgtcctttttgtattgctgacacgtccttgaaatggtacgttcaaccttaagcagattttcctataacactcattgcttgttttttttccttatgataaaagatagaaaaatgttttgtaacaacttagagacaaatcaactaaaagaggaaaagtcacttataatattctacaacccatagatgataattaataaaatatgttgatatattttcttttactttttctttttctttttttttttgagatggagcctcactctgtcgctgaggctggagtgcagtggggtgatcttggctcatggcaacctctgcctcctgggttcaagtgattctcctgcttcagcctcccgagaagctgggattwcaggcacgtgccaccacgcccaactratttttgtatttttagtagagacggggtttcaccatggtggccaggatggtctcgatctcttgacctcgtgatctgcctgcttccgcctcccaaagtgctgggattacagatgtgagccacygtacccaaccratatatatatatttttcattttattttcctctttctcacacacatacacggacaatatgagttttaaataattagactatatatatatacatatatgcacacatatatacacatatatacatatacgcacatatatacacatatatacatatatacacatatatacatacgaatatacacaaatatacatatatacacatatacatatatacacacatatatacacacacacacatatatatacagatattcagttaacaatatttcaagtgcattttctctgctattagacattctctgaaactcttattttaatatctatagaatagcatttttggaaaagaaaaatgaacaaattttaagttagactcccttttactgtctagtctaaggataagataaaaaaaatcacatatgtagagtttatttggctatagagtttgatgaaaaaggtgagattttcctcactaaaataaattggaataggtctgatattcatggcaccggtgttctgatttttgatccgacattcagacataagagttgaaggtcagggtgtgtttctagccatctgctgctactgttgctactactgctgccaccaccatttttagcattccccccactactgctcttattattattgcatggtttcaaccacctccccccatagatcaagaagagtaatggtattgccacaattgtcaatggcatcagcaattgctgtgcgtgaagaaccctcacatcatcctacatagtcctgcataaaggaagtttaaaaagctgtttctaatttcctgagaagttaacaatctataagagatttgtgatctaaaattgtattcagcatgttgaataaaggatatgctgacaatwcaaagttttctgaaatagatattcattatctttcctgataccttgctaaacctatcataaaattctaaagttaataaaaatgactgaaattttataaataattagtccaatcttttcatgtaccactgaggaagctgtgttctcaacaagttaagttcttgttttaggtcacaagatattaagggcagcgtttgaccttgaatctggatagtcaatcctagatattatgttctaccatagttccagccttatgttgtaakaagttttgcaagtcacttaccatagattttctgttcctaatttggaaataggatataaactcacagctctgtctcagagcatgtttagtaggtgtgcttattcgtagagcttaattcaaacaattaaagaaaaaagaataacttaggaacatcttgcaggtccactgacacacttctatgcatgctataggtgaaaattgaattcatctcaagcttagtataacttagagccagagtaccactaatcatcatggacatgaaaaaaaaaatacaatgagatatcacttcacacttcttaggatacctattatcaacagccacagaaaagataagtgttggtgagtatatgaagaaattggagccctagtactctgttggtgggaatgtagaatggtacaactgctttaaaaaatagtatggaggtttctcaaaattaaaaacagaactactatatgatccagcaatcctacttctggttatatgtcccaaagaattgaaatcaggatctcaaagagatatctggactcccatgtttatttcggcattattcacgatagccaagatgtgaaaacaatctaagtgttcattgacagatgaaagggtaactaaaatgtgataaacttgtaagatggaatacaattcaaccttaaaaaaaaaggagatcagtcatatgcaacgacaagtgtgaaccttggggacattattctaagtgaagtaagccattagcagaaaggcaaatactgcatgatttgccttatatgaggtaactaatgtttttacactcctagaaaccatgagcagaatggtagttgtcaagctgaggggaggggaaatgaggagttgctgctccaaagttatgaaatttcaattatgcaagataaataaataaagatcctactatatatacagcattgtacctataattggcaatactatgttattcacttaaaaatttgttaagggtagatttcatattaaatgttaatacaatactgataataatagtgtaaagaaaaataataacaaaatagagggatgctaatggttcctggaggcagttttgaattatattttaaaagattgtaagaagaaaagtcaccaattcttgattttgacaaatagagacatacatcttatttgcatcttcatttattcttctgttgcattaactcaataaaatatgtatttactgagtactgactgtgtgccaggcaccgttagacacttgggttataaaactgagaataatactagatgccttctccctctggtggctataacagaaagatatgtgtattcaggagattaaccctattttgaattgatgtgatgaattagagtggactatgtttcaatcaactgaactcaacagatttaccgaatcttcactagcgttgagatctctcagtgttgaggaggtgtttgatccagcctaatgtttgtcayagccttattatgttttcagtttaagcatcaattcataaaaactgaaaattcaaaggatttacaaaaattatcagttttacttacttctcatcttcattttaaaggtcaaggaatttaagcataggaaaagtctgagattggcctaacaaaaaacaactagtttagttaggacacccaagtatcctaacttcaagttccattaatatcccaccgtaacacaagcctaccagctttctggcgatataagaaatatcttcccagtttttcctcaggtgctttacactcrttcctctcttctgcctgacacatcccaggaaattttttcatctctaaccactcaacttcagtctcaaatcatataactctatggaatatctttcatctccatctaatattcttaccctttatctctcttgagggcaaggattgtgttttatttccttcaagattcccagtatctagcataattgttcctgtctacatacggccatgccgtgcatgacaatgtttcattcagtgatggactgcatataggataatggtcccctaagaaggctataatggaactgaaaaattcctatcacctaatgacattgtattatttgttctcacatycctataaagcactacctaagactgggtaatttataaataaaagagacttaattggcacacagttccacaggctgtacaggaagcatggctggaggggcctcaggaaacttacaatcatggcagaaggtgaaggggaagcaggcacatctacagggcaggaggtggaagaaaagagccaaggaggagatgctgcacacttttaaatagatctcatggaaactcactcactatcatgagaagagcaaggaggaaatctgcccccgtgatccaatcacctcctaccaggtccctccctcagcactgtggataacaattcgacatgagattttgtccggagcacaaatccaaaccatattagatgccatagccatcttaacatcgtgacacaacaccttaccttttctatgtttaaatatgtttagatacacaaatatttaccactgtgttacagttgcctatagtattcagtacagtaacatgccatacaggtttgtagcctaggagcaatgggttataccatacagcctaggtgtgtagtaggttataccatctaggtttgtttaaatatactctatgatacttgcacagtgacaaattcatataatgacacatttctcaggatgtgtcctgattgttaagcaacatgactgtatatgtaagacaatcgaatatgttagttgagttaacttgagttgattatataatcaagcaaacttagattagcactggatatctttagataatctcattatgaataaaagataaaaacaagatcagcagaatgaaagcagcttattaaattctggtattaagatgacaaacaaatgatagaatttcctttttttaaaggctaaatagtatttcactgagtgtatatgtttgtgtgtgtatatatagagagagggagagctcacagtttctttattcattcatccaatgaaagacacctaggttgcttccatctcttagctattgtgaacatggaagtgcagatatctcttaggcatattgatttgaattttttttttttttttttttttagacagagtctcattctgtcacccaggctgcagtgcagtggcatgatattggctcactgcaacctccrcctcccaggttcaaatgattcccttgcctcagcctccctagtagctgggattacaggcacacgccaccacacccgtctaattttttgtatttttagtagagacggggtttcaccatgttggccaggctggtcttgaactcttgacctcaggtgatccaccctcctttgcctcccaaagttctgggattacaggcatgagccactgtgcccagacccttttgaatattgttttcaccacaaaaaaatgatacatgagtgaagagatagatttgttaattagaatttaatcatttcataatgttaatatatactgttgtaaacatcacagtatgctacataaatatataatatatacaattatcaattaaaaatttaaaaaacaaattttaaaaaaggctgcaagcaagtttgtagttttttttttttgtactttaagttttaggttacatgtgcacaacgtgtaggtttgttacatatgtatacatgtgccatgttggtgtgctgcacctattaactcattttcatacattttctgatatcttcttccagtagtctggttaagactaaaatgtcttctctcttttgtcttgtaaacataatgttattatatgggatatgactttcagtttacatacttatttgcaagtaaatttatttttaacttggctcatgggaaatttaaatatagtcattcttgggccttcccttactcctgctacctatgttgggccaagtgagccaaaattcttgagcaatggttctcaagtgggtgattcctaagcctccaaatttccaggggatattcggtaatgtctggaaacatatttaattatatctcatgacttgagagggtccaaatgtgtgtggtagatagaagctagggttggtgctaaacttcttacaatacacaaaacagattctcacaactggaattattcagatcaagacgtcaacaatgctaagactgagaaacacttctcttgaggctaagtctgtctctggaggcttgggctgcatcaagatgtcagggagtctcaccraccctgtcatttacccacactggttgccaatgagacatccattgtcccagcccatgtaaccctttcaggtctaccactgtttccatgacaagtttgtggcacggggctrtggtgagatttgaaacactgktctgggcttactggatgacattttctctgaagtcttttttatccatattggattgtcaaggagtagggcaagttagtactgattatggaatcataaactttttagtcctccacatctgagaatctcttctgagcttatggaaaacctttctctacacaaaatctcatctctagtttccataggatttttttaaaattcaagaatatttgcatatacttttctttaggcaaggaattattgattcaatacttattaaaagacagaaggcaaagsattatacattctccacagctcaaaaatgttcccatgattttcttgtgaaattgatcaataacaaaagcttgtcagtaattaaattgtttgctcctttattcagctaagaaatagaaaaattgagacatactatgtgccatttcatgagtggaaaacaagacaaacaacatccctattttcatgtaagttaagttctagtagggataaaataaaaaatgtaacccacctgccaaaaaarggaaaaaaatgaagaraaaatataattttaggtgaaaatcatgaaaaaggacctaaagaaaatatatacactaatataagaaataaatgaaatggggaaaagggttaactttagttagactggccaggggagacttctctgagtagagagcatctgagctcccatgccgagaaggatccagtctgcaagaaggggtaaatagaaagacacaaagagtcttaagtggaaagtgctgacaagtgggacatgtttgaggaggagaaaaggggtcagtgtaacagaaatgtcactgatttcttgaatatttataaggtagagtgccagtctcatggtcaaaggtgtggggcaggaacttcagtgtttgtttgtgtgtgtgtgttaaacaagggccatgtcttaattttctttattttggcattgtgtcattgatatatttttattttttaaatgtattttaattgtgatctctccattttgacattgcaaaatcatcctacgttactacctcagctggaatgaaatcattgaacatgtgacgttagtctcctgcttgggatggacattcatagcatgtttcctaagagcttctctgagtgcgagaccactcctgacattactgtggtggttatttgattttagtaagtcagtgaaagctagccagtgaattatatttttaataagtcatgtgtatggtttagaattcaaacataattctgagaagaagccaagcatgactcytgttttccacagtatttttaatactttttatttcttttttattttcttcctgtgtttttttctctcttctttaaaatttagcaaccacaaatttcttttttgtattttaatattaaatatttataaagtctgcgcaagtgaatttttaattgtaataatgccacctgtttcattagggatcctgaaaggattagtgagataatgtctatagaaaggattgaactccttgtgggaaaaaggatatatatatgaaatgtattgtgaccctgaagtcttaatgtattactactatgtcattgctgtcctggcttctatgtaaacacctcagcctgaatgttttcagcttcaacttctatatttgtttttggcttcttttgcttgaatcaagtgagatagcaacagtaatgataatctataatattcataaacaatattaataattcagtatttcccagtcaccgaataatgttctagtccgtcatcttgttttatctttacaataaccctaaaaattaggtagtatttgtgctattttacaggtgaagaaactaagcctattccaaatcacttttgggctgcctaaggaagacaccataataagccagaggtaaaataggaaaatatgaaatatatctccacaattctgatatgagaaataacgttaatgtctgcattgattaacactttttctgaaaaaatgggctctcttcatctttgtctggtttagagacagcccagcttaaagaagacaaattatttccatcatccctgagaatcatgctagagtgaatctttgctgaggccagtttaagagataatttcgctgttagacatgattaaagtccaattaaaagagatctcttacatggattttagaaggaagcagtgcatgggtaattatattaaaccctgtttagcacaatgacattagataatcaaactcaggtaactgtaactagaggcaactagtaaatgtaccatgtcaacccaaaataatgtctgtgtagaatctaaaggacagaracattggtggcttatccaaagttccaaatcaaaaataaatttggattatactggattaaaattattaaatttggaataaaggtgattaaaatttggataaatttacataaatgtttaataaaaatataaaggtgtatattgggatgaggtataaggtagtggagaaagaagaggaaaagcaacaaacagaaataaacttttgccacaatccagctaggtctgtgggctaagctcttacccaaagcatcttagtgtaaytgagcctcacaacaacttttgggattaggtattattatccgaattttattctgagggaaacaaactttaaaagagaacacatattgcccataatcactcattagaggaccagaactcaaattcaggtctgcattactcaatattatagggcctttctaatatataacactgcctctaagatagttaatctttcacagaatgaaattgattagaaacacacacacacacacacacacacacacacacacacacaaacacacacacacacaaaacttccagatgtttaccagataggtagaagcagacaattttaagaaggcatgatctagggtactctatcatccctcctttcccaccccatttttttttctttttttttttttgagatggagtttcactcttgttgcccaggctggagtgcaatggcgcgatctcggctcgctgcaacctccgccgcctggattcaagcaattctcctgcctcagcctcccgagcagctggggttacaggcatgtgccaccacgcccagctaattttgtatttttagtagagacggggtttctccatgttggtcaggctggtctcgaacatctgactcaggtgatccacccgccttggcctcccaaagtgctgggatatttgctgtttctattatttgtgtttagtgctgaaggagttaatgtattgccctcaaaattattagagtactcctttctctttcttagtttccacttaaactgtagcattttgtatttaactatttattttcacaataccatccaacaccatgccttacagaatgtgaaatgctgccagcaagtgttttgaacacttccccactgattttgttcatgaaaagaagaggtcagtttttgtagctttgcaagaaaactattaatcctgtgttaaacacaaagaaaaacacagaagtatgtgggtgtaaatggtaggcttatctcttcgtacagcatccccaacaaaaatggcacttgtgacttctgatagcagcaattgttcttagtttgttactttatttgggggttgaataaactataggagtggatgatgaagttatttgtcattgcatgataggatataacccaagtaataaacagcagacatttataaggaatagatcacagtagggacaccagacagccttcagttgcaaaacaacagggcacaagaaagagaatttgattaactgaatttgttcaaatgttatagggcytggtgatataacaaggagggaaattgcaaagatgctttctcaagaatrctgtgacaagaatgcacaaaaaggctaataatgcgatatatgattgtatagaaattacatcgtaatgaacttgtgctattaatacctaagaagaaagaataaattgtcctragataatagctgcatgtagttgcagcaaagaaggattgcaaagagatcaacacggagataaaaaatagcacattgaaggctttggcgagaggggggatgttaatatctgataggaattggttgaaataaatgcaaaatgctcttctgcaaagggatgggtattgctcagtgcaagtgtgtgagaacaaagaaagtgctgtttaaagatctatgagatgagaaagaatctgaagccattaatgaataggaaattggtagttttgctatataatatgagctaatcatcaaatgtccccatctctggagtgctcccaagggatgaaaggctattggcagccctgacaataaacagaatgtctgtgtgtaaagcaacgtttaaggcaaaccagagctagtctaaggagatgggctctgcccatttccagtcttcagcagccatatgtgcatgaaagatgcaggcccaaggacatcttctacttcgtttttggttgttttctatgaaacctaaatacttattttctgggtttgtcaccaggattttgtagcaaaggaatcatacagagtggaataatggacattggagactcagaagcagggaggatgggagagagattaggaatgaaaagctacatattgggcacaatgtgtactacttggatgaagagctcactaaaatctcagacttcacattcatgcatttcatctgtgtaaccaaaacccacttgtatccccaaagctattgaaataaaaaaaatatattaagttgagaccttgtgcactaaaacaaatactaggctaattcttgttaagcactttgacmtgtatttgcaaaaatgacaaggaagacatgtccctgcctcacagaatagacaattcaacaattagctgcctaattcagcgatgatatattaaagtataatgatcattatggcagataaagtagagggggctaggaaacacttggcagggaatccagcccagtctagaggattcctgagcaagacacctccctgagaaagaggcatttaagctgaaattgaaagaaggaatggaagttagctaactctttataatagacactgaatttcaagttgaattatttattaagtccctaaaattttaatttcttgataatttctggtggcattttgatgatatatgattttaatgatgattatctaatgcatttatcaactgtaagcatcttggtttgcagtaaccacatagtgggtagccaaattgctattcactgaaataaaattttccctgtgatcatttttttgctttctttttctctcacaatttattgggatataattcatataccataaaactcaccattttgaagtatgaaactcagtgttttttagtatattcagaagggtttgtgatcattcctactatctaactgcagaacattgttatcatctcaaagagaaaccacatacccatcagctgtcattgcccatttcccctttcccctagcacctagcaaacactaattaaatctctattgctatagatttgccaattgcagacatttcatgtaaacaggatcatacaatatgtggccttttgtggctggctcccttcacttaggatgatgttttcaaggttcacctgtgttgtggtgtgtatcagtattttgctcctttttatggccaaattatattccattgtacacatgcaccacattttgtttatccattcatcagtaagcatacatttggtttccatttgttagctatcatgactgatgctcctgtgaacatttgtgtatacgtatttgtgtggacatatgccttcctttctcttgagtatataactgggagtgaaattgctgggtcatatggtaactttatgattacccttttaaggtactgccgcgttgttttccaaagaagaaatgcttttacattcccactagcaatgttttgctttctttttatagaccccagaggaactggaggatgtttctgaccttgaagaggaacacgaggtccgcagtcacaccagcattcagaccgaagggaaaactgatagggtatgtcacttcaactggtgggagaaccatgtactgtgtcactgaaggctgtgccctccctttgtcaatctaggcagcctctaatgggtgggactcctggatctggagctagttctgtgaagcacatggagaaaagccttagcattaagggaaaccacatgaggggaattattttcctctatcttgagagctcacagtaagtccatttcaggtcatgtagtgaatcactccatactgcttttgatctttataggagtcatgggaatataaaagtgaaatatgtacatgtttgcttagactagaaaaaagaaacgaagaagttgtaaatatactcgggaattctagtggagaagaaaactcgtctgagtcaataatctacttttctttctctacaataacttctcctgtgcctgcccccaaacacacacacacacaccccaccaccaccaccaccactgccaccaccaccacacaactccaaatatgttattctaatttctgaattactctgagatattgtacttcactttactcccacccagtgcctgggtatctgtgaaagtttggcatcctagccacttatcgcttgcaactacagaccagacaacaaaccttggatctgaaacccacgtagtacagcacagtgcctaagccttcctgggaatgcatgtgcatctgccacctccttctggagtgttacttgggaaagtcaattagcttctctgtacctcagttccctcatttgtaaagcagagatactaatagtatccttcatatgaggattactgtgggaattaactgagtcaactaacagaccacttatatagtgcctagttcatagtaacttctcaataactgttagttactatcattcatagtagtaatagcagcagcaacaatagtaggattatcatgatcatcattattaatattattattaagttagttaaattcggtgacataaaatttggagatggaagcaaattcctaacctttccctctgttttctggcctcttatggttgtatctgatgttgaagcacttatattgaaaggctggcgcatactctgtttttgtagacatattgttatacaagctctgcagaaacatttcaagcaaagacccgtttggttaactccatgtcacaatgagtgttagtgcacatttccttaaaaaaaatgttgatattcctcacatgttttgatattctattgtaatctatggcttgtggaaactgatttgaagaagaaaaaacaactttagtccttaccaaattttacctagaatcctytggatttctattccctaagaatgtaatataagataaatacactgaaaaatatctaattttaaacagatgcagagagtcacattctgtttctactattctttttgattgcctttttaaaatcccacaacatattatgtaaaatattttgtttgtttatctactttgacatatgtgaaatgaatgtttaaaaagctatctcattagagcttaactatatctttttattaacaataatatcttgcatctacatatttgtttttacagtgcgctaagtattttctcatttactataaaatacagaaaatatggtaaaacataatatgggaaaagataaatttgggaaagttccatgttttcagacattcagattgcctagaaataatatatatcagccaagaaaataaaacctgtgttttatcagaaacattgcttatctcaaattttggtaataggaatatttcatttcagtggagaaaaaatgttctttgagtagacaccattatcacatagccagacagatagtatttggtaatatattgggaaatgctactttcttgagtttccatttcttacagattatttgggttatttgtcagccctctactagccaatttgtgttgaaaactgtctagggtcacacagcatctggatttagtttccttcaaatctagttggcatcattggtagagatcacatcttatgartggaaattgaattggaaatacattttgctaaaagtaagctttgctcttgctttcagggaagtgggtgcgtggttcactcaggctgatgccactgaaggtaaagtgtaggtgtcaaggcttgcaaagtaattgaccaaaggaaattttgttaaaattaaggctctttttagaatgctggaattaggataaacacacctcagtttttattctggcttagcacttgtagacgatgaagacttggttagaaaaccaaatttattcatttgaaaaatgagatgaataataccatagtttctcacagcatcactggtaacttcaaataagataatgcatatggaagtgtttcaaaaatttccacattatatacgatggtaaacttcttattactactattttcatttgtatttttgttcttggtccaaagtataggccaggccagctagatgactggctgcccattataggttacaaacttgatgatctctatgattctgaatcttaagaatttttcatagaagccactgcttctaatgttgtggaaactaccctgaaactgctctgcatcttgcattagtgttctgctgcgtacagttctcrgacaatccagttcattcggaatgccgctgggtgaaaacctcaccactgtttagtgacaagatagatccctgaccacgaaatctactggtggcaacattatattcaacctggctactctctgctcttataaatatcctctgcataaatcccaaataattggattttattcacttcctgcattggggctccctagcaactactatgtggaatccctctgataactgctcagtcatgataatacatatacaacctyatatgaggcacgaaccccacatagagcaactcttgaccaataaccctattctgtttctaagatggacaatttggaaatgcattttccacagaacctgaaagggtccccagtaggatcaagtagtaaccatgttgatactgtgtctttagactggctctcctttctttcctgattcgttcttcccaggctcccagttccgtttactaatatctatttccaaaacaaactaccttccaatctcagactctgcttattggaagaaaataataaaagaaaattactccatatatattatttacttaatttttacattaaatttgctatattaatattattccagttttactaataagatcactaaggctcaaatttatgtaacttgtgtagtaagaggattatgtcttcagactcagaccttctgtgattgccacatgtcagtttacttaggaaataaagttatgataagtcctttactaaaaaacaaacagatagaccaccaccagagcaataaacctgatgtatcattaatggaatgagaaagaggacagagcaaaggatgtcacagctgtctgacaaggggaagacacaaattttcctttaaattttgaagagaaattattttatattgtagataatttggtaccaataacaccccttacattatatctgccttgtgagtttattacaacagattctactctcataagttaagtttatgagacagatggccaaggaaaaggatagctcagatttggtccccacccaaatcacccaacaagaaccaacattatatttagataggttttacaatatctaccagacatctcgtattcttgagtcccatattctttatactaatatctgtgttccatactccttataataataaaatgacatttatatcttcaatctcttatccatctgagacattattgtcacattctagctgtaattgctgtaatttcatatccattgcactgagtgtaacttttggcacatttcacacacactctcactttgagaagatactataagatattgaaggagattctgttgagaagtctttaaatactcatrccatgctcagtgtggaatttggggtcacagcacaagatgagtaaatggatttcttttttgttgttgctgtttctaaagagtaaatgcctttttagttcttggatcatgcagactctgctgtattgcacatgcgctagaaccaggcactgtttagtaatggagtgacagttatttattatcattttactttctgtattcattcctactagcttcagctcaacatcatttattattgttgtcaccagtggcaaatgccagtaggcattgtaaaggtctgtaactaacatataatgatttagagtctgtggtcaatgagaacaaaatattaaaagaccaataatgcatgacttacgaagtgacaatggaaatagcagtggaaatcagtaattatcttaattgttaaacatgaatactcactggaccaatacgtggttatatccagtgatcaggcgtaccggagtgacacaggagtttgagtttgattcgggttcatagaacattcttcacagagctcattgtttattctgttcatgctttcagccagaataaaataggcatcttttatctgaaaaactcaaattcaaaagagacatgaaaatacaccttttaaaagagaataaaatttctaaacttattaataagatgtttgtaagtcctaaaagcttcctaaaatgttatatgacatacagactaaatcatattttctatttaaacagagcagtgcctgatactgtttaacacatcatagtttacagaacattttcaaattggtagcttatttataaaaagccctggagcttattttttgttatcttttccgtttggttttactaattaggaaatgaaacaaaaaatttaagtagtttatgcaagccatattaactgggaccaaatcgcaggtcttttggcctcaaacatgttctctttccagtacagcacacttgtaaactggaatagtctcatcatcccttaatattgtcattgatctactattgcaacagccagcattatagagtcaatattataaattgctgtactagaaagatggtttgttaaactgaagaccacaaaccttaaaatyagatgtatttaaaccttgcaaatttctacacgtccccatcctacaatcttctatcaatagcaaaattggcttgttgattaccatttagaaactacctggtaatgcccagaccctgaaagtctctcttggtgggtcacttcaccttgatgaagtggagtattgggcaagtagggtcatatagcaggggatcctgcagggtgaggatccaaagttagttcccaccacggaatccagaagagcaaaggcagttgctccttagtcattgtctcatcacattggcctgtgtgatgtttcaataaaacgagaattctaatttctagaagtttttcctgttttattttctgcaataggggcagcagtcgtagtagagacttaggaaattatttaagttgcagcagggtggcagctgaacgttcctcaaacttacctgagtaataactgtgggtttaaaaaggctcttcataaaattgattgaaagagagtttggggaatagaataggtgagcaaatgacttgccttttatagaactactgtaatgtataagtcaagagaatggactttggagtcacataaaccttgactcaaatctcagttccaccaattactgtccatatgaccttcataaagttacatttctaactttcaattttcttatctgtaaaatcatgatgatgataataataatatctattttataggtgtttttgaagattcaattagatatgtgaaaattcttgtttggtttctggcacataggaagtgaacaataaattttgatttttataaaatgaatctcatgaaaaatgcagatctttgtgtgctcctgatgtgctttgactttttattgagtagctcagggagctttgtaaatacaaatctctctgactcctgatatgggamtacttggtttcctgtttcatggtactaagtatttttgacatcatggacactttactaccagaagtcttttgaaattattttttgcctcaagaaggggactaatgaagaaatgctttaagagattaaaaggaagaaggcattgtgattcttaatgatgccagcaagtttatgtaaatctgtattcacaaaagtaagctagaactgaaatagatatccaaaaaagcaactcttgttaatgcaacatcaccgaaaagttgacccaatagttgtcaagttcttatttccctcaccatttagtaaaatgcctggctctgcactgggagtttttcttccttgtggaactttggtagcttggtaatccattagtttctgtctctgtcagttctcataaagttgcataggacttaaacttttcaatttttaatttttctgccaggcgcagtgactcacacctctaatcccagcactttgggaggctgaggtgggtggatcacttgaggccaggagttcaagaccagcctggccaacatggtgaaacaccatctctactaaaaatacagaaattagctgggcatggcaatgcaygcctgtaatcccagctactaggaagggtaaggtgggaggattgcttgaacccaggaggtggaggtagcagtgagcggagattgtgtccactgcactccagcctgggtgacagagtgagagactgcctaaaaaaaaaaaaaaagaaagaaaagaaaagaaagaaaaaagaaaaaaacaacatttaatttttctagatgtataatgattttttaaaaaaagagaaaaaaatacatctcattctgatatttattggatgcatgttggagatagttctgcaagtagtcatttataattacctcttctttctttgcccctgcccaagaagaacatattctacagtcattctttcctccgcctgtacaacttgaaatccaataaggtctaaatactaaatcaaaggttttgttctgtctcacacaacttaaactttgattatagtgtcttgtaggtgagtggtgagaaaaggaatttgttagcactgaattagactgggtaagatttttatttaaggatatttgaatctgctagttctaattgctggaattgagtttaatgaatagaacattaaaaacaagacatttaaatattataatttcaacgatagtcatttcatatttcattgtgaccaggttatactacatttttaaagatacattatttstcatatatactgatgaccccaaattacagaaattgtaatatgcagtctttgcttgatgactaaggtctgtcatgtgtttaacattatattcacttaagagcatatagtttgtcaacctgccctgccttagagaaaatctctggggccattgaatctatataaggtctataaatagaagtaatttaggacagaaataagaacagttgcctaggttactggacacaacctcaaaacgtcaatagcaacagatgaactggagcatatcaaatcttaaaatacttgcgatggttcttagtgtaaaaaaaatgccatgtaaactttatgttggtgataggaaaaactgcctcacttttgcttgtttacatgcagttacctgaatatccttcactatgaaatagaaaaacaattccatggatgagtggtttactctaaaaattaaaaacattttaacaggccataattattatcagtatatactctcaataactcaaatttgtacggaattaccttacagaatattgggacacatgacctcattaccatcttcatgatctaatttggcttattataaaaaacagttttaatcaatatagataaaatttcattaatcagcagcaacacagcaggcaatacattttctcatcattggttactatcatttcaattttatgtttggcagtaactctgctctcctatctttctgggtgatctttttcatatttttcatggtttccttttcctctatctatttttaaacattagggtttattagagttctcatataagccctatagtcctccagctcttcctacttttcttagacattgtcacataatcccaagatttcaaatatcatatgtaggcatgtgattctagcctagtcctgtcttttcagctctgactacatatattgggaggcctacaaatttcctctccttgaaataatcacaggcatctgtagatcccactgtttccaaacctaaatgcaccaccttaatccactaatctactcaaactcttacattccttaaggcacctctgtacattcagttgcacaaatctaaactcaggaatagtttttgagtcttcccatagctaatcatacaacatgttctggttttactctcttctaagtattttctgaacttgtccatttttcaccatctccactatcaccactgtcaaagaagaattgcaccaaagttaaataagagaggaagactttattcaaggcttttgcaatggaacaaaggctagaattcattctgagctcaactctgctgaaacaaagatttgtcagagatatggtgagagggattatagtccatcaaatttgctaattgcctttaaccaaagaaatcgtaaaacttctcataaatgttttctttataacaggagatggttttacaacttggagaaagccgttttcaagcggaggggaacattcatgccatcttggtccctcctttagtttaggcaccggcacctctcacctagatttctgcagcatgttcctaacttgtctcctgccatcagttttgtaaacttccattgtccatacttaagctcctgtgatatttccaaagtgaaaaatctgtcatctatcatcatacataaaagcccttttaggtcttagtgtcaccccttgcccttagcatgaaatccaatctcctaatgccctctgtaaaggaacttcagggtctgctctcatttgcattatattttgccggtttctcttcaatgctacctcctcgtgcagaaatctcaggtcttacaaccatcaggctcaccctcacaccatttcattatctctgagaaacacaattcctacgctgccccctctttccctttactagtatctgctcatcattaggattccagattagcccagccttctctgatacgcaagtctgagatagtttccctccaataatcttccattacatgtggattctcacattttgatattcattgtgtctgtataatttcctatataatggatttttctccctgctaaattctaaactccattacagcaggggacatgttgtcttcttttagcactacatttgcagaacgtaggacactacttagtacagaggagattcatatgtgaatcacgtcatataggaaagaacataaggagaggctttattttgtaagatatcttgccccaaaagcacaccctaggctaatatattgagcctagggtattacatgaatttatttctttatcttttttcttccaacagttgtaactccttgtgccagataaatcttactataaattcttagacactacactgaaatattcaatttagtaccagctagtgtaaatattaattgatctgcttgtttgccgaagtccttcactacgccattttattcctggccatataagggatatagaacctcaatcctttttatttgctacaatgatccttgtgtttctgacagagagttaggattttccctgagcctatatttctgatttttccatgtcagaatggtctagttttgtcttttttacttcctttcaaaagttcttctagatgagcccaactccctttattctcataaagctttctttatactttagcccctattgatttaataaaacaaaaacttctgctgaaaagctgtctaaaggacagtttactcactccttttggatttttacatgtcaagtgcactaggctctatctctatccattgtaaagtagtgtacttgagcagtttgatctttaagttctttacttgaatttaaatttagtgtcatttctttaattttataagtcactgtataaaaatctagacagagaaaaattaaagtttaaaacactgtatattatagtatccaaaacttcttatatacgagttaataaatgcttcttgaaatttcaatctgggaaagatttttaccaaatatcttaatatgctcttacttatcagacagtggagcttcattaaaatatgtacattttcatcctgctttggttactgggaagttctatgtaaaaattaatattcaatagctaatctgaattgcttagtatataatttttaaaaattaaaaagatatcttttttattatagtttttcttaatttagtttttccgttgtcaaaattttcttatcaccaatgatgaagtatattttagagtgagagaaggtataggcatcaagtatatttttgcaacaattagaacttctgtgatttaagcctaaatctctctyctcttccattgatttatagagtasaacgttggtattcaaaaatgccmgttttccaccttataacatggacaaaaaaaccaaagttctatatctttagtagtttataatgccaccaaggcatgaatttaagtggtatattgtgatatatgtgacttacttgctacttagtgaacctagcctgccatccattctttaaacagagttttctactcatcgatgcatttacagtggaagaaatagcaagcagagaagttctgagaagaaaatgtttttggaggtgaatgttggtgaagtgagcagtaatagaagtctgaaactaaaagggaggcctggtccagatgatgtataaaccatcataagacatttgccttttactttgagtagaatgagaagccattggaggggtttgaagccagaagaatcatgatatgacatgttttaaaggagtctttctgaatgctgtgttgaaaatagtctgagaagtgattcaggaagaagcagaaagttaaaaaccattgctattattttggtgaaaaatggtggagacagagaccaggattttagaaatggggaggttgaacgttgttgattgtgtatatatggtgagaggtaaaactaactaaatttgctaaaagattggatattgggaatgagagagacaggagtcagggacaactcaaggttttggcttcagaactgggaagatgggcttactatttataytgatacagaggagactgaattgagcagtctggagatggtgaaagagcagaaattaattttgactgtgactagactaaaagtcagttgaaaaaccaagcaaagatgtcagctagactggaaattatcttatatrcatagctttatattatwattttgcaaccttctaaacttacagtgaagttttatgtattacttggtgaccatttttttttcctcaaggaattggctttaggtctgttttccttcaaatttcagacttcatcccccaacaaatctcctcttttctgacatacttgttctcttgaatagcacctttttagtaatgccaccactaaccactgacttaaaactgtgactccatttccaactctcttataacctctttccattttttctttacttttttccataacattaccttcactctctgatgtattacatatttgcttgtttgtttagtctccctattagatagcaaattcaatgaaggcaacagttttaatgttcttttttttcccatgatgtattcccccacacttagaacagtgtctggctagtaaatgtgctttaaatatttattgagtcaataaataaacrgtgttaaccatatatgtgctttgggaaaagagacctgtgcagaaaatttgggggtggtggggttgtttcagatacagcacttgaatccaaccaattataatgtagctacagaataaatagggtagctcctatatttccaaaatagtattttagtagataattacttagacaatgggcatttggaaaaatgttgaggctaaagtactcaggtgattctttctctttgtaggtttaaaggtgtttgtggtagacatctggctagcaagtatgtctctgctttttctgccttaaattgtcatcattgaaaaagtcctatttcatttatgttgaaaattgaacatgtatacatattgttgaattattagtccctggttaacaaaaatatacttacatcttttcctactaaagacaataagtgtgtagtaataggtaaggtagcagaaaaagaagccaaatgcaacaccttcttttacgtgctttctaatattctaaaaattacctttgtacggtgaaagtaccataaccgaaatagtatttttatattcatatttttaatcagtgagtaacttctaacttacatttattttttagaaatgtgaacatgtatttctaatatataagttgtttaggctatatagcactctaaacatctaaagcttggctaaaatcccatgtaaatatgaacagacatataatagaagcatttccttgagtgtaaagtcatcagctatgtaatagtcatgtacttgtaagaaacagagcttttagaaaaagtcagcctccaaacatgtctcttcgtttctgatgctaagaccattttaaaggagagcacaatttctggagctagactcctatgtttgaatcagactttgccacttactaactgctgtcattgagcaagttactgaacatttctgtgttttgcttacttatttttaaaatggacatacatcatagggttattgtgaggcttctaggagttaatatttataaggaatgatgtatcattaagtgataaaaaatatctgtcatcatcataatcattaccaccaccaccactatcacggttgtcatcattatttgttgagtggattcacatttatgacatctctgctatttttgcagcttggcaacattcaccttgctaattagttctcttcagatttttcagaagggtttctggggagagccagcctgattggccaagctaaataaatttcctcctatgtacaaagtcctttacatgggattctttcatgaatttctagttaatttatagatgggtagctcttgagccacatgcctaccctggtccagtttcaaactgcagctcagaagaaaagaagtgctgtgttgtcagggctgttatcacaccagatgcctaaatccgtttgcttgcaattatgtagtcacgaatgtagcattagattcatgttgttctttgaaatgatgaaattagaaactactgttactaaaatttcctaaaataatataaaatggtgttataaggaaaaaggatttcattttcaaatatagtttctaaaaatatgcagaactcgcttggttttgtttgctattgtttttgtaagaagcaccaagagtgcctgggtcttagggtcaccatccctaagattaatcttggctctttttattagtgacagtatgacatttagwaatatatatatatatatttctctgagatactggttccttatatttcaactcagagaatacctaccttgtaatattataattagaaataatgcatataaaggaccttgtgtagtgataaaaacaaagtagatgcctaacacatggtctgttctattaaaatatagtgtttataaagaacagtaacttcaaatcataagggattcatattgtgcagtgaattaaatataagttacctaaggtaaaggcgaaccagagtagatttaaaaaaacagtttatgttttaatttgcagggagggaatagaaaaaaaggcacaaggaataggaataaacaaaagtatatagaaggaaggaagaaaggaaggaaggaagggagtaaggaaggaaagaaggaaggatggaaggaaggaagggagcaaaggaagggagggagaaagaaagagaggagaggtttgggttggggcaggaagactctctatttaccaagagtaatagtgtgcaatgaactgaagaatatgactaatgcaatcctcagctcctgagttccagcaacataaacaacaacaacaaagggccctatatgtactagataaaaangagtaaatatttatttttgtgactttaggatggtaaaggatgttccaaatgtgataccaaagaccaaaaacaaaagaaaagggrcgcgaactttactgctgagaatacaaaataaaaaaggtaaacccaagcaaacaaaacacaaaataaagacaaacatccatttgaggagataataatcacaaattatataagaaaatgtttatatattcatagaaatagattttcacaaattaataagaagaaatgactcctcaccccactttccacscctggccaacagaaaactgggcataggccctattacaaggtattcataaagaatacatgtacatttatagtaagtatgttaattgttgtcccatctcatcagagattacaaaaatgcaaatgaaaacaacaatgaaatactatattcggataacatttgaagaagacatgaaaagattgttaatatccattgtcagaaagtttttatggaaaattgatactcaaacactttgtggagataccaattagggtaagctgtctgcaggaaaactgggaagtaagcattgaaaacctttataaaagtgcattctctttgtcttctagaatgtttgcccagatacatttggagaactgcagaaagatattcaccactcagtatacmcacacacacacacacacacacacacacacacacacacacacacacaaaacacctacctatctacataaatatgaaacaactgataaccattaataacatgtagataaatgataccagatctaaatcatgaaataagagttataaaatgtgacaaatctatattatacagacactggtctactttataatgttaaaaaataaggaacaaaacagtatacataatatgatctcattttgcaatataatttgtaaaataatgacacatatatatgtagcctacaagaatagtcttaaaatattgctttcaaaatctttggtatatgaaacaatattttatgaaaataaaggtattctgtatgaaagtacagagggaaaaagaagcctaccatactactgagagtttgtgcataattttatagaccaaaatgtttcaaataaacataaggaaaaaatagctatctataagtttactatctagaatgagccgtggttgttaatccatttgattttcttaatctttaaaaagttacattaatagaaagtatatatactcttactgaatatttaatgaagcatacattattaaagcccactgtaagacgaaatttttgttctctatcttttgatagaggctactaattcttgtctcaaactggctaaayattctttcatttccaaacagtagcactacctctagactaagtctaatgccctgaagttcagatacaaactaatatgccagtgggattgatgtcaaagtgatagaattgcagaatagatyttagtgacaatttttcaggctagttctaattgattgagtagaattccaccactgcagttctgttgctgatgattattgttaaaaatgactgaaaacaaaagagtcaaccaagcactccagagatcactggctccgtaaactggttagcttacatgagggtcagtctgagccaaaatgtccactggtccttagctaaaatgtcagtgtagggaggagtttctctaccgtgtactgttgacattttggaccagacaattctttgttgtagtagctgccctgtgcattgtagggtgtttagcagcatctctggtctctacccagtagatgccaatgaagcaccatcattgtctggggaaacagccaaagtttgttgtctcgcgataagaggaacaaagatgctgacacatacacacggagtgggtttaagagcggaaagtttaataggcaaaagaaagaagagagagcttcctcatgcagagaaagggggtccccaagtatgtttctgggtttggggtgagatgaggtccactttatagaggggcttgaggagatggtgtttgatttaaattgggcccaggggattggtttgaccaggtgtgctatttacatagcccacaaatcttttattatgtagataaggttttacctggctggtgccatgacacctgcacatgtggcgacaaggaaaaggaagaaggaatcaccatgttggatgtacctagcttccaggtacagctgatgccatttatctatgcaaatttccatcttgcttatctatgcttgtaacttgatttttcaggctgctttttattagaaaagaaatgatttgggggctgctttttattaaaagaaaattctaccaagaactctttcaccctcactaactgcctaaataatttcttactactctatcaccagtagcgcacacctctcacrtcacttgtgactaacaawaatcttccaagagattgccaagtaacaatgaggttgtgattgcggagtcggggagaggtaaaatcaaccaaaggaacagccattctttcttaggaaagatcgttcttttctactgagtccttcctaattttgaggttaaaatattctttttaagaaaagaatagtgatagtggatggtaagttttttgtggtaattttttcttcctttttaaattttttgttttaaacgtgtgtgttttattgcccttacttggtaaaataaaataatttgcaaacatatgtttattctgctactttttaaaaaaaattcgcatgcccatgaaagcccatgcttaagaacctttggcaaaaaccatggtctctcatcttttactttgaaaatgtttccaattactatagatgtgacttgtctgagagccatttgtgttgagtctgcagtaaaactggaatatatcttcctgaaagattcctccaaacaccctagagttttacctttgaaagcttaactaattgaagccttacttttaatttccttttgngctcatttatagacatggcttcatctatatcctgtctcagtactaagataggctcntgtgtcagctgctgcctcttgagcagagggtcttatttctagtgcctgaatggaattttacttggaaaagccttgtctantgctatgggcctttctaatccagatgttccccctccaaattcacattcagaagacaagaagaattatgttttgtttatttaatgttggtgtgtgttctgaccagatggatttagcttgtacaaactgattgtattgttagtgctactgatgtaggataggtgttaccatcaaccctgtgttttgattcttgcagcagcaaaggggtgttttacatgttttgaatcttaggcagtgattgtgccatattttaacataaatattcatgtaaaataattcttatggtactacataaaaagggattgaattacttccattgcatatagaaggaagattcctttaattgagatctgacaatgtaacacagaagtatatttcaaaacaattaagcctcatgattttgtttggagaattacgaatgctgtaggcactgtaatcagaagaataaatataaaaaatgatctggcagtttttagcacttaaaacttagattctttgagaattttttgaattgtcagaataacatgccaacattgtgactctctggtgacattctcccatattctctttcatttatttttttcttgattatgaaagaaaaataaatcaaaaaagaaactagaaaaaataatactattctatatataagaaaatattcaaaatcttgcacattaacttattatacagacaagatgtaatctattacagttgcatgtgaattgtactttgagaatttctgtggtccaggtgattgaatgaaaactggttaaattataccaacaaacaccaattctctttctacctcagtgccttctcaattgtgtcatgtttcctcctcctatcactttatccatcttctcttccttgtttattttccttagtgaatcatgtatcactaacatgagcattttattaataatcctgaatgaaaatatattgtttcaaaatgaatatattatttcattcttcttctacaaatcttttaaactctctttttttatcattttgaaatattctaaggctcaatcttggaatctaatagagacaagggattctttgcaagctcttctatcttaattcttcacatattgccttactttgtgaattctcaygagcagctcaaggagggctttgtcactttctgctggaagaatgcttgatgattcttatcttgtcagatgagtccagaaggtctttgttcctgggaccagttcctaattagtgtcctagtgttctcctatcctataagatctcaagtttgttacatatcaccttaaataaaaaaatacacaaataaatatataaatacatagatagatgatagatatataacattgaaacgtgccattgaaacttctattttacaaattgacccgaacaattttattttttgattattgtgtcccacctctggggaaataattcataactcacttggggatttattaaatgaatctttagctgaaggaggcttagagaaaatagaaaaattcagtgtgtatacagataaaacattttcaactmrtcaagatgagtcctttttctaagaattttttttctaattccaaaaattctctttagaaaaaacattatttagtaaacatctattttaggtactgcctacatttttgtaagtaatctagaattttagaaatcatcttcaatttctggtagatttcaaggtattacaaattgcttgaagttccaaaactaataccactgtaatggaagacccattctctttttttttagtttttaatttttgtggatacatgataggtgtatgtatttatggagtacatgaattattttgataatggcatgcaacagaatagtcaaatattttgtggtgctttaagtacttttctgtagcattctgatgggccatactttcagagcctgcagaactacattttgaaagtttggtctcttctgcaaactcactatcatttctttttttctttccttttctttttttctttttctttttttttcttttttttttttgagatgaagtttcgctgttgttacccatgctggagtgcaatggcccaatcttggctcaccgcaacctctgcctactgggttcaagtgattctcctgtctcagcctcccgaatagctaggattacaggcatgcaccaccacacctggctaattttgtatttttagtagagatggggtttctccatgttggtcaggctggtctcgaattcccaaccttaggtaatccacctgcctcggcctcccaaagtgctgggattacaggcatgagccaccacacccagccaactcactatcatttctaatgtaaatcacttggagaagtgagtgctcagaaagccataataagaaaaccctggcctctgtaggacttggctacctatacttatatttgggacacaatatcctgtttgtgtacctgggtgatcagtaatggatatacgatggtttccacaatacataggatgggtcataactagcgtagaagaataagccagaccttagttgcctctttaccaagaccatatcactctgcatctgtctgcctttcaaaatctttaatatcttgtctaatatttttatatatagtccaggcttatgctagctgatcaaagatagttaagagaaattttattttttcataggcaagatgttaggtagaaagtgtgtggcggtcctttgaccctcacgtgaaaccaaggaggttgtggcaatgataattaggaagaaatactcaagtgggaggtgaayctggagaagactagcataggctgcttggtccagttgcgttacccctgtggagtttgtcttagcaagaatattttattgagacatcaggatccatttaaacatcctaaattacaagttgcatgttatttaatgatgttattctagtattaagattgggtagagctttaattgacaagctatgtggttatccaaaattaggtgagtttttatagcatctcagtttataagctattaataacattcaaattggctttggtgagtatctgtgatcataggataatgttttcttgtttacttaagccctcacttctttttactcctcactaagaagatctctagcaaagagaaaaaaaaatagttttagactttcctttagsgaagggactctttttcttcaggaaaatatgctgcacygtgttgggagatgagactctgatggatgaatatatatatgacaatacttaaaaagtgtgcttagaaaatatgcagtattttgctgcaggagaacacacaggaaagatgagaaaaggacagatggggcccatctaagaagacaggatgccaaygactgaaaatggtagccaccatgaagtaaattattctgtatttgctgacatacatatgacaattcaggtgcatattttacattgtttttaattttttattttgaagtaattttataattacagaaagctgaaaaaagtacrgagatcctataggcctttcacctaatttcccctaatgttaacaacttgcatacccagggttcatttgtcaaaatgaagaaatgaccattggtattatactactaattaaaccacagattttattcaaatttcatcaatttttccacctatattctttttctgttctaggattcaacattttatttagttgttacatctcctagtcccctctagagtatggtatttcctgaatcttcccttatgtttcatgatcttgatatttttgaagaatacagatgaagtattttatagaatctcatataatttgaatttgtcttatgttttcctcattattttaaggttatgcatttttggaggaaatatcacaaaactaacatgtccttctcagtccatcaaatcaggaggttcaagatattaatagatcttatttctggtgatgttggtttttgtcatttggtgttggttgctggctttttccactgaaaaactaagttttttttttttctttgtagttaatatcttgggtgcagtgccagtttttatgtttatttttatttttatttttttgccagagttttgctctgttgcccaggctggagtgcaatagcgagatcttggctcactgccacctcagcctcccgggttcaagcgattctcctgcctcagcctccagagtagctgggattacaggcacccacyaccawgcccagctaattttttgtatttttagtagagatggggtttcaccatgctggtcaggctgatctcgaattcctgacctcaagtgatccgcccaccgcagcctcccaaagtgctgggattacaggcgtgagccactgcacccagccaaagtgcagtgctttaagactattcaattttgttccttctcaaatgttcacctataaattttaatctccatcaatgaaccttgycaaagaataattactgtggtgtttgcctaacccatgattttctactttgctcacttcttctatatttattagttggagttttaaggaagagctgtcccttctcccacatttagttattcattcaattatttatttatatcactatgaactcatggatatttattgtagtctatggagtttaaccttatttcactgaccaaattgtccaayctttgatatagaaagttttttttgtgtttttttggtattgaaagtttttttctttttttaaattttacttttttcctatttcatgattattattacagatggggtcttgctatgttggccagtctggtcttgaactcctggcttcaagcagtccccctgccttagcccctgaaagtattggaattacagcsatgagccaccaggcctggacatcctgtttctttttaacaggtccttcttttttgagcaattacttactttttgccaccataggatgattcatactcaactaatttgtcaactcttctagctgaattctacttgccartgtcaggtggcatctacccaaggcaagcaaacacttacatcatatctctttcagaaggcgcttattgccctagatctcaggttcattggttkacttctgacttctgaccaagaaagccttaaatttctccttgtcttgatgggattcyttctgagtacaggcccctggcctcccttttcttaaagcatctaytttagagaacttcccattgtaaattctttctctgtccctttgtgatgtacatcttgtcccagtttcttgccaatttaacaaaatataatatctttcttaagcatctgtgaaccatctctgaaatgtagttatcaagaaaggtaaagcctctatttcctactctctgtaggagggtagaagcctattcagtaagtaccatttagcaaacacagatggtctaatgacattgaccatctccactaatgtcctccartacttttctactagctcaccccagtgcttaaaaactctccttcacttcgcttcagcagagttgagttccatctctgcctccattgcagcagtattgaataaaattttccttggctgtttaactcagtcagtgaarttattatttgacmactatgattggctttaggaaaagtcatggacttgcagagttttggctttggttgttgatgtaaatgtggaagcratacttttttacccatattctacatctttaagtaaaaatcagagatattgcaatgttaagtcattttactttgtaaaattctcatgttgtccctaaacattttcacaaaccttcacatgtacacaaatgacatatataagtgattttgaagaattttacaatgttgggttactataatggagtaagaagggaatagttatacaagatcactctcttgtatatatataagagtgattttgaagaattttacaatgttgggttactataatggagtaagaagggaatagttatacaagatcactctcaaatgaatgcagtagatcgagatcagaaatgcagagaagaaaagtggcctatgggaatataagccctcagtaatttatgaagttcttgagtaaacttgagactctcaaagaatgtatgagaagaagcatgactgttttatttatatttcagaatatggaaacttctgctaactttgggtttaggtcataaactaaactgacttcaagcgatccgaatcatgaatgattacccagtaatggagtcagaaagaaataatagtagtatattactcaaattgatataaactattttattttacctttttaaaaacctagtaaataggcaatagattaatattatgtgaaatataacagcttatttttctttgtgcattacataatctatattcagttgttaataatataatgagaatagattttatattttctttgccacgactgtgtcactacaggtgttgcatctggttttcaatggaaggagctataattagcatatttatatggatcattagtcttggtcatattgaatcataataatatagacatatgtaagcataatttatggacaagcaaatgccatatttagaattctatacaatattcctcaaattgttattttatcaagaaaattgttgttagaaagatagaatgaaattttcaaatttccataaacaatttggagggaaatctggtaattatattcaattacacatttaatacatacatagtaataaaattatattcatgcaaaaatatgattaaaagaaaatacatataaaactaggaggtatataattctttctcaaatcttactttagttgttatactattcatataatttgtcattataaaattcatataataagatttaacttttttaaaagtcactagaattggttttctaattgtattatatgcatctttaccttaccaaccaaaatgttctaaatacgtctttttctgcacagggatcttttaaactgtttgagagcagaaatggtgccatccaactctactttacagtagacatcaataaatgctgggtgatgatgctgtggatgactcattgtcagtattgtgaccaaatataattgtactatgctataatacaataataggatgaaggtgtcctgatataagcaggaaagcttatttataacttgaagggcctcattatctgactgagtagtctgtctcttttttgatagattttcttttccatctttgtggtcagactaatacaccttctgtctacttccaatttactgtaaactgggtcatggaattcaggtaaccaaacttattcaaattataagcaaagtataagtttctgggcactgaatagcatcttaaaggcattcttgtgaataaaatagacttttagagagcattgtttgatttcctcacagcctttataatatttatttattgaactgtttgaggatttctatattgtcagttttggcagcatcaaaagacaaaaagtatatcagcattctggaacgaggaaccaaagaaaacacaatgcaattaaataaattaaatttagtgtaaatctttgcaatatttatatttaaaaataaaaatacaggacagttttgatatggcttagttatagtttatttttgtaatgggcatttcagttgagtgttaagtatgagtaaataatttacatgaatgttacaaaatttctattacaactttggtctttgtagagtgcgaatatagtgtcctgaacaaagaccattattgttttcttgactggtcagaattcatctagaatttgcaattctgtctggaagtcattttatgaaagagacgatgatatactgaaatatccccaaaggaaaaccttgattctgatcttctggataacaagttcttgaagtgtctggaattgaagagttctacagaaaaggaataggtgaaggaatgaatgagagaatgggaagatgacagttaatagcatctgatgattatttttcacataactgcaagatcatcttgtggaaaatagattacatatactcctttaggttctagaggtctgaattcaggctaatatgtagacatagagaggaaagataaagattttctaataactacctctgtctaaaaatgtaattcagtgcctcagaaggaagtacttgcctgttgttggaagacaaaagtaagatatcaagtggaaaaagggttaacagctcaagtagaatctcctcagtgatgaggtcactgaagtcctggggttggtcctcactgttgggaatagaaactctttagtgttgatgcccctaawcaaatcaaccaggcttttaaagattgactcttgctaaacaaatytaccaacccttcaatatataattatatatacatataattttagaggaaagagtataaaggcttggatcttcaccttctggataaaatatatattgcaataactatatggccgtgctaggatcacatctgtcaaaaggatgaggatattcacgtcagctttyttgatacctgctcacatcagcatcttgttttaggggctccatacagatcaccacctttgaaacaacttttctttttggagaaaggtttatgctacagccacacttaagtgtaaatttctgtcattatgatacatgccaagatcctgaatgaaatttatctatgtgaagattacttctggaggtcatgagtctcatttattatgttttaatttttattggtaaaatgtgcatggactgctttatttctcaggcccagagaatccagcattggactttcaggaaagtccgaaaagtggtgaaagcattattggtcacaaatgttatagatggaatgatattttgaaataagatattatatatcctgtaagatctctcatgcctccacaaaaaattgtagaaaatgttatttgtgtttcattttttattgtgaaaaattaaatgcacagaaatgtttaatcactagtacaatacagactcatattcccattacctagaaataacartttaaccatagttccagagccatatttgggtttttcttaaactacatcaaagtaatttraaacatcatagcattttatatctaaatatttcagcaggaatatcccaaaataatgaacattctcttatataaccacaatatgatcacaacactgaacaaaattaacaatcacttcttaattttccttaatactcagtttatacacagattccttcgtccatctcccaaatgccctttacaacctttatttatctctagaacaaggagagaaactagattcacagataaaatataactatttcttatgaaaaagaaataaaacattggagagggtttcattataggagatctgcaaatgttccctaaggaactcatttccatgattgtgacaaatggacattaatatctacctcatcatattattatttaaatggcataattttttcaaaagtgctcaatagagtgactggcatactggaagtgtgaacaaatgtcaatcactatcattattatatttaagacatagataatcagtcaaatatacctgataatttactctgtttcgacccagtccctgaagcctataaagttttataataaaatgagacagttttataacagtgaaagtaacccactgggtgttaagaggggtgttttttgatggatgaggaaactgagagctaattaaagcaaatatatattttaagtctgatttagaggtctatacataaaaatgtagaaatgtataccacttcttaaagtccaactccaattcctaaatgttaattttaaaatattacagaaaattgctcttaatgaattctcaggaatatatttgagatcacaatttagtatgcttaggataccaatgcataaatcttgcttaaataaatttgttctcaaaattttaattaggttgaatttttgccaaaagcactttatattttctaaaattccatcaaagtgttctatgctatttatacttttgatgtattaaaaatacatctatttcccaaatgcctctaggcttattttaagaaaacacgtacatgtcactattaaatttgagacacgctgaaggtaagaacatgagttatcattagagaactatttttccaatatgtatayataccatgtgtatatttttaaagtttatcaaacattttattttgaatgttgagttctagctacccattcatatgagtgatatgaattaattagaaattctctaatatttataaaattaaaaaaatcataattgtggattatttattaacaaaataatatttctatgtttcatccagtttcatggatagagaaattagcaaagttatatgatttacctaagaatttaatttccatgaaaaaaagttatagttaaggaaagccaaaaarraaattgtggaaagggaaagctactaatgaagacacatggactgaaacatcacatctgtcactagccagctggagagttcttttaagtcatttcccctttctgggacaattttcttatctgcaaaataagtgatgtggattctggggcttctgagaataagataattataatggcgctatatttctatggcatttattgcttatggaaagcacttactcaaaatatttcatttggttcttgcctaggctctgtgaggtaggctacatgaatattttagttatccttcttttccattttgtggaaagtcttggaggccaagatgatacatttatatacattatttatatatgcaccatttactgagtccctaatatattccaggtacaattgtttatagtcataactaattctcacacaactcctataaatttattatcatttaacatatgaaactggggtttaggattgttaattgctgtataactaatacttggccaaagtggaatttgaatggtggtctgtatgacaacaatttctgcatttttcctattatgtcacttttttcctttcttttccttttgtctcttttaaggggtaattatagtcatttaaattttttaagcagataaataatgtaagcatatcaatatttgatgcagtagtaatgagcatagtacaattaataagcagatatgaagatgaaaaacgatcaattgtgctattaatacagtcttggaggaataataaggacctgagtttgaaaaatactaggaaaagtgcataagagaaatgaatctaagatctgtgtagaggcaaaagcttggcatttgtgtaaatgtggttgacaatgaaaatacaagatcagtgatataaaattttgagctcaaaagtcttgagttttttttagctcttgagtatttctgttaacaatcacaaacaaacatttatcatgcaatatgttcctactttaagaggacttattttctaggggaaggagaaaaaaatacatctaaaaagtacaaatgaaaaattatgtgtaatgtcataattattattctgaaagatgatattgttttcaacaacatctctagtaagtgagataagatagttgtgttcacaagattagactacaagagagaacaatatgaacatctagggggaagaactgacaacatgttctaaaaattttgagagaataattacacacacttgaagaatggagaaaggggcatatactatatgagtctggcctggaaatatgattaaatttggaccaacaaattgggggaagggaagatgagcaaaaataattaatgggcaatatctcaagatatttacctgcagcaacaaatagcttagcttagcttgagggtacagtgtgttgaaggaagtaagatgggatgagattgaaaagctggtagaaacaaaggttatgatgatccctgtgatgtactaattccattcctagatacatactcaagagaaatacacccatatgtgcacctaaagaaaagtccaagaatactcattatttatcatagccaaaaacggaatagttttcaaaatattgtttatagaaaaacatgaataaatttatagaaatatatatatatatatttgtagagtggaataatatctgtatagagcaatgagaataaacaaaatataactacatgcaacagaatagatgcatttcaagcacttaagtgctgaatacaaaaagccagacacaagaattcatgtgctattattccacacctttataagattaaaacatgggcaaatctacagttttagaaatsaagttagtgattacccttaggagatagtgactagcagaagatagaaggaggcttccgagtgtctgtaatctttttaaggtttcttgatatgagtgtaggtgcatggatttgctctgtttgtgaaaatcgttccaactgtacatttatgatttaggcattttatatgaattttctattttaatcaaacaaatataatggtggtgtttgaggaattgataccctttatttgataaggtgatgtaaagataaggagattagatgaaggattgcacaattccatcatattcagaaagattgaatcaagcagtagcaaagcaagaagatttaaaacaaaggagaatattaagaccagaagacagcaggaatggtaatattaatatatagagggaaatggatgtgataaaggataaaatggacaactgacagaataggctaaagaaaagaggataattttctaaaatataaaacttcaagactggaaggcaggaagtatcactgagaaacatgaaaatcaagaggataaatggtttggctgagtgtgtttttcatccttctgtgatgaggtattcctaacagcagtgaatgtactgatcacagtattggaaaggagaacaggactgaagaggttgtttggaagtaatcttcatagcagtgatggctgaagtcatgaaagtagcgtagctgacctatatgtacactgtagaagaactatattggctaattaacacatgcattacctcacacagttatcatctttgtggtgagaacactttacactcactcagcatgtttcaagaatacaatttactattcactgtagtcaccatgttgtataatagatttcttgaacttattcctcctgtctaaatgaaattttttatcctctgaccaacatcttctcaaaccccctcccccactaccccagctcctggtaacccctactctattctctccttttgtgataccgtttttagattctgcatatgagtgaggtcatgtggtactcatcattcagtgtctggttatttcacttaacataatttcctccagattccctgttgtcacaaatgacaggatttcattcttttttatggctgaatagtattccattatgtattccacaaggtatatacacttcagaacataatgtggtgcatagtaagtacttacaattttatttcccaatgtaaaaaagaaaagaaagtagatgagtgtgctaagggagaagataatgaagaaagttaaaagggtcagcacagattctttgggagatgcgcgtttggcagataaggggagatggaggactctgagaaggggcagttggatgtaaggggaaggcaaaaaccaagagagtggatcacgaggtcaggagttcaagaccagcctgtccaaaatggtgaaaccccgtctctactaaatatacaaaaattagytgggcacagtagtgggcgcctatagtcccagctacttgggaggctgaggtgggagaattgcttgaatctaggaggtagaggtggcagtgagctgagatcatgccactgcactccagcctgggtgacagagcaagactctgccttaaaacaaaacaaaacaaaaacaagaaaatgtttcaggcatcacttggtcagcactttcaggagttacaaacaaagtaaggataatgaagacagagaaaaacaataaaaatctgtgttccctggtcataggaaagttttatagcaggtgttggcaaattgtagtcaacaggtcaaatctggcctgctgcctgcttttgtacatgagctaagaatggcctttacatttttaagtggttgaaaaaattcagaatagatgtaatcagatgtgatcagaataatatttgtggcatgtgaaaattatgtaaaattcaaatttcaatgtctataataaggtgttattggaacagagacacactgatttgtttatgtagtattcatgactgctcttgcaatataacagagtaacaactctgccagttgagtaacggagtgatatggtgtgagctgcaaagcatatatcactatcttgtcctttatagaaaaattctgccgacctctcttttagagttaaattagtaaatgaaatctatgcttaaaaatgcctaataggcaattgggataacacagcttttcattgaaaaataatggataatattataaatagagttctgagattcactgcagagagtaaagaactgaatctatttgtgtaagtaatggttgacagttaacatcactttactcaaaaagtgtgttcttrcatatcatttgatgtccaaaacagcctgtcaggtaaagatcatggtatataatttaaagatttggaaacttaggttctaaacaatgtgactattctttggagaacaattgctttcaaaggtagacagcgatagagaaataccatcatggagaatgtgtatatattggtatattgtgggcaatattattcgtgtttgttggcttagtgatagaacaaaaactctagagctatatttyctgatttacatcctgattctaccattgactgacactataatcttgataaatcacttaatgtttcagagagactcgatttcctcacttacaaaattgggataataataattcctcatagggctgctatgaakyttaaakgtttcttgtgtttggtaacacattccaagatcaatagttacacaatataatcttattcagatggcagtgattgaaaaagcctttgacagttatttctatcagagttctgctctatagatgtaagcagaaacctaaacacatagccacctggcgatatatatcagagatattctacttacttaatttttcttaagctttgtacctcagtttctttgtttaacttgaacaaaataattcaataaagaatttttcacctagactttccaaacatcaagtattctcttaagtcttcctttggaattttcagcgtggttgaaattgatcgatgacatataataaatcatagaagcacttaaaaccttctgcaaaggtgtcagtaacttaatgttttgttgctgctattgttccccctgagaaaaaggaccagaattctctagaacttttaattttgcaaactattgcccaacttttggctcttatcttgtcagaggtaaatgtctgttgtaattcaccatttgagttgagatgttattaaggagatgaagtgcaaccaatgagctccctgtccacaacagggtcagtcgcaatcttatccaataattgactctgttccctgcatggcaggtggatagcagttgcaattactgtcattttgtgtctagggaaacttagacaggagggttaggtaacttcctcaaggtcatattggaaatcagtggcattccaagtaactgaacttggaatacacttaaccagttcagctcttgaatagctttattatgagaacagtaaataattttccataatataccagtgtatattcagcactatttattctaataaatagaatcacagatttatgacctctgagatacagaatgtaaagagaagcaccagttgaacctatctggagctattgtaatttgaacatttaaacaccttttatgagaatggagagaatgataatgaccggtagtcaagatggagaaaacccatttctattygtgagtcagtttaatgggttggtggcttataatttacttaacgtgcttgcatattacttttcatttcagaagtagtgagctgtgtcttcatttacgtgctttgccatatgccagcagtagtaaaagttgctcctctcttacaacctcacataggacacatttcctcagaaaagaaactacaaactactttcagaggctaagaaatagcacttgtgtcagttaaaaacttagtcttgtgtagcttaatttgattcttcatagaaaaaatacaaacaaaatgaaaaaatttattagacatatgaaaatattttgataattttattgaataagaaatagctaccatttatggaacattcaatatgtgtcaagcattatgctgagatatttacagaaaattcaaactaaaagcatcattgttttttctttattatgttaaagttgaggcatgactaattcatcctgtaattgcatatatacacataggtagacatagtctcatttcaagttaaattatgttatacatccacctttttatacgcacttttctaacaaaggtgatgcattacactaaattgatgttaatttaaaatttgaagcgtattagaaatttgcaaagtcccacatttattttataaaatggatttaagtatgttggacaccaagttctacagtgttattctaaatgtaacattatagttctagagcaaactattataatttaatagatttttatatgaaatattaagcctggaaagttttaattgaatgaatttaactatattgtgcctctgattttaaatgaacaagttttatgagtatcctataatatctacttattcctaaaatgcttttgacatagtggaatgattttaactctaattatcacatgttttaggctaagatgactcaactgcctgaggcagaaaaagaaaagattgctgagcaagttgctgatttcaagaaagtaaagagtaagctggatgctgagattgagatatgggatgatacaagcaacgacatcattgttctggccaagaacatgtgtatgatcatgatggagatgacagacttcactaggtaattatgtggaaaacgatgtgtaatattcataatggctgaaaatattagtcatattagtgaaacctcaagattctctgagtgtcaagtgccaaaaatcaggtggtaggggaaaagcaaatatagtattagaaagttgtaggtgtacaattctagaggtttcgatcgataaataaatatggcaagtttctcagaaacttctgtggaattggtttggacaccacttatactctctcaccttccccttccccaggcatctgctctgtgtatcatactagcatgtgacttctacaaagaatttggtaaaccaagtgattcgctggtattggagctatctgaatggttgagtttcatagctgtgtaattttagttatagtgatttatagcataatcaggatagtggtatcttttgcttctgagatgagaactagatatatttgaaattataatcacttaatgatagccatgaaaaaaatgtacattgtgggcatattgcagaagtaataaaaatgtttgttattgtcttaaaatgtcattttatagagttagtcaaaaagcaataaaatatatagtggctgccctactagtaactaatgtacacaaactataacaactaaaataattcagtcrtggtgtagttataaaagccacagtacagaaggatacactgaagctgacctagtacacttagaaaatctttcatttgtattaccatgtagtattcatgtatatggtgctgtgtaccgttggtacattcatttataccccaaaataactttcaggtggagtaatgaaataactgttaattttaaaatcataattaatggagaaaatgtacatgaatctttcagtgatattaaaattgagaaacagtttatgaaaattacatacaaaataatttacaaagaaaggattgttaaattgaacttcaaaaaatgtacatcaatagaatgtcctaagcaatattgaaatgtaaatggataactggataaacaaaaatttgatcccatttatatataaagaatacttgcagacataaaaaattaatattgtagtggaagaatgracaaagaatatggttatattattaaccactttctccttataaaagttatggcagacaaatatttgaaaaatattaaaaataaaatagttagaataagatgtattttaaatctatcaaatttgccaaaacttttaaaataggcttggtacagagcatcgtgttgaaaatctaatgacataagccttatagtaatttgggaatatgcgtaaaatgaaaatctttataaacttttcatacgtgcatcatctgtatccatatctgtactatacttcasggaacctatccaaaggaaataatataaagtgataaactttttatttttttttgagatggagtctcgctctgtcatccaggctggagtgcagtggcacgatctcggctcactgcaacctctgcctttggggttcaaacgattcttctgcctcagcctcccgagtagctgggactacaggcgcacaacaccacacccagctaatttttgtatttttagtagagacggagtttcaccatattggtgtggctggtctcaaactcctgacctcgtgatccgcccgcctcagcctcccaaagtgctgggattacaggcatgagtcaccgcacctggccaaacttttttgaataaaggaaacccttggcctctgaaagtttactgaaaaatcaactcacaaaaggcagattaataggtgaaaaaacatataaatttatttaccaagtatatatggtagccttcagaatgaagacccaaagacacaggataaattgtttatttttatgcttaagttcaataaagtatggacaatcatgtagaaatatgatgggacaaataaggtatgatcttatgttaatagactgagtggggtacccagcaaggcctgtctgtctagatttttcttggcttctctgaacatgtatttctaccttctggatatggggcaagaccctcgctggaatatgggtcttatgacctatagtcaaacaaggtaggtaggaaaattattgtatgactagtacaattacacagagagatggagatcgttttagaataatatttttatgttttatcactagctttggggaaaaggggttctggcttctgtgacctgccttggagaaggattctagtatttatgactagcctcaggggaaaatggaactgagcmacaggagaacagaaaaaaatcagagaaaaacttttgcttctgaagctgcttctaagtccttcattttggcgtatattttttttttctgagccccaacaggataactatagaattatttaaaataatagaaaaattgggatgattaaacaaatggttgcctgccacatgaaaagagtctatagaaaataaagtcaagttttttaaatagtatgaaagtagtctaaattttataatctattatgtatatggatgcatagatattctcatatgcatatttttgtctttgttttgttttataccaaacttactctttacaatataattcagttctactttgtattcttctgaaagaaatccactttccaaagattatgtgcagtgaagatttcattggaaagtgagaaaattaaatttattgtgtattatacatggaatttcataaaaatacctctttaaatgtctatttctattttttgcacttaactcttgccatttttccaactctagtccatagcttctaaatgtcttcttattcctcttcatatagaaagtaattcagttttggcccatggttcaatttctgcaggcaaagattcggagaaatctgtttgtatatgtctctgcttctctctttctctctgtctctgtttctctctctttctccacacatataatcacaagcattatataatacaaacatatataacatagacatgtatatgcctgtataggaacaaaactaaactttcatgggtttaaataatgattatgttttagtagttggattttggataatttaattacaacttttaaccttctataatttgttgctgatttaaagtatcaatacatttatatgaaaaacaacatatggaaagaaacctgaactataatagttatattataatatcatcttggtggctaggtgcggtggctcacgcctgtaatcccagcactttgggaggccaaggtggacaggtcaccagaggttgggagttcgagaccagcctgaccaacatagagaaaccctgtctctactaaaaatacaaaattagctgtgtgtggtggcatgcacctgtaatcccaactactcaggaagctgaggcaggagaatcacttgaacccaggatgcggagattgtggtgagccgagattgcaccattgcatatcagcctgggcaacaagagcgaaactctgtctcaaaaaaataaaaataaataaaataataataataataacttggtaagtggcactgagaagactcttaagctttctcaccataaaatagtataaataattcaagtgggtgtatttatagacaggatttagagctagaagggacaacaatgaagggtaaagccatgaggaacagaagctttgaagaagtgggcagagaaaatagaatctgataaagaaagagcattcaagtgttaataagaaaagtaacatacaaaggaggatgctgggcagagaatttcagtgagtaatcaatggtcttacttgaagataatgattaaaaagatactagtttggcaattagtagatttaatcaatttgttgttgacttttgctttacgaaatggtgaatggaaaaaaaccttatttaaaaagataggtaagagaatagcagatcaaaaaacaaagagactcaaggtagtaacttaaaagagactaatgatcatgacaagatttttgagacttctggatgtttgaatatattttaggctggagggaaagaggaaatggggagggacagaatgaaattgtaaaaggggaataaaaagctatagccaaaaatgagataaatggttagtgagaagggaaaacaaaacaaaacaaaacmaaaaaaaccatttaaaccaacataagtttacatggctgttccttctggtcacagcttgaatgaatgagctgagaatcagattagccttttttggccacccagggtaaagactttccccaactagtctgtacatcagtttcattatcactctatattactttccttttagcagttatcactttttggtttaaataattcattttttcccatatttcctgcctctatttccataacagagtataagttgtatgaatgtatgaaatttgcctttttttatacccagaatttataacagcatgtgtatatatgcttagtatatatttaatatgtagtagctgaattaattagatttttaaaatactactttaattcagaaggaaccaggaataaacaaaaaaacacaaaatttgaacaaaaagcagggaagtaagcataagcttactttgtgaaagtcttgaaagtcactctctttgcttgcttgttagcccatatatagatcctaaatgttgatactaagattttaattttaatgcccttatggcatttggaggagacacatagtccggagacctgggactaagactcttagaaaagcttatagccctacctttaaaaggggaaccagagatattttcacacaccagcttgatggagcatcaacggtgaatgcttttccctggggggtcttatttaaataaaggccatctttaagaaatagagatcccaagtgtgtgacctattaaactgatgaatttcaaattgcataatcagaaatgccaccatgaaagagaaattaagatgcaaaaaagaatgatcaccaaggaaattagaaaaggtgttgacacattcaaagaaggcttggtaaaacaccatcaataatatggttaggctttgtgtccccatccggatcttatcttgaattatcatcctcataattcccacatgtcaagggagagaccaggtgaaggcaattgaatcatggmgtcagtttcccccatgctgttcacgtgatagtgagcgagttatcaggagatctgatggtttcataaggggctcttccgccttcacttggcacttttctttcctgcgccttgtaaagaaggtgccttgcttctcctttgcctactgacatgattgtaagtttcctgagggctccccagccatgcggaactgtgagtcwattaaacctcttcctcttataaattacccagtctcgggcaattctttatagtagtgtgaaaatagactaatacaatcaatgacaacaaaaaaagactatttgaagtgaccacactacataggagaagtgtaagggttgaagatcagagttaaatggcctactattcttatattcaggaagaagtttaaagtattaacatactttgctacatagaaaattatatgcattatatgcattttaaatttccaagacatctttacaataatgaaaatagaattaaatagaataaatgttccatatcagtagacaaaattaatgtagagaagataagttagaaaatgagaataaaatgaaaatttagggtaaatataaaaaagcaatagcattataaatcataccaataatatcagtatttctaatatttagatttagtaagcttactagttttttaaaaataaaattatttaaaaatctgtcatttaacatagtggcgtataggaatcttttgatctaggaaccatgggaaagaggaagaaatctctctctaaaagagtaaaggaatgtgtaaaaaaagtgaaagaaatttcagaagtaaatacctaacagcttctatttgtggggtaatgccatctgtggaatatgagaagccttcagaagacaaacatggagtgacaactttgatagagaagcagatcttgatatataaaaggtaatcgactaggaatatatatatatattatatatatatatagagagagagatttatacatacatatccaactggatatataaatctatatatagatctatctatctatctatctatctatctatatctatatctatatatatatatatatatacatgtatccagtcattggctggaaaggagcagaactgaaactactaagaaggatatattgaaatgactgggtctacactgggaaagaaaggaactgatattggggagtagagccaaagtggaaaaataacagcatgtcacttgacagatggtgaggttacagacctccttgtagtattttttcctgctctgtacatgtctccctcctaaaggaattaatatcttactgttggcatactctgaatcaagttgtaaaaggattctgacaaatcagtggctttgagggtatcctaatctgtagctggggtgttagaaggggattcataactccatagagtgacaaatcatttgaaaatagacacatttcatgttttacaaaagctaagcagcccaacattctctcagtctatagccatcactagcaaaggcatccacagaacaggaatattgtgtgtttgaactgcaataaaggaagggtagtaaaattgaattttagactctgataatctcttgtgcttgaactgaatccagagtcacctaaatttcagttcatataaactgtgataaatctccaattgttttaaaatgaatgaaatctgttctttacttctattttattcccaattctgtttcaagagtttcttctcagacaccgtaatgtttttctgagggttaaacttagcagttttatatataggctattccttggttccacctttgtcacatttctttcattgcaggtttttcgcttgtttgtagtgggacctgtgagagtgagggtcacagctggcagtgcagtatttatcagctagtagtcccccatttggtggtagtagtagtacacttgaagtcctccatatagattttaaatagctctatagtttaaaaataataaaagaaaaaatagctcatgctttatatcttctgaagtgccacaaaatgctgttttctcattttattcaaatattattttattaataaaagacataatgatasctaaactttgatgagtgcttactgtgtactgtatcttgagaaaaacatgttttcttgtttatcctctagacagtttgattgattattataccctccattttattaataaagaaatagaggtcagataaattgcccaaggacacacaagcaaagttaattttgaatggaggttggtccgacttcagaatttgggcacctacccattgtacaacaagwctttaccctgtgctaaacacaggataagacccaatcagttctttcctcaaggaagaaacaaattgacacatcagagataacaataattatgttatgtgttgttaaactgttaaatgttcaatctgttaggattttggaagagagagagtttgtggagaataagcacagaagaaaaagtatgaacaaatgaaatttgtattcgattttgaatgaggtgtggggttgagtcatggaaggtgatgatgtatgtgagaaagttcatgagaatggaggccagcaggtaggaatgagtcacgtccatttaggggctctaagaaaaaaaatatgaaaaagaaggaaattaagatgggcatgaagaaagtgataggttataaaaggccttagaaaattgacagtttttctttttatgaagtaggagatacgtaacaactgaaggattatgatcatggtaggggcataatggaaatgataagtgagaagagggacaggcatttatgcgtggcactgtagcagagaccacccatatggatccggccacagttggagactcataattagatgcgctttggagaaagtctggtatagactaattcaaacacaataaactcatagaaagtactgtatcagcagtgtgaaaaaattacttacataaaacttgatgtagccatttctgagtattggcacatgaaccttgaccttccagcctaaactgaagatgtggagcaagttctactctagtcatttgtgcacagttacaaatgcagcaaggcatctctgttccccttgtgatagccttattcaagggcagagaagtcaggctttatgatttgaaaacatgatttctccttggtgaagggccattcctacagtcacataaactgtgttacattgttaacattgagaaggtggcatcttctaacaacccagcattccttttatacatcttctgrtattttctagaatcagagtaaaggatttaaaactttctagaggaaagcaagtatttcttcttgtactaatcactttctttcccagaaaaacatctttcaaatttcttcctagaaggtaaggaactaggagcagagtggtagaggatggggtractgggaccttgacacttagcattgagtattcacacattcatytaatcaccctgttgttcataaaatgtaccccacccctaaaataagtctaaagacccacaatgcaaagacyattttatcctcttcagagaataatatctggaattatgctgggctgaggtgggggtagatattcagtggtgtgaaataggagatgggatcaaactgcctttttcagtccctctcttcatccccaagtttaatcatacctaagtctttctgcataaaatcacttgattcttaattttccctgttgctggtttgaactctgactttctccgattggctatgtcatttagtacttgtcatctgcttttgagtttgttaatatttcttgctgttattttatcttccattccattctctccgtgctagtgtgtttaagtctttagaaataaacaaaaataactcatatatagttttagtgagacttgaaaaggagcaaaattagatacatgtgtcagtttgccatcttaacctggaagcccattagtttttattaaggttgtgaaagttttctctttatgagagttagatattagattagatattatttttttcataaattatggccccgttttttgctctccctcttaggtaaattctgtccaygcggaatcttgactgtgaacttaaacagttcccacattttgtgactttcataacacttgagacccatttcattccttccctgatgtgagcagaagacaggctctaggtataacttccagatatttaattatatcttctrtgatcacctaggatgcatttccttaaaagttgcagaaaaattatggggtaaaaggcaaaacataactcttccttgaataaataatacaaaccagtatattayctttgcaaaaataatgactgttaagagtgtaccacctttagtgtgaatattattaaagtaataaaattgaaratacctaaaagaaagtaaagctgctctaagcaccaacatgcttaaaactatttattcaaagatatgccaaagtgacatccctatcctcatgaaattgtatatttcaagatacaatgtgatgtgtttttacttgaaaaatatgtactaattttactaaatttatacagatttttctagaatttccattggctcattcactgagaatctgctgaatattaggtactgtccttgtccttggtattaaggacatacagtgaacacagtggagaatttagagccagagcaacataagatagcatggaagaagaattgaggagaacaaggagatgggcagcaaagcagacagggaaagaaaaagatataaaggaaagataacagttaggagcagacgagctggtgcagaaattcatctctgaaaggaatgcagaatgttgctaggagctgagatataaatagggaaagtaaagattttcaaggtttttatacctgagtctacttatactcaggcatctgagactctggcaggtgttgaatgaagtctattagtttgttgaacagacaataaaagaacggaaaggaccttcattatccagctgtcttcattttaattttattcaatgacacaattctgtatttatgagaatgatgttctgaagagaactttggacagaaatagctacagaaaacgggttatttgtcagccaaatgagatgccaattttccttaccaaaatggggctaattccttcctgatactcccccctctgaaaatatgaagatcaatatttaccagtaagaaaaaataaattatggtatgataatttatacagctgaaaacctctttgttaatagacatcatttgtctggtaatgggccaaccttctggggacaaatgtggtcaatcacaaggttattcaggtgcccctgaaacatcacaacttgaaaggtcaattataacacaagtctaaccatatgtataataaacatgggaagaagacaactttctaaaaagttttgattagttacccaagagaaagcatgtatgctgcattttctaaaaaggctggcctgacctcatcctgttacttaatatcacagccagtaatccttctggtattatgtttctataatatccctaaacatggtctcagaattttgatgagccagctaactaagccaacttgtctgcaagtgagccaggtgttttcttactctgtccattttaagcatggcctgttgcactcaagaattaaccaaaaacatggaggaatatgtggatcaaatagggtttgtttggaagcactgagctctcagctttcctcatgtccaggagagcctaagatctgactggacaatgggggagatgttttaaaatctgtcaaacagaagggaaaccaaagcaacactcaaaaatagccatgtagaaataatgttgcattcatcatcaaaaagaatccttgggatgcacagcttcagagggatggtggatgaagaactaggttgggaggtggggttgaacttattttgtaccctgtgcatacttcccactggaaacaagcttgcatttacaaagcatttctgcccccgctgtcttttctaagatacaaccctgagagatggaatagaaaatgaagcgagggagggaggaaactcacctkgcctcacttctgctagggtttcagaattaaatctttctgaaagcatagttggagtatgtgaaatctgtatgttctatggctcatatctttttgttcattaaataagaaatctctttgcacatgactcgttttgctttctgaggtgaaacatttatattctaatataatgtgttaatgacaatagcaatttaaatrttgtagcacacacagcaaagggaattagaaatattggtaagttttatgttttccccatttagaaacagtctatgtcttatgatttaaactgtaaaggcagagaagtccattttttacattacttgataagactactgaattctctttctcatatgtgtggtaaatatacacaaatatctaacaaataattgaaatataaaatatgggataagaggattatttacaattttgaaaaacatgcctggcttttcagcttatacttttaagaaaacattcattatatgtttgaaataattatatctggaaggaaaaattattttttgctgtgctccagaatgatggcttactttttttcctattggatagtgtgttagagtaattataagcaataatcattgcctttcccataaatattctccctgtaaataatccrtttattttactttatgtagtcttgaatcactagaaactatttagtaatgctgatgagaaatgctttaatataaaggagactgattttatctgtcagttacttttacatgataaaaatgtacaggatgattgctaatcatgataagtaatgagcaaacattcagcttaaataagatcttagtaattgtttattaaaattaactgggaaggcataaatgcttttacctgaaatctcaatttcaatttctaaactctgtagtaaatttgtcagaaaatttagtgaaatggctattttagttcctaagtggcagaccggttctgtatcgtgtgaatcttcagagattttaggtgttatagttaaattatattaatacaaaaatgtgggaataaacagaatgagaacatacagggactgctcatccagactttactattcagaccttacagaggaatcagctaccatcacttgctttgggcagagtctcaaaaacaggcagggaaaaggaaagctttaaaaaggagatttctagtattttctgatgggatactgttgaggtagagaagtttcaggtagactaaataggagcaggacattttatgagatgggtttgaggggtatatttggctttctctgattcttactgaattgaaagctttggcaaatataggtaagktggctgtcattgaccaaatcatgtccattctgggtctattgctacataagctgtggtttaatttccaggactggttgctgcagaggttatggtcaaagctctactgtcatataaattctggccattgttcatttatacatttaatctctctgccaacaaagtggaaaacctagaagaaatggaggagttcctaaccatatgcaagtaccaagattgaatgctgaagaaatccaaaacctgaatagacaaataacaagtattgagatattaacagaagtctcccataaaagaaatggctaaaagctratggcttcactgttgggttctaccaaacaatttaaaaataaataatgtcaatcctactgaaattatttctaaaatgtgaggaggagggagtacttcctaactcattctatgaggctagtattatcctaataccaaaaccagatgaaaagacagcagaagaggaaaatgacaggccaatacctctgatgaacatgataaaaaaaatactcaacaaaatactagcaaacagaattcacaacacattaaaaagtacattcatcatcattgagagggattcattccagaaatgcaacagtggttcaacatatgcaaatcaataagtgtgatacatcataccaacagaatgaaggatgcaaaccatacaattatttcaaaagattcttaaaaaaaatctgataacattcaacatcccttcatggtaaaaaccctcaacaagtatgtatttgtcctcaaaatgaaaaatatctcaataagataaacgctrtatataacaaacccacagctagcatcacactgaatggggaaaacctgaaagcctctcctttaacagctgaaataagacaaggattcccactttcaccacttttattgaacataatactagaagtcctagccagagcaattagacaagagaaagaaataaaagtcattcaaattraaaagaaatgagtcaaattatccttgcttgcagatgatatgattttatatcttttttttttttttttttttttgagatggagtctcgctctgtcgcccaggctggagtgcagtggtgtgaccttggctcactacaacctctgtctcccaggttcaagcgattctcctgcttcagcctcctgagtaactgggattacaggtgcataccaccatacccagctaatttctgtatttttagtagagatggggtttcaccatgttagtcaggctggtctcaaactcctgacctcatgatctgcctgcctcggcctcccgaagtgctggkattacaggcgtaagccatcacgcccggccgattttttatcttaaaaaaactaaagactatcccaaaagttactggatctgataaattcagtaaagtttcaggctacaaaattaatgtataaaaaccagtagcatttctatataacaacagcaagcagtctgaaaaaaagaaaccaagaaagtaatcccattacaatagccacaaataaaataaaatacccaggaattaaccaaagaagtgaaatatctgtacaataaaactgtaaaacattgatgaaagaaattgaaggggacacaaaaatggccatatatttcatgttcatggatgagaagaatcaatattgttaaaatgttcatactacccaaagcagtctacaaattccatgcaatctgtgtcaaaataccaatgacattcttcacagaaacagaaaaagtaatcctaaaatgtatatggaaccacaaaagacccataatagccaaagcaatcctgagaaaaagactgaagctggagacgtcacattacctgacttaaatttatactacaaagctatagtaccccaaacagcatgatactggcataaaaacagacacacagaccaatggaaaagaatagagaacccagaaataaacccactcatttatagtcaactcattttggataaaaatgccaagaaaatacattgggaaaaggagagtatcttcaataaatggtgctgggaaagctggatatccatttgcagaagaatgaaactagacctctatctctcactatatacaaaaacctaaatgaattaaagacttaaagctaagactgcaaactgtgaaactactagaagaaaacattggggaaaaacttcaggacattggtctgagtaaagatttcttgagtaagacctcaaaagcacaggcaaccaaagaaaataaatggacaaatgggatcacatcaaagtaaaaagcttcttctgcacagcaaaggaaatcatcaacaaagtgaaaagccaacccacrggatggaaaaaaatatttgccaatgacccatctgacaagagattaatagccagaatttataagcagcttgaacaactcaataggaaaagaacaatccaatcaaaaatgtacaaaagatctgcatagacatttctcaaaaggatacatacaaatggcaaactggtatatgaaaagatgctccatatcactaattatcagagaaatgcaaattaaaactaccttgaggtcacctcaccccagttaaaatggcttttatccaaaagacaagcagtaacaaatgctgatgagaatgtggaaaaagggaaactcttgtacactattggcgtgaatacaaattagtgcagccactgtggagaacagtatagaggttactcaaaatctaaaattagaacttccatgtgatccatcaatcccactgctggatatacatccaaagggaaggaaatcagcatatcaaggagatatttgcactcccacttttattgcagcattattcacaatagccaagaaatggaataaaattatgtatccatcaaaggataaatggataaagaaattgtggtacatatacacaatggaatattattcaacaataaaaagaatgaaatcctgtcatttgcaacaacatggatagaaatgtaagatattacgttaagtgaaataagccaggcacagaaagacaaatatcacatgttctcattaataggtggcaacaacgataacaataataataataaaccatgaaagttaagagaaaaatgagatgtggttaatgggtacaaacatatagttgggtaaaaggaataagatctggcatttggtagcacaatagggaaactatagtaaacaataatttattgtacatttcaaaataactaaaggagtagaattaaaatattcctaacacaaaaaagataaatattagataccacagccacccttatttaatcattatatgttatatgcttgtatcaaaatatcacatgtacctcataatgtgtacaactattatgtattcataataattaaaaattaagggagttggagatggttaatgggtacaaaaatagaaagaatgaataagacctactatttgatagcacaatagggtgactatagtcaataataacttaattgtacattttaaaatgaagagtataattggattgtttgtaactcaaaggatggataccccatgctccatgatgcgtttatttcacatcgcatgcccatatgaaaatatgtcatgtatgccataaatatacacatctactatgtacccacaaaatttaaaaataaacaaaacaaagtttaaaaaataaaattaaaaatgtaaaaatgtgtgaaaaacatcctaagaaaagaaatttaactgaatatcatttctttgagatggtgattggtaggtagttataaaaacaatattgaattaatctgatatttaaaaacaaaaataaaatagttatttttatagaaaaaggtgatctctgataatgtgtattctaaaccaatagtccaatgagtttaaaagtacctggtttaaaaaaacacagtaagatagttcaatggatgcacctttgtgaatataactatttttgtcagccttattctcgctgtctgtttcaagaactcttagttagagtagtttggatttatttggtcttctacagtactttaatgaatatattctatgcatagaatttttttcagaaatgaaattttaaatttcaacttctgtctctctccaaaaaaaattgtaataccttawcctcaacctcgtcatgtctcattttagattttgtcattctctccaaacttatttagatacttaattctttatttattttcttattcagaaagaatgctttgcccatattttaactactctctcatgaaaattttgatctctccgtctctcatgtccatatgacacaaaatctcaaccctgcctcaatcctaccacagactttttttgtcctttgtttggtcttcagattgtggaactcacccatttttcgctagtgctcaggtatttgtactaggaaatgttatagagggagggatcctcagagaaacagagacagtaaatttttgctactctgaaatgtaattgcttaagacacttttaatttaaacaacrtacaacatgcacacactgagagagaacttgaccctctctagtaaacatttcttttactttctctaagtctttgacctcgaatgctttaccttgagtacagatattttcctctgccttccccatccttcatttcaagtaagtactcacctcaaaggcaatctttgatatttgtattttgtgaccacatttcctaattatggataagaatttatctcagtgcctataccttggctgttacaggctcattagccaggtcctttctgcatgatttcactggtcaattgggtgcaactatacaaatattagttatcattctcattgtaattatcatggcacttaaaatgtaagaatgccttctgtttgttcatataatggcaaaatggccctttagtatactttctccatgggagcttactctgtgctttcaaatcattatatttacttatctagactttcccatcaatatagcattcatatcatgtgccaatttatggaatttttactggcttcaaatttttttctatctataataacaaaaaaagaaagactcacaatttcattattgtggggccaaaacattaagaattttgaattagatattttgggctgttaaatgttttagaagaaataacttctgagtttcccttaggaaaacaccctgaaacctatcaatctaattattatctgcaggagaatatttcttatatcccacaagggagacctaagatgttaggaaagggttctatcatgtttctgaactgatagaattgatagtctgcaagaaaaataggaataaaagtggaaacaagtgatttgtaggaatgagaacactaaatataatattttgtcctttsaacattaaaagtatttttgtttattacaatttatcctcacttgtagagaattcattcaaaactatcttcagatagcttaatgtaactgtttggaaatcactaaatgtttttgaagtttgccaacatattgtgaactagaaaaataagctgaattatttcatacaagatatttcatgaaagccttggcttttcagtttaagcagatactaaaattacctrgggaattattttgcaagtaagtaggttgaaggaaaaacaaaaggcagtggaacgaagtccaggaaactgaataaagaagtcaaagattcattcacttatttgttcattcatgtgctcattcattcatgcatgcatttaaaaaatatttcatgatcatgtattatacacaggattatggtcttcacgtaaaaaacaaaatctgaayttggactcaatttctgtccttgaggacttacagaaattagaggaataataaatgtaataaataagaatccaggttgggtgcagtggctcaggcctctattctcagcactttgggaggctaagatgggaggatgcttgaggccaagggctcaagaccagtctgggcaacaaagagagaccccacaccctcacttttccctcccaccacaaaaataaaaaggaaatattagctgggcatggtagcccacacctgtagtcctagctactcaggaggcttaggcgagaggatcacttgagcccagaagttccaggctgcagtgagctctaattccaccactgtactcccatctgggcgaaagaacaagaccccatctcttaaaaaaaaaaagtaagaaatgggaacccagaaaagaagtgagcagcctatgtcctgtggattaatgaagaattcataaaggaagaactatttgagctcaatctgataggatgagtagcttcctaggtgggaaagtggaagcagcattccccagagaaggaatatggaatgtagggcacagttagaagaaaagaagcaggagatwacatggtgtgaattgggaacacatcatgaaaggattggaatcaaaacttaatattataaaaatctaaggagccggacatagtggccctagcctgtcgtcccagctagtgaagaggctgaggcaggatgatcacttgatcaagcccaggagcttgaggctaaagtaagctatgatctaccactgcactccagcctgggcagcagagcaagactccctctcttgctaaaggaaaaaaaaaaaatgcatgaggatgtcaagtattttaaaatgactctaatgtgttgtgcatggataatcgagaaaaatatkggtgctatttttttttttactgaaatgtgaattaaaggaaaaagataattctgaggatgatagagagttcaaaatcagatattttggatttcagaaaaaaatgagcatgtgaaaatatctgacttcctgttgaaaagagcagctagggttcaggagaatattcattatacatccaaatttgggaattattctcagaggcataattattaaagctttgagagccaaagagcttctcrgggtaggctatgtgaaaagagaagaaaatgaatctacaggttagatattagtctttattttgaaatataatatattgtaataccaaatactaatttggccattcataaattgttaaacatttctctcttttttgtgtgtgtggttcctatacacttttttggccttaaaaatcttttattttaagtttgggtgtaaaagtgaaggtttgttacataggcaaatacatttacacgggtttgttgtacgtattatttcatcacccaggtattaagcccagtacccaatagttatcttttctgctcctctcctcctcccacccttccccctcaagtagatgctaatgtattttgttttcttctttgtgctcaaaagttcttaccatttaactcccacttataagtaagaacatgtggtatttggttttctgtttctgcatcagtttgctaaggataataacctccagctccatccatgttcccataaaagacatgctctcattcttttttattgcttcatagtatgacgtattatgtatgtaccacattttctctatccagtctgtcactgatgggcatttaggttgattccatgccatgtctttgcgactgtaaatagtgctgcaatgaacatttgtgtgcatgtgtctttatgatagaatgatttctattcctctgggtatttacccagtaataggattgctgagccgaatggtagttttgcttttagctcttggaggaattgccatactgctttccacaatggttgaactaatttacactcccactaactgtgtataagtgttcccttttttctgcaaccttgcaagcatctgttattttttgactttttaataatagctattctaactggtatgagattgtatctcattgtggtttcaatttgcatttctctaatgatcagtgatgttgtacttgttttcatatgcttattggccagatatgtgtcttcttttgagaagtgtctgttcatatcttttgcccactttttaatgaggttgtttttctcttgtaaatttgtttaagttccttatagatgctggatattggacctttgtcagatgtatagtttgcaaaagttttctgccattctttaggttgtttgtttaccctgttaagagtttttttttgctgtgtagaatatcttaattttaattagttcccacttgtcaatttttgcttttgttgcaattgcttttggtgtcttcatcatgaaatctttgcctgtttgtatgtccagaatggtattgcctaggttttcttccagggtttttataatttttgggttttacatttaagtctttaatccatcttgagttgatttttgttttctgttttttttgagatggagtctcgctctgccgcccagactggagtgcagtggcacgatcttggctcactgcaagctctgcctcccaggttcatgccattctcctgcttcagcctcccgagtagctgggactacaggcacccaccagcacgcctggctaatttttttgtatttttagtagagatggggtttcrccgtgttagccaggatggtcttgatctcctgacctcgtgatccgcccgtctcagcctcccaaagtgctgggattataggygtgagccaccgcgctgagccttgagttgatttttgtatgtggtataaggaagaggtccggcttcaatcttctgaacctggctagcctgttatcacagcaccattcattgaatagggagtcattcccccattgcttatttttgtcagctttgtcaaagatcagatggttgtagatgtgcagctttatttctgggctctctattctggtccattggtctatttgtcggtttctgtaccagtaccatgcatttttgattaatgtagccttgtagtatagtttgaagtcaggtaacatcatgcctccagctttgctctttttgcttaggattgccttggctattcagactctttttggttccatataaattttaaaatagttttttttctagttctgtgaagaatgtgcttggtagtttaataggaacagcattgaatctgtaaattgccttggatggtataaccattttaataatgttgattctttctgtccacaagcatgggatgtttttccatttgttgtgtcttctctgatttctttaagcagcttttgtaattctccttgtagagatctttcacctccctggttagctgtattcctaggtattttattctttttgtggcaattgtgaatgagattgccttgctgatttgggtctcggtttggctattgtgggtgtataggaatgctagygatttttgtacattgattttatatmctgcaactttgccgaaggtatcagctggaggagattttgggctgacactttggkgttttctagatatagaatcatgtagtctacaaatagaaatagtttgacttcctctcttcctatttgggtgccctttatttgtctctcttgccagatagctctgggtatgactttcaatactattttgaatagaagagatgagagagggcatatttgtcttgtgctggttttcaaggggaatgcttccagcttttgcccatttagtaaaatgttggctatggatttgtcatagatggctcttattattttgaggtaggttccttcaatatctggtttatggagagtttttaacatgaaagggtgttgaattttatcaaaagccttttcttcatctattgagatattcatgtggtttttgtttttagttccgtttatgtgatgaatcacatttattgatttgtgtgtgttgaaccaaccttgcatcccagggatgaagcctacttaatcatagtggattagtctttcgacatgctgctgaactgagtttgcaagtattttgttgaggattttttcatcaatgttcatcaaggacattggcctgaagttttcttttgtgtgtgggtctctgccaggatttggtgtcaagatgatgctggccttatagaaggagttagggaagagtccctcctcctccattttatagaatagtttcagtaggaatggtaccagctcttctttgtacatctrgtagaattcggctgtgtttccatcaggtcctgggctttttttggttggtaggctatttattaccgagttaattttgtagctccttgttgacctgttcaggtaatcaatttctttctgggtcagtcttgggagggtgtatgtgtccaagaatttacccatctcttctagattttctagtttgtgtgcctagagatgtttgtagtagtttctgatggttctttttggttctttttatttctgtggggccaataataacattaccttatcacttatagttgtgtttatttggatattctctcttttcttccttatttgtctaggtataatagcctatctatcttattatttttttcaaaaaaccaattcctgtattcattgatcttttgaattttttgcgtgtcttgatttccttcatttaacttctgatattagttatttcttatcttctgctagctttggggtttatctgtttttgcttctctaattttttcagttgtgagattaggttgttaatttaagatttttctaaattttgatgtggccatttagtgctatgaatttccctcttaacactkccttagctgtgtctcrgagattctggtatattgtatgtatgggggtctaacctcccactttgctggacctgcagctacttttgctggaaagcccaagtatctaaggctccagggtctccacatatgrctgagcagctgctcttccaagactccaagtgtctctgtctgtcagactgaaggccctggtacaatgggttcacaaggagatctcctgacctgaaggttacaaagatctgtgcagaagcatggtttcctggggcagctcattcactcaccacttctctgggtgggggaggttctccttgctctgtgttgttcccaggtgggcagttgtcctgtcttgcccttctttgttctctgtgggtcaagttgtttccttgattagtygtaatcatccagtgagtaactggatgtttcagttgagggcattgtattactcacccctttcattcttctccctgacagccatgcacaccagctgcatctagtcggccatcttggccactccctctttaaaactttcttgtacattacacatacctcttagataaacttaataaaagataaaacatcatcattataggcctggcaatgagaatattgtataggtgttccaygaaatcccttatctatgaagaatacagctgtagtttcctcagttttatttgtttggttggttggttttgtttccagattagagcttagtagcctagaagaaaaaaaggaatactcatattttcagtagttcttcaatataaccaaaaaggaaatttagctttgaatttmtaccacaatattcttatctgctctagrgtggaaatacatagtagcaacagggttaaagcaatgaacactttctttttttattccacttttaagcaggagttagagcaccttctattattaaaaagaagtttccattaggatgccactagagataccaaaatcaaagtaaataaatatatttctacatagaatattttaatgttataacaatcagtaacatttttgtttagtctgttttcacctatgttctacattttaaggacaattaaggggcagaggatgtagtctcacaataagttttcagggtatgttatttgaacagaaagcaaaagagacacaatattttaaggtttaggtagataaaacctagcactgtggcaggagtgtctrttggaagcaaatgtcatttcctcccagtatagagtagtttggtttttgagttgtttctttaggttcagagtaaataggatgctctctaaaatctgctctaattgtgatgaacaatgtccccagcaactctaagtgtgtaatatttgtagttgttgttgtttctcctcccatcagattatctctgtcattgaatcttccctggcatatataaaagtaccatgcatagtggaaaatgccagagtgctactgtttgtttttctagtgtttctcattgagtgttggctttggaatccaacacacaccactattgaatcctgagattgtcattagaggctaactgtggtatggacaaatcaattactctttctcaattccaattttgtcattattaaaatgaggaaagaagatccatgataggtttgctgtgatgattatataataatgyatataaaatgtatggtacagagtgacgacacaataaatggtgattgttattttcaaattacttcaaattctctaaaacagaatgtaaacagacaggagaaaaaccatagcgcagagctggtgtggaatttaaaattctttacagaatcccacaaaacttagaatatggggcaaacccacataatgccatagctggaygatgaaaaagtttatagtcaacagctgatgacagaaaaaggataaaaacattttggccaaaaaaacagcatagaatagtcatcatagatagctaattcatggcgggataatattagaagagagccaaaaggcaaagtgcagtttcagtgatgtgggtcatgtacggagaggaggagattatattctgcattgccagaaatgagaagaaatttctaaaaaaaaaaaaatcaagataaacaaacattaaagggtgttgttttaaataaatataagcatttgtttgatttgcttttgatttttctggataaatataaacatttgtttggtttgcttttgatttttctggataaaaaatggaaggccgggcacagtggctcatgcctgtaatcccagcaccttgggaggccaaggcggtagatcacctaaggtcacaagtttgaggccagcctggcaaacatggcgaaactccgtctgtactaaagatgcaattagccgggcatggtggcatgcacctatagtcccaactacttgggaggctgagtcagtagaatcgcttgaacctgggaggggaggttgcagtgagccaatatcgcaccactgcactctagcttgggtgacatagtgagactccatctcaaacacagacacacacamacacacacacacacacacacacacacacacacacacacagcatagtcctattacatttttaggcacaccctaattaactaacatcttgatgtcccttgaggtatgcctcctacaaaataatattagaaaaggcagattcaagatttcaggagcgtcagtttgccagctggctgccatgtgtttgactggtgtttaacagtgagtattggctgacctctgctgaagaacagggatagtatctgggcacctgaggcaactgcggtccacaggtgaaaacataatctctcagatttgtaatggaatactgagagatgtcaagttgagtcatatcacataagtgtcamctgctctgacagcattcaggacatttgcccatggtgcttttcttccattttttctcttcgtataatcatacactgtaagaggtcrgtggggactggtagtcttttaaagtgcattgacagaaaaggacagtatatatttcaaatctggctcatttgttatagcaaaagacagatactgaattgcaattgctctggataagggcaaaactcatttaatatagctacaaagtataataaaattaacctaaaaaaagacatgagtaactccacagtgctctcttaatgactacattgccagtggaattgctaatttggggttcaatgtgcatccattatttcaaagcgttcaatatttaagacaatcttccaatatacttccaagtcacatttttgtactttctttttcgtgtttttcccccacatgtccttttcttagcattgccattaaatcatttatctttttgtaactactctgagatttctcttctctctctctcttttttttttttttttttttcattacccggatagctaccttatgtttactgctttccatggagattacttgtcaacacaccttctgttttattttcttctacttctctggcctcaatgtaattagatggtcaatttcatccttttatttccatagtctactcctcttatcttattctctaatagtcctgttctccaatccacttattctcattatttttattttcttttttttttttttttttttttttttttttgagacagagtctcgctcagtcacccaggctggagtacaatagagcgatctcggctcactgcaacctccgcctcctgggttcaagcaattctcttgcctcagcctgccatgtaactgtgattacaggcatgcaccaccacacctggctaatttttttatttctactagagacaagatttcaccatattgggcaggctggtctcgaactcctgacgtcaagtgatccacccgcctcggcctcccaaagtgctgggattagaggcatgagctgctgcgcctggctgtattctcatttttttttaatactacttctatttctccattcaacatttatcttttagatatgaccctctttatctaaatctcatcaattatcctttcccttcattttaacctcattttacaaattacttgcttcttccatctctcagtcatttctttttctttacatttatataaggtttatcatatcccttttcccaccactttctttctcatgctttataagtatttattgagtttttctatgtgtctggcatataggaacatactatgacrtagaccttgctttcaagaacttccccatctagaagagatagacacataaattaataaatttttaaaaatatagaaagttcatgaatataaataaacctgcagttttatagaagccctggagaatgtgaaatgggttgagagcggatgtcatcaagaaaaactacctggatgatgtttactacctctaagaattgacggaggaggtgatggaaagtgctctctaggtcagtgagacagcgtgacaaaaagactcagagatacaaaatagcatgtcatggtagagatgaagaagtagttaggtattgccagagcataagtggaagacagagaatgtgacaaaggagcttgagaacagggaagggtcacactgtagaggatgttatttgttatgctgagaagcgtgacatgagcaggaaactgaaatgcattgaagaaggaaatggccacaattattcatttttattatatattctttcagctatttagacaggacagatttcagggatataagaatggagttaggtatcccagttgtaagctattttatgagaatctggatcaggatgacaatagagaaagaccagaaagtacagattcaagaattatttagaaaaaaaaaggaacaaatgcaaatgctagttgatgtggggagtgagagagaggctgattccaggaatctatatttagtgatgagatgcaaggtattgtcaacatcgaagagagagaacacagcaaagaacctgctcatccttcattttatttgtttgttttgttagtttttgactttttattttgatacaaattttgacttacagaagagttagaaaaaacatgcagagagcactcatctacacattgcttggcttccctgaatgttaaggtaacatcttacataaccatagtacagtgatcaaaaccatgaaattaacatttgtgctattaatgttattattactgctattaattactattaaacaggcctaattggaacttcaccagttcttttactaattggatctcaccttatatttagctgccatatctcctttggctcctccaatctatgacattccctcagtcttttcttgtctttcatgaccttgccacttttaaagaatactagtcagttatattgcagaataactgccarttggggttggattgatgttttctcattattggattgaagttatgcatttttggcaggcatgctacagtgatataaccttctcagcctatatatcagggagtacatcatgycagtatgtcttattactggtgataattaaccttgatcatttggttaaggtggtgtctgctggctttctccyctgtaaagttacactttttccttttataattagtaaatatcttgaaggagatattttgagactatgaaattattttgtttctcctcaaactttcrcatactaatttggacatccattggtagatttttttaaacttttaagttcagggatacatgtacagatttgttattatagataaacttgtgtcatggagatttgttgtacagattccttgtcacccaggtactaagcctagtacccattaactatttttcctggtcctcaccctcctcccaacctccaccctccagtaggcgccagtgtctgttgtgcccctctataagtccatgtgttctcctcatttaacttccacttgtaagtgagaacatgctggatttggctttctgtttctgmatgagtttgctaaggataatggcctctagccccatccatgttcttgcaaaggaaattatctcattctttttatggctgcatagtattccatggtgtatatgtaccatagttactttatctagtataccattgatgggcatttargttgattccatgtctttgctattgtgaatagtgttgcaatgaacatacacgtgcatctatctttacaatagaacaatttatattcctttgagtatttacccagtaatggaattgctgagttgaatgacagttctcctcttacttctttgaggaattgtcacactgctttccataatacttgcactaatttacactcccacccaatagtgtataagcatttctttttctcctcaacctcagcagcacctgttattttttgagtttttaataatagctattctgactggtgcaagacagtatctcgttggggttttgattttcatttctctaataatcagtgatgttaagcttttttaaataagtgtgttggctacatgtatgtcttgtttggaaaagtgtctgttcatgtcctttgcytatttttatatggggttgtttgttttattttttcttgtagatttgcttaagttccttgtagatggtggatattagagcttagtcagatgcagagtttggaaaaattttctccccttctgtaggttatctgtttattctgttcttagtttgttttgctatgcagatgctgtttagtttagttagatcccatttgcttttgtcgcaattgcttttgatgtctttatcatgaaatctttgcccgttcatatgtccaaaatggtattgcctaggttttcttccagggtttttatagtctggggttttttctttaagtctttgatccatcttgagttaatttttgtgtatggtgtaaggaaggtgtccagtttcaatcttctgcacatggctagccagttatcccagcaccattttttgaataaggagtcctttctgcactgcctgtttttgtcagctttgtccaagatcagatggttgtaggtgtgtgggcagtcttatttctggactctctattctattaagttggtctaaatatctgttttgtaccattrccatgctgttttggtttctgtagccccatartatmgtttgaagttgggtagtctatgcctccagctttgctctttttgcttaggatttcctgggctattctttggtttcatatgaatttcaaaatagttttttctcatctgtgaagaatatccttggtagtttgataggaatagcattgaatctataaattgcttcggccagtatggctactttaacaatattgattcttcctagtaggaatgtttttctatttgtttgtgtcatctgtgatttctttgagcagcatttcgtagttctccttgtagatatctttcacctccctggctgcctgtattcctaggtcttttattcattctgtggcaattgtgaatgagattgcattcctgatttggctctcagcttggatgttgttggtgtgtaagaatgctagtgatttttgtacattgattttatatgctgaaactttcccaaagttgtttatcagcttaatgagctttggggttgagactatgggattttctagatatagaatcatgtggtctgcaaacagggatagtttgacttcctctctttctattcggatgccctttatttctttctcttgcctgatagctctgactaagattttcaattctatgttgaataggagtgatgacagagaacattcttttcttgtgctagttttcaagggggaatgcttctagcttttgtccattcattatgatgttggctgtgggtttgccatgatggctcttattattttgaggtatccagggaaacttctcatcctttsatgcctccatcaagtggtcttccaacaataatgataatttgcatttttttaaagtgtgctataattttgaaagctctcacacattcattacttaatttaattcttatgaaaatcctctgaaattgactyagcaggtcctattttccataattttcaagtaacagtactgaaaaagccattgctcaaatgtatatcctactgaccataggttatttaaatgctcaaatttttttttcacaatgagacagcataggctcctggtctggcagtcagtctgctggggtctactgtaggtatcagcaatgcagccacgaagctactgtcttccaaacataaaagaggttagagaggctgatcctcatagaaagcatcctctgcctgagactccttgccactggaatgcatgttgttcagttactcctacagagaaagttgccatcaccatcagaaggaacacacttcaagtaagaaagatatccatgggctcagaattcaccttaataagcaaatatttcatayacatataatgttttccrtaccatgttttatacatgggttacatatagacatgaaactgtactagtgacttctagaatcagtctattgatctctttatatttgttgcacatttgtcttgtattcctgtggagttgtattacagacaatgatgttatttttaaagcaatgcgtagagcttctgggctggtgaacacgtagagctgcatgggagctttgtggtctgtccctccccttcgctttatgcatcctttccatttgggctgttcctgtgttgtgtcatttctaataaattgatacacaataaaaatagcaattacaaatggttggtataaaagaaaaaaaaactctatgttttcctagtccagctgaaaactagagaaatagcttttctagcagcagtaacaacacgggagaggttgatgataacaagggcctttcctgaacggcatttattttcatttcaaatgagggatgaacacaagggcaaggcaggatacttcaccatggattaacttttcttgaccgtactggaatccactttgctatgagaatgtatcatatcatggtttactctgtatttccaggtagtgcactggcaaagtctttaaataagtttaattctcattcatcctcattattatgaaagctgtgtttagatttaaattttatggttaaggtgaggcttaattccatgaattgcttatttattttttcagtagaaaaatgagagagaatgggctgaattatgattcctatgagaagcttggcaacagcttaacttcataaactaattaaagagacttgtcaaattatatttggcagcttaaaatcttggattcaatgtaagagatcagaattaatctgaatgttgcttatattaactagtgtttattcttttaaccaaatttagtcctgaactattctgaccctgaagggcaaaatgctctaaagcagtaattttctataaaaatctagaatttttcttatatcattcatatctgtgtcattttaaatttggaactactggccaggcacggtggctcatgcctgtaatcccagcactttgggaggccgagatgggcggatcacgaggtcaggagatcaagaccatcctggctaacatggtgaaaccccatctctactaaatacacaaaaaattagccgggcatggtggcgggtgcctgtagtcccagctactcgggaggctgaggcaggagaatggcgtgaacccacraagcggagcttgcagtgagctgagatcgcgccactgcactccagcctgggcgacagggygagactcagtctcaaaaaaaaaaaaaaawaaawaaaaaaaattggaactactatataaattttatgcatttctatgataagtctctgtaatatagtccaggccaaataattctcttttaacaactgctaagtaaattcaactttgtatatgtggatagttttaataaaagtaaaccaaggagttagtaaaaacggttgytctcaaactgtaatcaggaatgcctggcaagctggacgtggtggctcacccctgtaatcctaacacattgggaggctgaggtgggtrgatcacctgaggccaggagtttgagtccagcctggccaatayggcaaaaccccatctctactaaaaatacaaaaaattagcagggcgtggtggtacatgcctgtaatcccagctactcgggaagctgaagcaacaagaatcacttgaacccaggagrcagaggctgcagtgagccgagattgcaccatgagactccagcctgrgcaacaagagtgaaactccatctcaaaaagaaaacaaaaacaaaaacaaaaaaaacctggtggtccttttaaacatgcatggttttcgccgtctagagacttactgaggttgaatgtcaaagtatagcatttgagaatattttatgccttccagttgattctgcygtgagctgtttgagaaaatactaggttaaactgcatgattaatattattcactattaactggagaagatagtaatgttacaaatccatatgctggtagatgtataaaacatctttaggtgtttttctctagagaactgggggtcaggcagaggtgaaagagatatttatttttgactctaaatgtattccttctaccatttgaagttagttttcactgagcttctaagttacaaatatggtgtggggtgagtgggtatgtgggataagagtaaatgggtatatataaagtaaaagataaagaaaagtataggatctgttgtattctttttgatacctcataaatttatatttctccttagaaaacttctgttgatagtttttaagtaatccttaaaaattaacattcacaataagcccatctttcatttctactccatctttagccttttacacaaaattctttctagacttctcactataagccaggccttatgctaggctatgggaatataagtgacacatggtcactaccctcaaatgttgccaagaaacccccccaaagtaaaagaaaatcctttatctataaacagataaagaaatttgtgtaaggtaaactcatccccaaatacttcacctaaaaagatttaagtatcaaagtatctactgagaatataatacatttattataaagccagcggcaaaaaaaaaaaataccctcattccctctattcctactattccctcttcctcttttgtggaatattgacctatttcttcccaatcttttatgtmggtatatatgtatttgtttatttaaattatttgcttctaccataatactgttaacttttgtttagttatttggttattctaaattcttaggctgccaaaataccacccaaaggaggatggaggtgagaggaaaagtgctttcttagaccccccatgtctgtatactactattccctggaatgctcatttcattccctacctgtacccttttcggcttcamaaactcctcagaaatgcactcaccttctatttatccatctaattaccctccctgcttattttgaaatatataatttggactacaaagatatgctggtaaacagattttctttaaatttgaaataggtgaggactgccaggcaaaggaaggaaaaatatttggttattaaatagcactgagattcaaacataaaaatgaatgccccaaacactgcacgctggtcaaatgtggagtataaatttaactctaagctgtttaacaaaagagagtgatataaaatagttacagttattaactattttraaatttaaaattagtaactattatttagtaaaatgtactttttaaacatataattaaatgtttatggaaagcacaacacttactgatttgcaggtacaccattcattttctatttttaatccacagttcttgttttgcttacgggtggtgtctgttttcccttcatgagctttaattggctaaaactgatcccttctcattcaggtagctaatgtctaggccacaggaaattgaatgtaagtggctattaaaggagttctctggaatactcacagtgcataaattagagttttataaatgatctaaaactagttaatggtcaaaatagtgtgaagttagaaattatacaaataaaggtaaggaatagaagctagcttttgaatcatctaaataaacatgctattttcctgtcactgagcacagggctgctgctgctgctgctgttgaagttaggtgaaaatggtgaagaattgaactggagactgtataatgagaaatgttcagaagctccagaaattcaacagcaaatttttccttgttttcattctcagaattctctagtagaatgaatcagatatkgatgaaaattgaatagagaagtatgccgagaacttcacagtatcagtcagtctctactgcataacatttaaatattttcaggtaatgcttcccatgaagtcatttagcactttctaactttaaatttcaattgttgttatataatataatataatataattaatataaatagtatgagtactttcaattcacgttcactcacactatctaattcaaatatctagatcacctgtgagraagataaaaatagttataatttatttattgtcatatcatttcaaagcctgttctaaattcttttcttaactcatttaagtaaatcctatgaggtatatactgttaatattttacagatgcaggcattgaggcatggagaaaatatcttcataactgaaggcctcacaagtggtaaatgccagagatggaatttgaatgcgagcagccgggctccagaactgcccctaggctttgccaacatattgcagggaaggaagtaggagcgaagacattatataagtctgtgattcctaatacatatctctatatgacgtgtagaggtatagaaaaaaatgtcatctggttgggtctgaagttatagaaaatccagccttaaggtttcaatcagtcagaattagaagccagagttcttccattccaagcctatataataaacatagcttcataagggaacatacaagctaaagagcatcactgattgagtctttccagtccctgatctcggggggctttcagtccaggaaagtgcataagcacactgaaactgaatgagtgctattgtatacacacacacacatacacatgagcacatgtgcatacatgtatgcatacatgcacacaagatttagaagacttatatgcatttwaaaaaaaaggtttagaatccagattaaacaaacaattatgccgggcacagtggctcacgcctgtaatcccagcacttygggaggctgaggcgggcagaccacgaggtcaggagatcgagatcatcccggctaacatggtgaaaccctgtctctactaaaaatacaaaaaacaaaattagccgggcgtggtggtgggcgcctgtagtcccagctacttgggaggctgaggcaggagaatggcgtgaacccagcatgtggaggttgcagtgagccgagatagcgccactgcactccagcctgggtgacagagcgagactcgtctcaaaaaaaaaaaaaagaaaaaaagaaaaaaaaattattacagcctgagctgaatcagtgtaacttccagggaggagcacttgaactaggcctacagaataaccaggatgagatgaacatgtcgagcccaagcatcagaatgaaacaaaagtagctgaagtgttgtggaaagtacaatgaatgtggctatttgttttgcttctaccaaacatggtgaccttgggcaagtcccttgacttctctgagtccatttcctctcctgtaaattagaaattgaataccaccaactacaccaggccattgtgaagaaaaataatatacatgaatatgccttatmaactataaaacggtatataaattaatrtattattaatagtatcttcatgtttatatttcatgaaacaaatgattatatgcagtagctatttctttttaaattcctgacctatggctttagatgtgataaattacttagaaatgagaacatggttgtgtgagttctctcataaaatgttgcacagtgcctggaaaatatctggcatacaacatacatttggtgaataaattaataaatgaattataaaaatgaataaatgtcaagctacagtttttccatgtctgtcattgccctgccttaaggagaccgtagcttcaaccactggactgtggaaaaaaaaatctgcagtattatttaaatctgtcatgcttgctttcatctcaggataaatgactagtagcaagcattctaaatttaacattatttttgtgttttaatttcatagttataatttattataattcacctaaaaatacctctacataattcataaaataatttaatcaaagggttttttcacatgcaaaagaaaaacaatgtttgttagttaggttagtaattattaagcattctctaagccatttacttttcaaataatttttttaaaaaaatcaaagaaatattgtgcactaaagaaaaatctaataatatgtaaggatatrttttttaaaaatgtcctctcccactcacaccttccctgtccctgtctaaattccaagatatgactactttagctacttttatgtttagctgttctcttagttacctagatttaactaaatatctttctatttcataatttttcatctgcagtcattgccttttgactccccataaatttataccaatgtttttcagttcctttaccagctacttctataactttaaaaataatactttagtaaccattttgttaaccatcagctttctatgagaacaggattcatctggactcctaatttgtgtggtaggacctggtagctgtcttgccatttttaatccttttctgaccactttctaccttccaaatcttacaagtgtaccttgatttttactctgcaaggttattttataatcataattatacatgttttaaaatttcaacttttaggttcaggacatgtgcagatatgttacatgcatatactaggtgatgctgaagttcagagtatgactgatcccatcacccaggtagttagtatggtacccagtagatagtttttcaaccctttactccctctctccctccctccccaactttggaggctccagtgtctattttccccatctttatgtccatgtgtccccagtgtgcctggctcccacttataagtgaaagcatgtggtattggttttctgttactgtgttaattagcttaggataatagcctccagctgcatctacgttgctgcaaaagatatgatttcattcttttttatggctacataatattccatgatgtatatatgaaccatatgttcttcatccaatccattgtttattggcatttaggttaattcaatgtctttgctatygtgaatagtgctgcgatgaacatatgagtgcacatgtctttttggtmggatttattttcctttgggcatgtacccaataataggattgctgggtcaaattatagttctatttttagttctctgaggaatctccwatygagtttccatattggctgtactaatttacatcctcwtcaacagtattcaagtgttcccttttctctacatcctcaccaccatctatcagttttcgactttttaataaagtcatgtgagacacataataaagttatgtgagatggtattttattgtggttttaatttgcatttctctgacgattagtgatgttgagcatttttttcatatgtatgtttttgcttgactatcttcttttgagaagtttctcttcatgtcctttgcccgcattttaatggggttgttctccacttgttcaattgttcaagttccttagaaattctagatattagacctttgttggatgcataatttttgaatattttactccattctgtaggttatctgttggtaatttattttgctgtgcagaacctctttcatttaattagattccacttgaccatttttatttttgttgcaagtgcttttgaggacttagtcataaattatttgccaaggctaacattcagaaaggtatttcctaggtttcttctaggattttcataggtttaggtcttacatttaagttgttaatccatcttgagttaatttttgtatatggtgatggctaggaatccagtttcattcttctgtatacggatagacagttatcccagcaccatttattgaatagggaatcctttccccattgcttatttttgtcaatttttttgatgttcaaatggttgtagatgctcacctttatttctggmttctctattgtttcaattgtgtctgtttttgtaccagtagcatgctgctttggttactgtagccttgtagtataaagtttagtaatgtgatgtyttctgctttgttctttttgcttaggattgctttggctattcaggctctcttttgattccatacaaattttagaacagtttttttgtaattctgtgaaaaatgacattagtggttcaataggaataatgttgaatctgtagattgctttgggcagtatggccattttatgatattgattctccctacccatgagcatggaatgtttttccatttgtttgtgtcatctgtggtttctttcaacagtattttatagttcttgtagagatctttcacctccttgtatagctgtaattatgtcattcatgctttgttcaattgcctgattctataatttgaaaagtctgtaataccataattattatttggactatgaacattgctcattacaatgagtggtgtgcaaagattacattttcttttttataattccagtacttcaaagttgtgtgccactcatgaagaacttcttcatttatttgtatgtttatctactcattcaataaatagttacagggcaccttctatgtatcaggcactgttccaagctcatggaataaaataatgagtgaaaactacaaatgttcctgacctcctgaagcttatatcccattgaacagagacaaataataaggattgggcacagtaagtaaataaattacatcacatttaagaaagctatggggaaatgaaaacataaagcagggtgaggaagaccattcttgctggttgtaggttataattttaagtagtgtgatcagttagacttcatttaaacaatatttgaggtacataaggaagttcagtacacagatatctagagaaatagagtttgaagcagaaggcagaattagaggaggaaatcctacctgggaagtgtacctgatctttgagactggagtaagcaaaggtgaaagtgttaaaagatgaggtcagagatgtgattggggctggggattggggtggggacagatccagtgaggactctcacttttcctctatttcaggggagcatttcgggggttgagcaaagatgtttactgctctgtattacattttttaaagggttactcctatattgataaataaatgtaagaagcaaatatccaagtaaaaaggccaattagaagctatgtaagaatgcaggaaaattgtgatgtgtccttcaacactgggaattccatgtcttttatttccttgaaatttctatctctttttaaatgttctatctttcttgagttatatgttggatcttttgtattgattctatatgtctcttagctttttttctcaaaagtttcacctcctattcttcattttatcttccaattcttccactgaaagtaccttttagtttcattttttgttgttctttcactgtttgtttttttccccactgcaccctatacctgtattatggatacactgtcttcataaataaatcatcttagcaatattggtatggagaattttatttgggtttagtttaacttctattccttttctttgagtaatctctgcttccccaatagtcattttcccttttttttaaattatactttaagttttagagtacacatgcacaatgtgcaggttagttacatatgtatacatgtgccatgttggtttgctgcacccatcaactcatcatttacattaggtatatctcctaatgctatccctccccccttcccccaccccacaacaggccctggtgtgtgatgttccccttcctgtgtccatgtgtcctcattgttcaattcccacctatgagtgagaacatgcggtgtttggttttttgtccttgcgatagtttgctgagaatgatggtttccagcttcatctatgtccttacaaaggacatgaactcatcattttttatggctgcatagtattccatggtgcatatgtgccacattttcttaatccagtctatcattgttggacatttgggttggttccaagtctgctattgtgaatagtgctacaataaacatatgtgtgcatgtgtctttatagcagcatgatttataatcctttgggtatatacccagtaatggggatggctgggtcaaatggtatttctagttctagatccctgaggaattcccacactgacttccacgatggttgcactagtttacagtccattttcccttttttaaaaaactgatttttccatgttgaaggctgtcttcaaatgtatggtaatgcttggatcgctgttcatatttaagtataagtaaaagaaaggcagacttgggggcctatatacttatgcaggttttgtctgtctcacttgacaaagaatgagtaggatgaatctgtcctttaaactggaggactctaaatgctttaatctgtcattgtcaacatttgtgtaagcagttagagaattcttagaatatgctttccatatttcttcaaagaagaaatttctgccttttggcttgagagataaattttggctgtcagtattttttgagccaagataaaggagggaaattggagtggggtggcrttgactatttataaaccaaatattagcctcatttttgctatgactagtgttgctgagtctggagcctgtgtctgtaatcctaaattgagtcttcctttactgtgaaccataagtaaatacaagattacaaagtggtaagtgctcttatttttgttttaaaaataaaacaagatgacttagggaggtcaagaatatttccctaagaaagggacaattatgaggagatctaattaataaggaagcattcacaagatgaaaaattaccagtagagagcacatttctggcatagcctattcaatgaccttatttcatgggagcacatagggtgagcacagggagagacagacatttaagcttttagttgttgttgatgatgattacttcattttggacctagtgttactaacaacaataagactaattgttaaatatgcataaaacacaattattaatatattcaccttaataaaatgatcactaaacttttgagcccctagtatgtgtgactatcttatgtgttaattataatatttagtataatttttatcttccaatttgcaagtttggaaattgaaactgcaagaacataagtaatttgcctaatgtcacacaaccacaaaaactagagccatagcaaactcagaactgatttttcacattgcaattattttctttataataccttatgaaataaaaccacagctaaaaaattaataagatgattttttaaatccctagactttatatccatttgttttattttatctatttaacttatttgacttatttcagtgtttataataaaaaacaaatctgaacttaagagaaaaaataacccctagaaatgctaatatttatttactactgttgtttaaactttacaatattacttagaagcaccattttcatacagtagtatttaaatctgattatattagagctcaaccatgggtgattttttaaactgatttatcttctcatttattgtgcgacttcaaaatcttgtgtcaataacaccaataagatgaccaataagatgactcaaatacacttttgtgggatttgttaataaatgacccagatggaacaacaagaatattaaaatgaagaaactctagacacagtttgttgctcagccttgtaggtgaaagagacagaggaaaatgcataatacttatcagtcaaatagggcctagcagaatgccaatattttagactgagacatttttatgtgtcatttgaagtcatttttggcccttgttgttctgcagatgttcctgaaaaaatctaatgattctactctttcactttgttttgatagaagttttaaatatatcttcccttttctgtgctttagagaacaatcgagactaaaccggaagaaagggataaaaactttaggagtgatrgaactcagttcaatgaaaacattgattaaataccttaatcaaagtaaacattaatataaaaagccttttaggaacatagaggattaaatatgggaattattataatgactggcatcttgagccaaccctttaactctattttctcctatacgaagcagatgccacagtctttcatctaaagcacatataaagcaggatgacacagacattcagtgacagagctagaaatcagaaggagctagttcatctaacttcattaaagcaactttattttgttcctctggttctttaggatctttaatgatacgctctcaaaaattcaaaacaggtgactgaagggggagatrtaaaacaaactaatattagacaatggcactcacattttgatttttagcttgagtgtgcgtgtgtgcacatgtgagtgtgtgtgtatgttcatactgtacagcatatgtgctgcttctaatatttggcctggtcatgtaggatattttgttgcagctaattcactaatctatcacatagacacatttttaaattatgagtcttttatgaaataggatgtctcttatttgtaatgcttagggagcaaaatgtctgtttttagtagggcttgatatatctcattgctgaaaaatttcctctaaatctgaggctcagaaaatgtactccattttacataattatacccttggaaatcaccatttctgcctgatgcaagttgaacttgctgcttagggtgtatgaattactcctttgatacaggtgaacaaagcatagatgtgaggaagatagtagatgatgagcaaaaacacattcaatgatgtaaaacacatttatctgaatttatatcttccaacagkattcagggctaggcaatattcaggaaaaaagtggtattatttaaataaaatgagcaattgctgacttgacccatgggtgtttgwcattgttttccaggaaacaggatgggtgggttgttttcatcacctccactgtttcccaagcttcccctgtgatccacaatatgaatttacaattgggttttgctgaaatagcagctagagcttgtgcagcaaagtttttctctgccaagttaactgggctgtatgggattaaatctgtgaccttgtcctcattaacccaaygctctaaccaactgagagagcttctccagttcactctggagtatgtgagatgtctgcaatggtggacaaatgcaaatagagtatgtaacataatggccattggcagaatttttattttaaaataagcattcttgcagaagccaatattgcctcttaactaattactrttaaccaaagcattcaaatagatgcaaagctgtcactgctagatttagtatttaaaaacataaaagatattgctattcatgttgggaatgttttcatgtactatggcttagaaatcatgatctgtaaataatcagcagcccctttcttccagctgtgatgcattatcaagctgggtgctgactgcagaggatctagctttctgctctctgtatcactgattcttaagtctcttgacttgcaatacttttatttactcgtgcaacttgttttagcctatttcaggcttgtcatagattagtttcatcatttgactctgtttaattagttccccaggtctgccactcatctctgaaagcctatgttccatttcttaatccakccattgtttacattatcaaacagtttagtcttgacctcatatgttacctaggaaaaagagttcagtgattgtttcttaatttgactggtcatgaaagtgtatgtcaatatgttgatttttctgaactgtatgtgtaaagatcagtacacatctttacagagaatggttacattttgttaaacggtcatacaacaaagtatggacattttcaaaccattatcaatctatgaaactgtatcaacgactttgggtaaattttgattttttaaaagttttgcatggggtcrggcgtggtggctcacgcctgtaatcccagcactttgggaagccgaggtgggcggatcacgaggtcaggagatsgagaccatcctgactaacacggtgaaaccccgtctctactaaaaatacaaaaagttagctgggcgtggtggcggtcgcctgtagtcccagctacttgagaggctggcgtaggagaatggcatgaacccgggaggcggagcttgcggtgagcccagattgtgccgctgcactccagcctgggcgacagagcgagactccgtctcaaaaaaaaaaaaaaaaaaaaaatgtgtatggtataagtttctgygataactagaggagctacatacttttgactcacactaaaccaaattgttctaacaagaagctatctgactctagtttatttgtgagaagaaatgtttctgaatagtcaccataaactttgtattggttaaaatatcgtagaacgagtttcatatgggtgtagaaatttttctccgttatataaaagcttgtaattttttttctaaaaggagacttggggaactgcgacagtgcactagcaattcagcttttgtgtaaattactttatttatcaagagttatgtttcaaatatttaaaagrcctaaaagtttctgtagaccatcttctcattttatgggtgaggaagtgagactcagcaagacttcaagaagcaatttcacaatacgtctagggagaactcaaatccctttattcaagcaacatttcatcactgaacacatttgtgctggtacttttaaagtataatttgttgtaacattcataggcatactttaatttatctaatatctatatttctttagtaagagagcaatgtatttcacctccatatttttcattactggaaatagagagaccaggtgctaagttaaaatttgctgatgtaaatatgagtcaacattctgcttcaatactgtatctctctgtctctctctctccctctctctgtttgccacttaaaactcatgaggtatgtatgttaacagataagtaacaagttcaaaactttctacattttccaaaaatgtttactaaatgcaaagttgtgactgattcctctgttgcaacataagtaaacattgcaattccacgaactacttaaaaccatttttaatatttattttataattctttgactgggttagtattttaagcaaacatggaaaataggtagtgaaaggctttctaaaaacatttattatgtacaaagttcatgatatgttttgttctaagtactagagatggttggtttaaaaactttgacttggtccrtgaggtgttcgaattctagcaaggaagcaaacacactatttaaaacaacaataaaataactggatatgggttgatatcagtgttctactycaagtgatatgggaaaacaatgagggagcaactgattattttagggaagtcctcacattttttagagaagaggtggaaattaaacaatgaatggcataggataaattggaattaactaggtggagaagcaaggataacgattataggctaaggaaatggaaacagctaaataataaagatgagaccacaaggggatataggagtaaagttgtccaaatagtagcatcaaaggtttgtgtggtaagaagtgtttagtatgggaggatatgcttagatatctggaacccagatggtaagcaattgtgtatctcttgctaaggaagcttggttgcttttggtgtgtgtgtgtatgtgtgtgtgtgtgtgtgtgtgtgtgtgtgtgtgtcatgtgcatatcctgggtgtcatgctactggtaaagcaagtgtatataggacacatgcagttcctctttcccctttgcctgtaaagtagatttgacatgtaatttttaatgcatctcaggtcatggaacagtgaattcttttcttggtagatgttaatactgaagaatttaaagagaatcatgaatggaattgcctttcatcaaagcaaaaatgaagtccttctcaaccttgtactttgcgcataggttgaagataactatacatcattcatttttgaaatataacttttgtttaaagctactggagattttgctatttatttgagaagtaatttgaaagtgaggagaactcagcatatgaaggttgaacatgtcatcaactagtccaaggaaattcaaagtcaaaaatcaaatccttacgtttatgaaagacatcttcgaggctgggcatggtggctcaagcctgtaatctcagcacttttggaggctgagacaggaagattgtttgagcccaaaagtttgagaacagccttggcagcatagcaagaccccacctctacacaaataaaaataaaataataggccaggggtggtggcacatacctgtagtcccagctccttgggatctgagggcagagcatctcttgagcctgggaagtcaaggctacaatgagctgcggtcgtacaattgtactccagcctgggtgacagggcgagaccctatctatctaaaaaaaaaaaaaaaagccaagatcctgtatatggaatttccagattattctggggaaaaaagatatgttacttgaagtattcattcaatcaagctaaaaatattctaagtttagtattgttttgtttttctgtctcagtttggacactaatactgtggtttgcccaayatggaatattcagaatctgagagctctatgaatatttgttgtttgggcttaactaaattagaactcttgtggagtaccatatttagagttctcctttagagtagagcccaattagcatcttataaataatgcaaatatgaatgaagcagtaagaatgctgccaaagttcactgcttgttttcaacatattgctatttacaaatacctcgttatttttaatgtaaattctttgcaaagtattattataagtaccgacagcaataattcacattttaaataacaaagaataaygacaaacacaaatcccctgatagtagttacaatttcctccagtttggcaatcctcctataagacatgaggatgtggattgctcttcagtatcactgattcttctgccatttaaaaaaagattggataaattcagcctcttaagttcctaatttagtaggtttgatatagtcagtctaagtattaacagcattttagcacctacaattcttatattcgatgtttyggggtgtgcaaamamtatgtagaccagacgttctgtctttaagtmatgtccgtgacaaatagagatcacagacgtttacaaaagtgacgattactctaagtgggcagagaacagagatacttakgagctgtgggtggttaagcaaaagatcaagaaagagtcagtgatcaagaaagagtcagtgatcaaccatgaataaaattcagatcatcggccggatgcagtggctcacgtgtgtaatcccagcaatttgggaggccaaggmgggcggatcatgaggtcaggagatcgagaccatcctggctaacacggtgaaaccccatctctactaaaaatacaaaaaaaattagctgggyatggtggcaggtgcctgtagtcccagctactcgggaggctgaggtgggagaatggcgtgaacctgggaggcagagcttgcagtgagtgagcagagatcgtgccattgcactccagcctggacgacagagtgagactccatctcaaaaaaaaaaaaaaaaattcagatcatcagcaagtgtttaggcttcaagcatgtgaaatattccaatcaattggcaaattatctctgaggctaactagggctccctgagcatcagaaagtttaccagccagaatgtaagataaattaatcctgcttaaatattttccagttgccttcctctgcaggaatgttcagtgttggttgaagagtgttgagaatacaggtgccctaaacatgtcagccttgcaggctttccaggtctctactctccaactttttgtccatcacccctctggtctctgttctgataaaatcagcagtcttttcccagagtgcaaaagcagtctcttcccaggaactcatatgtgccagccactccctcctgtctatttggccaaaccttccactttcttcagctcaagtctaccctcctgcacttttgcacttagcttcctgggatagatgcatgcaagggatgcctttatcccaaattaaaattgatcttataagctttaaaatgataatggaatttgttttgctgttatttgccatttttattgacacaattgaaatacagaaaattacattcaactatggtttttgatgatgagtattttgtgatgaaggaaagaataagttttgaaatacatgtattttattaagttttaaatgcttaaaaatcaggtagcattggagaactcaatctatttccattgtaattcctctgaggtaaataagttggtctcatatctatactgaatgtaatattgtgttaattataatactgcagcgataaaatagaggaaacactaatggactaattatgctaaatatttccatttctaagtagacagaaaacaaaaaaagttaacattcctacttcactgtaattcattttatagactttgaagctgcaggaacatcaaactacactaagcaattttttaactattttttttgcccatttcttttatttaaattttgatttctccttgacttttatcagttacttccttttgatccttttctcatattcttttttctgtagtcctatgtttacttagatcatttaatatattatagtattcaagtatttcagcaacagatttttttatgtcagaagcattggaatcattttaaaaatcaaaactttaggcataaccccattatacaaatataggcaaaagaagacgaacttgggaatgctacagtaggagaagtgggatcccccacttttgggggggatctgattcccatttctattctatatccttcaacatgaaggcaagcgaaagataggttgacaacactgatctatttaaaaattatgtatacttaattacagtgattttatttcccattgaatcttctatgtaaatactactgatagagctggctgagttgtttttataaaacatagacatttacatattcctacctatgaaattgaatgtagctgtaactgaatgtgggtaaaacctcatcttccttaatttgtttgagaagtaattataaaatgaaatggctggtcctgtggtaattgttaattatgacacaatttctctgcaataaagctctcagctaaatagataacatatgacattttcatgagttagtttagccatttggttaaaatataaaatgcttcatatctgtcttggttatacatttattaatgccatatggttgatcatctgtgtaactgtctctctaactggtttcagatagctgaaaatggaaacaagttttctttataactaaaatagaaaataaatatatcccaccataaacgtgaatgtgattgatcatctatcacttcctattttttttccttcaaagatgtagtctatgtaattctgaggaatcatttattgaaaaagaaaaaggcttcaaattatgatatctaacaactaaaaagtcttgcaagtttttcttgctccaccctctcattttacagatagaaaagataattcctcttttcaaaatttaatatattttatagagtgaacggtttgagaaacaattgattattctctgtaggtcattgcatttcagggctttagatgtaatgtgacatttcatacaaacagaagtgttgattatgtaataagtaagtaatattgcaatataattgctctacctgaattgtgagtgcttataaagaatgactggtaaaatagatgtcataattgtgcttgtaaaaccatctggatgtttatctgagggtgacattatttttctcaaaataatactgcatgtatattaagaaaaaatttacaatgctttcacattgtttgtatgtcacgaagtttgtatgcaaacttcaaaaacaagttaagtagtacaatgctttactgaataaaactaaactaaaaagcagtgaatacaaacagttctcctgattcataattagtgattttatatactcgatacttctgcacttattctttgtcagccaataaaatagtgtgtgtgtgtgtgtgtgtgtgtgtgtgtgtatttgagctgtatcctcatatagaactagatatgcacttgcgcctcatggctatgggtatgtatatcttttgtaagttgtatataatatgacagagattcgatcatgtcacacttgtttctggacgaagttgaggagacctctataggaccaatcattttcttttatggccaaaggattaagatgatgcaaagatagtaccttccgagctcatgggctttcatatacctcactatgataacaaaattgrataaacataaaggaggccgtataggatatgaaagcaaatcatgtgtatctctgtgagaaaatgaattattcttcagatgattagaaccaaacagcccattaatagaccctaacctcaatatttataagtatgtaattctgaactgccactgtaaacaaaacccattttctcatttgttaaaccagaaattcaatgcatagcattttgtcggttaacaatagttctgtttggccacatgattaagtgatatttaggatgatccatcctaaatgtgcctgttgatgataaaagtttagaggttctttagtctctggaagccacttgtcctaattcaccaactcactgccattttgtaagtcagccaaattttcacagctatagcactatagtgactttatttttacctttttcttccagttcaaataaaattcattcaataatattaataatatttcagattgtgatataaataaagaattcatggagagctttagtcatctcttccaacagaaattaaatgtttcaagtctactaatagtactcactttgactatctaggtctttacttggaacctgtccatcaggtggtrtggtcagagctaagtcaataataataacatattaaggcaagtcttttgtatctgttttatcaccatatgactgacttcataggattaataaggcaccacactggtatsagaacaatgattccaaaaagtacaagaagcatattataaattattcttggttgtatkatataatgtaattgtaatgattagtttgttctgttactgcattccacaatccaatcaaaggtctaaatcgacacatgttgctgaagaaaaggcaatatagtccaggcatttatgtagttcagattatatggtgaactttattgtattataaactcaagttccatattgttagattgaaaaaagggagagaaaaatatactaagttgagatattagtttttatttaagtatctgataagtgagattattctggtaaaggttagaggttatactaatgcagaatttgaaatttacatttctgtcattatactttaatttcaattgtaatttctatttttgacacccagaaatctatgatgattttaatgaaaatatcttatgaaaatamtactgtcatattttaccttaaaacttaatattttagatgagaatagaagcacatctcttttatgatatgttgcctgtataaagaaggaaaaatagggactagttctactgaggtcagaaagtagcttttaagttaaagattttttttcctatcaatgaatagaatttttaaaaagaatcccaatggaattagactcactctttagacagtaatccaagtggggttatttctattttggagacagtcttcaaaacaattcaaaattactgtaaaaataaataataaagcctaaaatacaggtgcttaatggagcagatagagactcttytctgggatagatagattattggtgagttttgccaactgcttctttcactaaatgatagaccataagtgttccagggaagaawcgtctttcttccctgttggattgaagtaagggcatatgtcattcatagcacagccactgtgacaacacaaagggttttgctcccagtctgcagcctgggctcttaaggcactgtctttctgaatggtacaaaacaactactaggccttctggctggttacataaataggtgtgtctcaataaatgagctattaaatagttgattaactggttattatctctttgtgtccttaggcatytcccaactattgtctctaaaatgagtttggaatgcactttcatgttccactctagctctgatactatctgattatcaagatctagggagagacatgttagctcacacctttaacttaaattagaaaacagatgctataaatcattgtttgtgcattaaattcccgtgatctgagtgaaagcacatagaggtttatttgctaaatatttaacrtatatatttagtatcatacttgctaaattgctgcatattttcatatatatgtacatataatttcatatctaacatattacatgttayatggtacatatatatgaaaagatacaggaattagcaatgtgtgttatatgtgttaagtatggtgaatgaactgagaagaatgtgcttctccataaaagggactttatcctaatatttacacataagcatttatgtaggtaatgaaaaagttggcaaactttttctatggaaaggccagtgtataatttaggctttgcaacccagcaatctcagtcacagttacttaattctgctatttatgtaggtaacgaaaaagttggcaaactttttctatggaaagaccagtatataatttaggctttgcaacccagcaatctcagtcacagttacttaattctgctattgtaacacagaagcacttattgacaatacataaatgaaggagtgtggggaatgtggctgtgttccaataaagttttattcacaaaagcaagtggtgtcctaacttagcttggaagttacagtttgtcactcctaggtcatgtggacaatattctgaatatatccctattttaatgaactatctgttgctatagtggtttcatttctaccacagcaaacaatgcctagaaagactagtctatyaggtgttgatatggttaatattctcctgatagaatcaaggaattctagctcaagtatgtatttttaaaaatcatttagcatcattttgaactccaataaagtaaattttattaaatcaaaaagtttattttattttattttattattattattattattttttgagacagagtctcgctctgtcaccatgctgaagtgcagtggtgtgatctcggctcactgcaacctctgcctcccaggttcaagcaattctcctgcttcagcctcctgagtagctgggactacaggcgtgcgccaccatgcccagctaatttttgtatttttagtagagacggggtttcaccatgttggccaggatggtctcgctctcttgacctcgtgatccacccgcctcagcctcccacagtgctgggattacaggcattgagccaccgcacctggcaaatcaaaaagttatatagcgtgatctagaactgcattgttccatgcagtagcccctagccaaatgtggctttttaagtacaaattaattaaagttaaatacaatgtaaacttttttttcttagttgtaaaaagtatttcaagtactcagtagctacattggcctagcggttatcacagtggaaacatggaaaacatgtccattattgtcaaaagtgttattggacagtacttatactagaccaaaaacacatttatagtcattaaagcatttactaaaaggcagactatctcatagaagtgagagaactactctgtcagagggaaataaattgggaacttttcaaatctataatcgttatttaagaattttaaagatttccattgaatgctattaccacagaaccttcctagagatttatgtaatgcctttgtacattcaaaaggaaattccagctcagtaactgagctgcaaatggcacccattgaagctactcaaccacattgctgaaggccaccaaattgcttcttgcaggcttctactattcagaaattattaaatactttcaaaaaagtttaattttaaaaatctgagcttaaatgcacccmaaacacgtttctgtagggcattctttgtatgtagcgtaggactttcattttgttactccccttctgtgcattcattcctagcccatgataaaaataaaaaaaaaaaattatgcgtataatgaaaggtctaaggaaacttggatcaggacagatgttggcctgtagaagacttttattccttcacaagttgttattactgaaacattttagaaatttcaggagaatgttgaggttttaaaggaaagtattaatacacttgacaggttttaattttttaatctagtcaaggcaaacagctttgaatcaattatccacagttttcaacatataatcaaggattttgacaatatttagatgttgaattgccaagctattagcaaccaagagatttgattagacatccatattaataaacacctgtcataatagcataacagatgttctaggaacacagctaacacaaaatctaaaaaacttggtcgtattttttgmcaatgtggtgcctaaattaaactttacaacctttatcatacttgttttaataaaattcaatgctgaaataatttatatcaatagaaaaatatttttacttcaaatgactaaaaggttttcattgacatcaaagcctcttgcagaaacatttgaaattatcagttaaaagcgygttagcaaaatactagtgtgtgatgtgtgtatgtgtgtacaaaatatacacatgttattactaggggctcctgcgtggaacagtgcaggtctagatcatgcacatgctctaagatccactatttaaaaatttgccatagttcaggtccatacatataattttatttgatactcatatgtaacttatatagacttatagtttttgacaaaaggcatattttcagtkctggtccactcaatacaatggttgatataatatgctaaactatttaaattaatatactctctttcctttaggattgtatttcatgaaaataatatacatgcacagtatataaaaagaaacattgaggccaggcacggtggctcacacctataatcctagcactttgggaacccaaggcaggtggatcacccaaggtcaggagttcaagaccagcctggccaacatgrcaaaacactgtctccactaaaaatacaaaaattagccaggtgtcatggcacatgcctgtaatcccagctactagggaggctgaggaaggagaatcgcttgaaccagggaggcacaggttgcagtgagccaagatggtcccattgcactccagcctgggtgacaagagctgatatatgatgcactgtagccagtggattctgtgttgttccagagaatagatctaggaccaatttgaggaattcagcagatttttgttgaatttaaagaaatagctgatagttaaagctgtcaatctagcaaaaagaaaactatcccatggagttatgggcccctaatgtggaaatatgcagtgcgaaattagacagctattagtcatggagtttgtagaaattatttccacagttgagagaccccagactaattgaccatcaagtttccattcaactattagtttctataatggtataggtcaaaggcatttgtgattgtgaaatatcatgattcatgcccactctgattatctatgattatgtattttttatgcagttgtctcattttacttagttttatcttttaatataattatgtatggtttatggtacttattgaagagagaaattagctcctttgggaaatctctgtgggtcagatttttaaaaccccaactggactttaaatgtaacagttgtcttttttgtcattcatgttcacttactgttagtacataacttcttctttcaattccaagcttgattcagacattattctttccttcaactaatattctccccacaccaacaagtattttatcatatgacccagttttattttcaccttacatctattagcatctgaaactaccttattactatttatttgtttacatgttcatttgtttttttaactttactcttttccctatttgatttcaagccttatggatacaaatgcctaggaaaactcctggtctatggtaaaagtgcactataaataaatttaatgaataaattaataaacaaatacgtgggtgaataagccacattttattttgcatccatgaagcttaagatctaatagggaaaagagtctgttcccaaaatggtctttccactggggtgtcattttcatccagtcattctatgttgcagacagcagggccccagccttattcttgtttttatccatcatacagcatagcaaagtgccacacgcataacaaattaacaactgttaattgtatgggtgaattaaaacccttcatggaagtgatatcactttttctaaagtgtcttggtaaactagactcttttacaattaaaacaagagaaagagagttgctgtgtgtcgatttttggcccttaagagaataaatgaaactggcaaactggaatagtataaatatgggacaagaattagaagtgccaggcttgattgacccctactctacacatttctgacagtatgaacttggtcaaggcacaatcttgcatgcacatcaatttttttttgtaattggggctaataatctctgccattcctatactccagacttgctatgtatataaaaaatgcaatatatgtgggaaatttgtttaggttgtaaaatgccatacaattaaaacttaccagtatgggtagcattaaaacttctgtgaaacccaggagcagaaacctctccaattcacatgtaagagtaacaagtgtctctggttttaactagcaggagaatagaagggagtaagggagaagagaaagagaagagacaaagaataaaaaagaaacaagagtgagaaaagaaagagaaagagaagataaaatatacaagatgaggtcacaggaggagaatgtggccaagagggaggaagagaaaagggagtagaacccacaaaagagaaataattgcattggargggaattgcgagtggcatctatggtgaccacagataggctgaaatctctaaattaagacttcattcatttcaaagcaatagactaggtcaagtgagggatgaggtaggattctgtgtttcaaatcaacacaagattagccagaatgaggtgtcatcccatggaaatgggtgactacaaatgccagagacagggtgacattaacctattcattgctaaagtagaaaccgcagcaagaacataggcttatgcctactaagaatctcttcttagttggttgacatgcattctagttttcaagacccaaactctagtagaagaccaccttctggtagtggtggccttgcaatgcatatgacttgactgaatgcttacattttgtacagtgtgtcacagctgaaacctctgcagttttcaccaagcctggcctgacacactttccctacaattagttatcatgtgcgtggcataataatctgaacataatctttgaaaggaaaattaaatcatacatctcaattcagtgatccttgggagccatctgagtgtatggaaaattggttgctataaaagatgcccaaactcagctcttagaagacagagtagaacctacaattcccagcccttcagctattattttccatgtttctaaaataatagctatgtttraaaataagctgctcttttgttctttagatcttttattattatcattatttgtaacaatgttttccagttttcaatttgaattcctctttctccttttgttttttgttggtctaaaaagcccctaaaaataattctttttgtctttactatagcatctgtgctcacaggaataaactactttttagttattctttaacttacatactacttccttctctaatatccagcatctgaaatgaggagcaataaaaatatgtccttatggtcattgacagtttctatttggaactgatttagccaagggaaaggaggctacatygtagatgatagtaacatgttgaaagtagatgcatgctaacaattttagaatgaacaatgttttcggataatcattcactgcctattttggtttcaaaaatgattatccattatgaatgtcacctttattttgaaccttcaaaaaaatgaatacctttttcttccttccatcttttctctacatgctttctcataatcttttgtttggaaatacctaatagaaccaagcatacaaaataaaactcaaaaccatgaagcttatttgcaactcagataaaggaattgattaattcatctctcgacacgtatatttttggaagaactgtgatatgtaagaccatggctagtctctctactgttgtgtctccagattctctgggaaaaccgagcatgagtcagccatggaccatgccttcaacatgcttacaatcttgttcaagaactaagatatctatatacataaccatgaggtagaaaggggtgacaatctcaaaagaggtatgggtaagatgagagatatgttgagagaaatcaaaggtttctaccctgctttgggcaacaggaaatataatctggaaaaaataacattggagttatggctttaaatattagtcttcaaaatggctataagatgttcttttcgagagtgaaaagaaaatattagaaagtttctttaaatttgttatctaaaacgtaaacattgtagccttcccaggatttaatgtatgattggcattgacactctsctttagtgtatatcccagacaagagagctttattaaagggttgtctgtggtgctgtcacttgttctgtagctttcaacattatcacaatcaaagatacctggatttataaccctccttaagtgcgacccattgttttaatttttttataaaataaactatggattaaggataattaaaagggaagcccaaacagaacaagatgtcagaattggcacttctcttaatcttagtagagatgatggtcagcaacattgcaaaataaaatcagtgattatccagtcaaaactgaaaagaactaggccagtaaaattagttatcaagaagactacgtgaagtacagaattttttttttttctgagattgagtctcactctgtcacccaggctggagtgcagtggcaccatctcggctcacagcaacctccgcctccagggttcaagtgattctcctgcctcagcctcctgagtagctgggattacaggtgcgtgccactacatacggataatttttgtatttttagtggagatggggtttcaccatgttggtcaggctggtcttgaactcctgacctcatgatccacccacctcagcctgacaaagtgctgggattacaggtgtgagccaccgcacccggcctgaagtacagatttgcatcctctaatactcattcacaaatttctcctgagggaatattgcatcttgagattgtttttaatgacattatcattagcmagatatttaaaatagtttcttttatctttacttgatctctttaaaatgtatatttctgtatacatcttatacataacttagtagcatgataatgcaggtataacataaagaaacatagacgtatagagaatgaagataaagcatgtaaaggctctattctggacagagaataaaatagaagccccaaagcaacctatttggctgaagctatcaatgttttgccatttaagacaccaaaagctcaatgtgaagagggacgcctttcggatgccagctcctggcgtaaacatattagacttcttggaactgatcccatggaacaggcacagtcttaatgatttcagtcttctgggaaaatgtcatatttttttccaattaagtggcaaagaagttattcagcaccagtgtgtaagccaccaaaatatattctatgagtttcctcctgaaagctgcaaaggatttgaattatattcagagtaacctccctgtcacgtggctgttggtttctcattttctattcttttcttcctaaataaccccacttaattgagacccagtatctcatgtttcagtgattgtcttcaaaaaagaaacactagagtttggggagcagttctaggcagtagagaaaggcagccttctcagcccggttcaatatgctcaaatgtcatcagatggttttcaagagtatttggggaaaacgttgaggcctattttcagaaagacaactggcagaccttaaatgaaatagatctgttgtagaaaaaggctgtggcctaatacatcctggcactgtgacttaaggcacactgctggggcagcagcacagcacgcacaccttccaggaaggaaggaggggaagtaggaaggaagggagggagggaggaggaaaggaaggaagaaagggagggagcgagggaggaaggaagggaggaagggaggaaaggaaggaagagagggagggagggagggggaaaggaaggtagggaggaagaaagggagggagggagggagggaggatctaaaagcctggcttatactcctttcagaatgacaccaatatgagaccctccagatggagctacctaatataaagccaggtccaaatatttaagtatggtgttagtctattttttcctgaggcacaaatttttttaaggcaaggacacatccacatgagaaggaggatcactcacagctgcacatgatgccgaataactaccgtattatggtgattttgctttaacatttgttaattgaagaggcattatgttgtatcattttgcaatagataaataatgggatgttaggcctcatgaagggtggatggtgggaggaggaagaggatcaggaaaaataactaatgggtactaggcttaatacctgtgtgatcaaataatctgatggagagaaaaaaaattttaaataatgtatacgtctgaactaaggctgattatttcaaatttttaaattgtaccctttaaaaattgactttgggtcactgcacaatatcgtaattcaataaagcatgtaaatcaattgagagcagcaaaaatgacacattaacatgaaaactagctgcataactcagtatgtctcaagtcatactcagtctgaataagctgattgaaaatagtaagctttacggtgtcctaaaatttaatgacctatagctgtactagactagaatggtgggggtgcggggggcatgccaaagatcagctgccaaaggtcttgtcatctcagaaacaacaacaaggcctgagactggtggcaaggcagacccttgaactaactctgtactgaatctattagctgtgattggtcttgactaagttagtggctctttcacctttgtgtgtttcttcatctggaccttagaataatattatgccatgaccagaataagaagtgagtcagtaggctttaagaaggtcagatgctaactaataatggctaaattatattattttcctaaattgaatgcgattattttctgagcttataaaakttggtctgatatgaaaggagcaggggyagccagtatatcacggtggtttaaagcgaagctggaaaaaatgcccaggctctgtaagaatcatgtgcatgattaatgctgaggccactgccaacaggaaaaagagggactctcacagtcagagagtgtgatggtatttacagtacattggctttgattaatgtgcacactcagagaagtaatgtgtggaaggcaagaaaagacctgttttcaaatgttggtgctgagtacagatttcccattgtgtccagagagggtgtcaacgaataatgacttttagtcttttggtttgttgggtgtgggggggtgttggtgaggaggacattscaggggtaactttcccatgtacaagggaagataaaaatggctttgcagcatggtgcagtggctcacacctgtaatcccagcactttgggaggccgaggcgggcggatcacgaggtcaggagatcgagactatcctggctaacactgtgaagccccgtctctactaaaaatacaaaaaaattagccgggcacggtggtgggtgcctgtagtcccagctacttgggaggctgaggcagragaatggtgtgaacccaggaggcagagcttgcactgagccgagatcgtgccactgctctccagcctgggcaacagagcaagactccctctcggaaaaaaaaaaaaaaaaaaaggctttccttgtgcattcttactactcatatgagtctggaaaggcaccactgagaagtttataccacatctcacagtttcaataaaggggattactaagtagttttaactataatgtcatccctaagtgatgcctttaagtatgcagtatttatatagtatttgaatgtcttatgaaaacatgtactagggttttcaaggtccatgggtgtcaaagaggaaattagtatatataataatcacctgaaaaaaaaatgttctcatctaccctagaagaggtttccttcttccttttgccccacgccagagccttatgtgctttcaaggagtatttatataatgtgtaacaccaggagagggaaaaggcaggttaaacttaatatgtagtgtattggggaaggagagtagcaccagacacataaagtgtcttcccaggtaattctggttctctcaggtctccaaatttttccaggccacccaccttcgatatgaattgtaagtaaaggagcatacagctagcaaataattaagaaccaagaacctgaccctttcactggaagttggaataatataggtcatgttaaaaaataactggcaatctagagaaataatcaccataacaccgtcaatttatcccaactgactgctttgatttaaatgcaggaaaatcaatagcttcatcataggagctgattctgactacttggtagtgactcctgagggctgtgtaggctaaataatggctctccacgatgtccaccttcaaattcccaaaacctgtgaggagagattattgtaaatcatctgtgttggtccaatgatattataggagtcttttcaagagcacaggagaacagaaaggagaaggacataagtgtgataacagaagcataccttttagtgatatcctttggagatgaaagaaaaatccacaagccaaggaatacaggcagcttctagaagctgaaaatggtgagagaatggattctcctctcagagcctccagaaggaaccagccctgctgacaccttccctttagcctagtgaaacttactttggacttcccagttccagaaatataaaataataaatgtgtattgtcaacaaattggttaatatttgttacagcagcgataagaaactaatgcaagaattgcatgaagaaaaattagtggaacaagtaatacaggagtgatgccagtcatgagttacagagggaactgtaagaattaaaatgcattcaactaccaactctagttttctccttagggtgatgcaagaatttcattgccattggaagaaagagcagagaagagtggcagtgtttcttagacagctgtgctctttagatgttatagaaaacaaacttagtcmcaaaataggctgaagtccttagaagaacttctacctagaaaccacaattttcactagggtaaagtttctcagctaacattaatggctacttttgttggttctagggaacatcggatggtcgatcatggacccccacaactaggttacatgtctctatgaaccaaaagtccaactgggggagaaaaccatagtaattcccccccttagatctatctcttttcagacccaagtagatgggaaaaaaaggaaaagaaaaagatacatgccagatttctgatgaaagaaattcaaccaaagaaggggctatttattttataatccttgggattggttcaggtagacagagaataatgttttaatcagacccacttagaacaacggctgggaatatcttgtttctgtatatttctttgcaatatataaaacattccactgattctgaggtacccgtcgaatttcagtgctttaagatgcatactgacataaaacctatgatgatgctttcactgcaagatttatttttaattrgctctgaaaacatggatttaaactccttgctattcatttgaaactgacctgtattcttatatgttggagaaaagttaaggagtrttgagcgtctaaaattctgttttcttgtttataggacaaagataatagattttaggaacagagtgggcatgcraagcagcatatgatgtgatgtgcgcaattatgggcatgtccatgctgtgaatggctgcccttaaatgtgtgtagtgcaaaaggtgtgcagttctatgcagcagtgctgggtatgagaagtgagtaagaaaagtaagcaattgcagcagtgcctggaacattgtaagcacataataacacaataatgtttgttattatgttatgttttcagtacaaaatcacacaaaaaaatattaaatcttcagacttataaagtcctggagaaaatagtctgttttactaaagacaaaaatcaaaattatttggtttactgatctctattttgcccacaatataacaaaaaacaaactttgccaaagaaattcttcattctaattctacctttgatttcacctatgggttttgtgttttttcttgggatttttccccctccatgaaattcttctatgaattctataatctgtctaggatttgttacaacactaacaggtaaagggtaaattgaggtatttgaggaccgaagaacagaaaataaaattgtgcctaggatttctttagaaaagtagtagtgaatttgaggaagggaatttcttctctctctctccacacacacacacacacaccaccaccaccaccaccaccgccaccagcagcaatggcaatagtaataaagtattctcccaggttgatctcctaaaatatcttgaaaatacactctatccttgtttcataagcaaatgcaacattgaatatgaaacactattattgtgcacaaagtagaattcatgtaatttttgtttttaataatagatcctctagatggtgacaatttcaaaataggaaataaaattggtcttgtgcccaggcagagtatatgtcatgtaattacagctgtattagtgaagtgcctcagttctttctcaatttttcccatctacttgatgacatacaaaatttcctttcacaaggaacacagccttttgttgctgaaatgaaaataaaataaaatataggattttagcacccctgggatcatgtgcaaaggcaatgctgtgagttcacaaaaccttgttttcttttctttcccgaacggaatagaatacatttcccagctttctttgcagttacatgagcctttgtatctcatttctggaatatgggtgggagtgaagtgtgtcaatttctgtcctgaccccagaagtctcctatgagatctattctcattcctttctgttgttggatatctggatgcaatgacttgtgcagagggttctggagccttaggggacaggatatcttgtagatcgagggtacctaggtccttgaacaactatgtggtacatagcccaccacccacaattcgcctggactatcatgtgagagtggaatgaaatttattgtgttaagctactaagacattttgatattataatagcagttaggctactctgaataatatggaacaagagaaatagaaaggagactaatatatacaatgccagacaaacattttccctctttcatggagcaattcctttttcagacttgaatcccaaaagttcttcaggatactaattactcaagatgattgctagctgagtattcattagctgattttccaaggacttttatagggtcctcaaaactttggaatgacactttacaagagaaagtaacacccagagggagaaatttgccaaattaaagtttcatgtttgaatagtagaagaacagtgtgtccttgcttgagtctatatctcttttcaacttatcatttttggttgcttccatgataactactttttttcttttttatctaatacagaattataagtaagggaattctggtagtagaattcccctactcttgtaattcagctctattcttgtagagctaatttatataatcctaggaagttatactaccacaaatatctgtcactaagagtaaataaattctgtattaggagttaaataacaactttaaacgataacaactacacacagagagagtttatgtgtgtatatattttatattccttttttctcactaaaagaatatatggacaagacttgcaaagtactactgtcagcaggtgtaagaaggaactcaatataatccattcagttgatgttatctggcaagtattgtaattttggaatttaaaaaagtgaaaaggtgctgatgcaccttaagaacagtaaaaaataagtaaataaaatgaaaaggtagatttttataaaatataattatttgtaaaaggagaaggaaagaaaaaatgacatttgatgaacatctgctatgtgtcaaatgttgtgtaaaacatttgattttctattccttaccatgtgacaaatgccacagttttattttaattaagagaaaataagctcagatcagcaaagtcaactagtgaagactacatggctaatcagtggcagtcctgggatgcagacaaaacttatttttcaagtctgtattcatttcaatctactttatcacagcactaaatttgaatgttagaaataaaatgattatatctaaagctaagactctcagataaaagttccatttgctatattataaaaaagaaaacatcaaagtgcaatctcccatgtagcatggcacatggaatggctgagtttcagtgtagtgttcagaagccagggagaaggagagagggaggaagggtaatgggaataagagacagaaagaagtaataatatctcaagaaagaaaccccaggactgtaggctactggggccatttcaatcacttgtcatgacccccgaaatctatgcaatgtagtatatatatatattttttattttactgggacagagatttaggctgtattccttgaggctgctatgtgtgatgaagtcactgttggtgggcctcccaactacccatcacctatatttaaccctggtcttcaatctgttgcattcatggtaatgcccatcaatggctaaggtgatcttctaatattttaatttttaactcgatatgttttatgggaggcaacatagcatagttgttaaaagtggactctgtagccacattccctgagttcaaatcccatctccaatatttactacctgtgaaacttggtcaagctacgtttaacttgtctgttcgtcagtttgctcatctgcaaaacaagcacaagagtgctataaacttaatgattattatactgataaaattagtgtgtgtatagtatagtgtctggcaaacagaaaatgctgaatgtgctaactcttaattacagaagaaaatatatgctattattgttttcatctataaaatcaaccgctatgttatgggacttattctatataaacatcaaagaaaaaaaggattaaggaggaagtttttgatctttaatactattatgttttcaacgatttagggaataaaaatataaataatataattaaactttctgttttgttttcacacaatagcagaaactaccaaatcatttcatagatattcactgtccttaaaaagacaaaatgactctatgaaaacatttggtattttttgtttttaagccatagccctagttaattgacctgtttctgatcacctgtaccatcttcttctttctcgttttaatcaaaagagaaaggaggaaggagaatgaatgccagaaatgagatgargtcagggataggaaagagagwcaaggatgaggcagtgtcagaaaygactggcaggtttgtgccaagccaataaattttcaragatattcctttcacttatctgaataaaatgtccatggtattaccatcactgggttattatagcctttttcattatactttctaacccataatgttttaaaattatctttattayattttactttctttaattgacaaaatgtatatatttattgtgtacgagataatgttttgaagtatgtataaaaatggaatggctaattaacttatgcactacctcagctagtggcaggccctctacttcagagtctgatctgcttttttttttttttgattattattgtaaccactgtttattaaagacttctggcctctggtttctttaaaatattttcaatctcwaaccctttcttctctaggtctttttctgtaggatccaatgcaataatttaagatgctatttgctgacaggagatcccaagaacccattatggaaatgaaggcagcaaacaacgtttgaatatatttcccaatttaaaaagccttcattacatagtacatttcaggctgagaattttaaaaatttatcatagtttcagtaattgtagaatcctcttgaagtttggcatgatatagactcatttgtaaaatgtgtattttgtttggcattcagtaggaagcttgccaggcaatacatttaattaaaaacatgaggaagagaataattgtggtttggcatagtgtattatcattacttttaggttctacatgtgcttaagatagtggtctcctaacaaggtatgcatttaaaactagaggtaatttccctttcatcagcccagggtttttaaactgggaaacatagtattttgaggggaagggtactttagctkctccttagatataacactgtctatcatttaaaagatgagagccttagctgctctccttagaaacaatctttgtccattgtttaagacttgaaaaattgatgcattgcctttcaggagcttagacagctttatttaagttgaactttctctagagatgcattgaaataatgaaatgcaatgccttacttgaacataaccatgtacrtaacatctagtcctgcctgatgtgtaaatttgataagagcaactcaaatattataatgattaatgttgatttttttattacaaagcaatctttgtcagcagattcagagaaaatgtgtgatgataaccatctatgagaccaggttttcattgttgttagacatgctgtttcatttttacagggaaacttgctaataatgattttgagaagcaccatgggaaaaagggcaatgaaagggcctttcttggcttacagggcacaagtattttaggttcaggttttcaggtatagagttctttgatcatttagctttgcatgaatcccctctgtcttttatcactacatagtgctattcttcttagtgaacaaagactttcttctaataacacatcttattggatttaatattagggtgtctattctcaaggtcagttcaaggcataaataagacatgcaccaagattgttttcactccctgtcttttcttaagcaactgtattttggcctctcagaatttttcttttctcactctaactagtttattcctttttcccctcctcactatccctctttcccttgaagcatcaaaacaattgctttagtgagctgtttcttcagggcgctattctctgctagggacaaggaacagaaatctaataattaaaaccgagaaattcagtgtggtaagactcagtagagagttaggaaatatggacagaagtggttgtaaatggatggaacagctacattcattcagataatcattcgtttattttttttcaaaaaagggaagatagaaaaatgtccccttatcatatttcagtccagttgtacatctttaaagaaaggagctcttggtgaaaggatccaattatataggtgtttggctccctttcacagtaatgtgtcaaaaacagtatgcatttttctcacagaaatgctgttcttgtatcaaaatggtcactcactccggaaacaaatggaaaacttctccaaaaattaaaagcacacttcttgcttttttcctaccttgtagaatcctgaaatcaatgcaacttttattctgtggcattaggaaccaagataacatgactccagctttatattatactcaactattatgatatagttcttttttgttttttttgagacagagtttcaccttgttgcccaggcaggagtgcaatggcatgatcttggctcgccgcaacctctgcctcctgagttcgagcgattctcctgcctcagcctcccaggtagctgggattaccagcatgtaccacatgcccagctaatttggtatttttagtacagatggggtttctccatgttgctcaggctagtcttgaactcccgacctcaggtgatccacccatctcggcctcccaaagtgctgggattacaggcagaagccactgctcccggacgtttttcttttacttaacagcaagtaaacagattgagggagaactgagagggacaaaaataaaccatgtaaggaagaatacatgaatggtgttcttataggcctcattgactttccggtactctctgagtttagactttccatccttttcctataggacaatttctttctttctctcatgcttaaatcatgatgtttaagtgacataacttagtaatgggcaaacaagatcagatcaaagggtgggaggggtaagatcatgtaaagggacccaggccaccgctctccacctccaactgtagtattctgttggctaacccaagatggtataccgattgaccagtgtgcagcaccagattttatatttcaccaaaatttggctggattattttagatcaacagatatcacgtcatttcagtacttcttattaattgtcctcaggcctaattcatttttttctggatttctttttcactcatctcagcaatactctcaacattttccttttaagtgaatgctagaattaatggatttacttaggtaagtcttggggtaactcctctttgaaagtgggagaaccactatgagacaaacgagaagataaatttaattcatgttttcatgttgaaggccttagattacacatttcttaggcttggactttccatgtttgaatcaactgtggagaatagataatgggattaaaaaaaacacaattaatggaaagactgtaaaaacagatttaaaaaataaagattggaacaggactccaagatggctgactagaggcattcagcaattgcctcctccacaaagaaaaactaaaatagcaagtacataatcattctttgaatacagcatctaagacagaacactggaattcaacagaggagtgtcatgaaacacctgargcaagaaaaaaaacagggaagtaaagctgccagcttggtcaggatcacctgggagcttggagagtcaccccagtgtgggaaaatggtatatgccccagcagtccacattcccatgatgggctcctgcaatcctagtcactggagagttccttgacccctgcagaccataaggctaccacaggaagcagcctggatagtgtgtaatggcgtcgctccagataggtagcttatgctgggtcccacaaacaccctgagtcctaagcagttgtagcacagtgtcattatgagaatgtggcccaaaccagactgcatttctccctggggctcagcagcccctgcattcctacatccctagaaccccactgacatctccctacatcccttacaggactgcagtggcatgagagtgattagactcagcagaacagcagggtcctcagcactatagaacacacagcaacttgcaccccaggttatgggtggtgtagcaggcaaagcaaggtgcccctgggacaaagggagccaaagcatgtgctccccagaacttgaaacttgcctgcctggggctgctcccactgatagcaactctgcctcctcagcaatcctcaacttgcacatgctctgaagactggctctccccatggctgctgcttccaccaattctggacactgaagcgtatacttccaagagcctgagagccaactggctgtggctgctgtcactgaaaataaccccaattcccagaaacaggcccacagtgtacttgcacgtgccttgaggatggattctccctgctcattgctgtcattgctgccaccacccagcactttaccaggggagcctaggtttcaccctggcctgccgatcacagcctgtacctgtgtgcacaatggaggaggcctaatgacaggcttgtctggcctggcaacatcacccatgcctgggcacattgtctagggacctggggatcatcttgccccacccactaccactggtatcagtgcaagtatttcaggtgcttaagcgcaggcccacccagctcatcacagccaccactaacagaaacatgttttatctgtgagcccatggggttgtcctgtcacagatatggccattgctcatgccatgcatgctacccaggaacttaatgaaccacatggcccratactgccactgccagaacccaagaaagccacctggaggtccaagaattagccttcttagacctaattacattcgtgcccatgcacgctgcctgtgggcccaaagacaggcatgcttggcccaccaccgaggcctgaggaccaacccacctgcagttctcatcccctacaaagccttaccacagcctgcactaacagccacagcctaattgacagaggaaatcacagataccactgaggctatttatagacaaataaatcacatggaggctacattactgcatgcacccagaatcaaactaaagtgtcctgtgaaaccaacactacagatagatctttaggaccttcccctacaaaagacaatccaaaaaaataaagaagtgacttacaccatatgcaaagatatcaatgaaaggaaaaaagaaacattaaatgtcaaggaaatatgccacatctaaagaaacataataattgtccagcaagatattacaataaaaaagaaattaatgaaatgatgaaaaaagagttcagagtaataatattaaagaagctcagtgagatacaatagaacacagataaagaatacaaaaaaaaatcagaaaagacaattaagaacataatgagaaatttaccaatgtgataagcatcataaaaaagaaacaaaaattctggaactaagaattcaatgaatgaaatacaaaattcatgtgagagcttcaacaacagattttattatgcacaagaaataattttatarcaggaataaaggattttttaaataacttggtcaggcaaaatagaataaataataaaaaaagattgtacaaatcctgtgtaacaaatggggctccataaagtaaccaaagtttcaaattctggatagtccagaagttgaagagaattccaaagccatagaaaatctatttagtaaaatgatgcctggaaacttaaaagtcttaggagagatatgaacatccagattcagaaagcttaaagagccccaaatagattcaactcaaaaagttcttgttaaaggcaagttatagtcaaattgttgaaagtcaaatacaaagaaaggatttctaaagacaggaagagaatgatgttaagtcaaatataaaggaaaccttattaaaactaacagcagatttttcagcagaaaaattacagatcaggagagaatgagatgatayattcagagagctgggaggagaaaaaccaaaaaaaaaaaatgtcaatccagaacactatacccagcaaaaytgatccttcagctataaaaaagaaataaactctttcccagataagcaaaaactgaggaaatttattactttcctttgttttcgtgactcctttaaagggttcttatatctgaaagtgcaaagatgatatctattatcatgaaaacacaggaaagtataaaacttactggtaaacatacaaatgtagaaactactcaaatggtacaactacagaaaaacaccaaaccataatgataaacaataagaaagaaaggaacgaagtatacacaaaacatccagaaaacaatttacaaaatgacaraaataaatcctcacacataaataataactttgaaggtaaatggattaaattttgctcttaaaagatatagcttggtgactcagacctttaatctcagcactttgggaggctgaggygggcagatcgcgaggtcaggagttcaagaccagtctggccaacatggtgaaaccctgtctctgctaaaaatacgaaaatgaaccaggcatggtggcacatgcctgtaatcccagctactcaggaggctgaggcaggagaataggctgaacccaggaggtggaggttgcagtgagctgagattgtgccactgtactgcagcccaggcaacagagcaagactccatctaaaaaatatatatagagagaaagactggctgaatggatttgaaaacaaaaaccaaaaccaaaagcaaggaccacatgacccaactatctgctgcctctaagaaactcacttcacttgtaaagacatatagaatgaaagtaaaggattgaaaaagatatttggtgcaaacagaaaccaaaagtgagcataagtatctctacttatatctgataaaaacatttttaagtcaaaaacagtaaaaaagagacaatgaaggtcattatattaaagataaaaggacaaatccagcaagagaatataaaaattataaatacatatgtacccaatatgaaatcatccagatatatgaagcaaatattattacatcaaaagggagagatgtactccaatgcaataatagttggagacttcaacactcaactcttagcattagaaagatcatctagacagaaaatttaaaaagaaacattgtatttaaactgcactttagaccacattggcctaagaggccaatctacagaacattttattgaacagttgtagaatatacatttttcccataaccacatagacatcctgtaggattgaccatatgtcaggcaacaaaacaaatcttaacaaattttttaaaagttaatagcataccaagtgtcctcctatgccacaatcaaataaaactagaaatgagtaaaaagaggaattttggaagctgtacaaatacgtagaaattaaacaacaatctcctagacaagcatcaagtcaatgaagaaattaagtaggaaatcaaacaagtttctgaaaaagaaagaaaataaaaacacaatataccaaaacctataggatagagcaaaagcagtgctaagagggaagttcatagcaataaattcctactataaaaaactagaaagttttcaaataaacaatctaatgatgcacatcaaggaattagaaaagcaagaacaagctaaatccagaattagtagaagaaaataagtaataaagataagaacagaactaaatgatacagagactaaaaaaatacgaaagatcaacaaagcaacaaattggttttgtgaaaagataaaaaattaaataacctgctagcaagactaaccaagaaaagagagaatacccaaataaacaaaattataaatgtaaaaggaggcattacaattgacatcacagaaatacaaaaggtcatcagacactattattaacagttaacatttacaaactggaagacataggggaaatgaataaattcctggaatcacaaaacctacgaagatcaagtgtggaaaaaatagaaaatctgaacagaacaataatgcacagtagattgaatcagtaacaaaaagactcccgaaaaagagaagcccagaattggttcctttattgctgaattctaccaaacttacaaagaataactaacattgattttcctcaaggcattccacaaaactgaagaggagggaattctccctattttattttatgaggcagtattaccctcataccaaaaccagacaagaacacaagaaagaaagaaaactacaggtcaatatccatgatgaatgagacacaaaaaccctcaacaaaatactagcaaaattaatcaaacagcacaccaaaaagataacacatgttaatcaagtgggatttatccttgggatgcaaggatgattcaacatacacaaatcaataaaygtgatacatcatatcaaaagaatgaaagattaaaaaatgtgatcatctcaataggctcagtaaaagcatctgataaaattcaagatmttttcatgatgaaaactctcaagaaagtagatttagaaggaatataccccaacataataaaggccacatattacaaactcacagctaacatcatactgattggaacaaagctgaaagcctttctatcaagatccggaacaagatgaggatgcccacttttataactccccttcaggattctagtactgaaggttatcagccagagcaatcaggaaaaagaaagaaaagtcatccaaattggaaaaygggaggccaaattgtccttctttgcaatgaaattatcttatattaagaaaaacctaaagactccaccaaaacactcttagatttgaaaaattaaggaaagttgcagagtactaaatcaacatacaaaaatcaatagcattttatacaccagtctgaaaaatgtgcmaaagaaatcaagaggcaatcccatttaaaatagctacaaaaaaaaagcctaggaataattttaaccaaacaagaaccaacctctacaaacaaaactataaaacactggtggaagaaattgaacaagacacaaaaaataaaaaatatatttcatgcccatagatcagaagaattaatattgtcaaaatatccatactaccaaaagaaatctacattttcagtggaattatatcaaaatatcagtgacattcttcacagaaacagaagaaacaatcctaaatgttacatattaatagaaccacaaaagtccccaaatagccaaagcaatactgaggaaaagaacaggaaaaaggacacaacacatcatactacctggcttcaagacatattataaggctgtagtaaccaaaaaagcattgtatgagcgtaaaaatagacacatgaaccaataaagaacccagaaataaatccacacatttataaccaactggttttcgacaaaggtgggaagaacaggcactggggaaaggatggctcttcaataaatggtgctgggaaaacaggataatcatactcagaagaatgaaactagccacctatctctcaccatatacaaaaatcaaatcaagatcagctaaaacctaaatgtaagatccaaaattataaaactgcttgaagaaaacattggggaaatgcttcaggtcattggtctagacgaagattttatggctaagacttcaaaagcacaggcaagataaaaataggcaaatgggactatattaaactaaaaagcttctgcacatcaaaagaaataatcaacagagtaaagagcctgttaaatagtagaaaatatttaatatttaaattatttaaatatttaatatttaaaaatatttgcaaactgtttctctaataagggcctaaagttcagagaatacatggaactaaaacaactcaacaggagaaaataataataatcccatcaaaaagcgggcaaaggacatgaacagacatttctcaaaagaagacaaatgaccaataggtatatgaaaacatgctcaacatcactaattagcttgaaaactcaaaccaaaactacaataatatatcattttaccccagttagaatgactattattaaaaggaaaaaaaaaaaaacagatgctggcaaaggtatgttgaaaagggaactcttatacactgttgatgagaatgtaaactagtacagccattatggaaaacaatatggatatttctcaaaaaattaaaagtagtactaacgtatgatctagcaatctcactcctaagtatttatccaaagaaaaggaaatcagcatatcaaaaggatacctgcacccctatttttattgtagtattattcacaatagcaaagatgtgaaatcaacctaagtgttggataaatggataaataaaatgtggtgtgtgtgtgtgtatacacacacacacacacacactacacacaaaatgaaacacagccattaaaaaagaattaaatcctaacatttacagcaacttggatgagcctggaggatgttatgctaagtgaaataagttagacaaatatcactttctcctccatatgtgagagctaaaaactttgctctcatggaggtggaaagtagaatcatagttatctgaggcttggcatggtgtttgttggggattggggggataagagaggttggttaatgggagcaaacatacagttagaaagaacaattcaaatattcaatagttgagtaggatgactatagttaaaaacaatgtattgaatatttcaaaatagctagaagagaagacttcaaatattttcaacaaatagaaataatacttgactgacgtgacagataccctaaataacattacttaatcattacacattctatgtatgtacaaatagcaaaataatacatgtaccccataaaaaatgaattttaccatcaataaatttttttaaagtaactaaaatatagcaacagaaaaaatgtgaaatactaaaagtaggcctgctgataaaaaataaatcgttagatacatataatatccaaaatattatgattctctctaaaatcaggaaaatacctttgccttgaggtatctaggtctatgaagggtatctctaggctgagttttactataataaacacctgggaatgaagatcaaaaaggtcttcatcttctctgcagtatttcttgacttaacacaataggctggcattaaaaaataataataataatactggagtctgattgtgctcttttcaaaatcaaaatattaaaaccaacagctggcagggcacggcggctcacgcctgtaatcccagcactttgggaggccgaggcgggtggatcacgaggtcaataaatcgtgaccatcctggccaacatggtgaaaccccatctctactaaaaatacaaaaattagccrggcatggtggcrcgcgcctgcagtcccagctcttcggggggctaagactggagaatcgcttgaacccgagaagcggaggttgcagtgagccgagactgcaccactgcactcaagcttggcgacagagtgagactcagtctcaaaacaaacaatcacaaaaacaatagccgttctttgggatgcgaatattttacatatgcggatggatggacgcatagattaatacattttttcatgaaccatcgtagctaacatatattttctcatgaacaccacagctaacatatataaatttttttccaggggcaaaggaccactaaagcatacaactgatgtgatctatgcagcgaaaatgatatcagaatcaggatcaaggatggatgtccttgctcggcagattgctaatcaggtgagttacttacaagtggacatcataaaagttcatgctaattgctctttgccattagaacattgatttaggcaaagttaaatttttactctcttcaaccattttttctaaattataattgaatttctaatagctctattaatacactaggtaatggacgattataaggaagcttaattatttcttagggcagatatttttagcttaaaacatactcaaattatttctagtatcagctcttcagcatcaaatatactcaattaattttaatcaattgtaattacaaaaccgagttttgttgttgttgatacattatatttctttctttcttttttggttgtgtatttttaacatttattttcattatgttttatttttaattgacatataataattgcctttgtagagtacatatatttctatacatgtatacactgtgtattgatcaaattaggtaatgagcatatactattcctcaaacatctatcatttctttgttttgaacacattcaaaatcttctcatatagctatttttaaatacacaataaattattaactatagtcagcctatgttacagaagactacaatttattcctcctatataagtgtatttttgtacctttaaccaacttatttttatcttcccctctccgctactcttccctgcccctgataaccattattctattcattaattctgtgtcatcaacttttaaaactctcacatatgagaatatgtggtacttgtctttctgtacctgacttatttcacttaacataatgtcctccagtcttggtcatgttgccacaaatgacaggatttcatttttctttgtgcctgaatattccattgtgcttgtataccacattttgtttatccatccattcattggtggacagttagattgattctaactaactgattgacaggttgtgaacagtgctgcagtaagcataggagtgcagctatctctttgacatactgacttccttttctttaaataaatacccagtaatggattgctggatcatatggtagttctattattagtttattagtagtagtttttaaagaaaactcctattttccataatggctgtactaatttacattcctaccaacagggtatgagtccccttttctctacattcttgacagaatttattttttgttctttcaattatagcaattttaattggggtaagatgatatcttattgtgcttttgatttgcattttcctgtcaattaatgatgtggaacattttttcatatacctgttggccatttgtatgtcttcttttgagagatgactattcagatcatttgcccatttttaaatttsttttattcttctgttgatatgtcttatgtattctgtattttaatcccttgtcaaatagtatgaaaatatcttctatcattctgtaggttgtcttgtcactctgttaattgttttctttgctgtgcaaaacctttttagtttgatataatcccatgtgtttatttttgctttygttgcctgtgcttttgaggtgttagccatcaaatctttgccaaaatcaatgtcctgaagccccgtgttttcttctactagttttatagttttggattttatgctaggcctttattttgattggatttttccatatggtgaaaggtaggggcctagtttcatttttctgcaatagatatccaattttcccactactgtttattgactatccttttctcaatgtgtgttcttgacacttgttcaaaatcagttggctataaatatgtgaatttatttttgggttctccattctgttccagtggtctatgtggtttttttttttaatgccagtaccatgcagttttagttactatatctttgtaacatattttgaagccaggtcgtgtgatgtttccagctttgctgtttttctcaggattgctttggctattcagggtcttttgtggttctatgtaaattttaggattttttttttctatctatgtaaaaaatgtcattggtatttttctatgggttacactgaatctgtatattgctctgggcagtatggacattttaacaatattaattctttccatacatgaacagaggatatctttttttgtctcctcttcaatttcttttatcaatattttatagtttaatagtagggatttttcacctctttagttatattgatttctaggtgttttgttttttgtagctatgagaaataggattgcttgcctgatttcttttttagattgttcactatttgtgtgtaaaaatgctgttgatttttgcaggttgatttgatatccttcaactttattgaatttttttatcaaatctaagagtttttttttttggtagagcctttaggtttttcttttttttgtatatatatttttatttttcatttttgtgagcacatggtagtctatatatgtatggggtacaggaaatattttgatacaggcatacaatgtgtaataatcacaacagggtaaataaggtacaggattcacactcagagtcaactatccagagacaaaataaacaaaaagaaattttaattttcacttagtagtttaattagtaatagcaatgttttattacacttttgacattttcatgaatcaatcagtaaagacaaatgggataagaatatatttaatgagtacagaaatatagttagatagaataaataagatctagtatttgatagcaaaacagggcaactatagccaaaagtaatttattatatgtttaaaaataactaaaagttataactggattgtttgtaacacaaagaaaggtttttcttaatataagaccatgttatctataaactaggacaattagacttcctcctttccaatttggatactctatatttctttctcttagctaatggttctggctaggccattcagttctatgttgaataaaaatggtgacagtaggcagccttgtcttgtttcagatcttacaggaaagtctgtcaattgtttccttatttttgctcttcaaaaattaatacattttaaaatgttataatgttaggttttctgtgtcaacaatatattctaatataatatttaaaattcaaagaaaagtagtatttagtagaatactaaagataatactaaagatataaaatgcataaaatacataattaatatagagactggtgttcataaacattttagtttcctttttttagatttctcatgtttatttcagtatttctaagcagctgctgcatccttagaaatactttacactttaactgaaaaatctgttgctttcattaatgtgttgagatattcaattaatatttcagactgaggtrtaatattatttcatggcttttatattatgttcaacttcatagtacatatttatttccttttggaaaaaaatgaggatttttgcaactgtttcatattatttcttgcttaaatagtattagggaaaggtttttgggcttctttttataatgattactattgttcactatgtttatactctcttggaaaatgaagaactctctcctattaaatattgtatttgtggatataaggaataagaaacaaataaagactaattataataaactgtttaataacattcctaataataaagaacatatgtcttttccgtgttactttaattattataaaattttattaatccttttttttagtatttagtatttacagctaaaacaaactatatcctaaataagtcaaaatttctgagtttgattatgtgactgaagcctatatatgcccacagttttctttattttagaatcttattgcattcacttttatgagagacactaaatcttagtgaaataagtgaaacatagtacatgacacatatttacatgtattaataactttttaaatactgaatgcttcctcccatttttttctgtttattttgaaacacccagttttcaaagttgacataattgtgtcacattgaaggttttttttcttatattgataatcttctttaattggatcaggttgccttgaagtaggtacttctataacatggctttatcaaattatgtcattgtttttagcattattcaaatggtatgggagaaagcaaaagtatcatcttacttctgtatagctttgacattttaagagaagcttagagaagtagtcactgactaataaagaattatagatgactctttttggccttttccatttcatacataaaatagtttcagatgaattacttttgttctgaagaaatatagttctaagtaatcaaaactgagaatgaagaaactgactcagttattacagtgaccatctagggaggttgtctttgaatgtgcttctgacattattattggatagattaagacattttaggcagaaaataatatctgaaattgattatggaataaattgagtaatgtaagcaatgtgattttcagtgtctatgtatattatgaaaaaaatctgctggaacattggttgctttctcttttgatcaatttaatatttcaaaaataatacattctagctttagtttttgctggtgtgtcagaaggtcaaacagtaatatccattccaactaacattagatttgaaattatatayatatttaaattatttaaatgcatgtttatatatatatcatctattacatatattattagaccaatttagttacattctgtaaagtttcagagttaaagttcacatgtagaaagaatgaaacaattagattagttgatgcttctcattctgcttgcttggccttttcatttttatttttcacttttccttccttcattgcttccttgagagaatatttattgtgtgtatgccacacacaattcactactctggcattggcattagctagttagaaagagaagaactaaaaccttctgtttaattttcccagtcattcaacattttttagacttcagaattgtctcaaaatggcggtctcaaaaaaggcttaagtatgccatcaaagatatatttaagtcttgtagaattttagcacaaattttgtctcctttagacagtatccttgtataaaacaagattgttatagctattcttacctataacaattcttaaaaattttgcttgtgaattaaacagaataagttggagaagtaaaatatgaatccaagatttcaggctttcagtacatatttttttctatttctgtactctacattgtaattaatcatattagcagatattctaaattagataaagtaacatctcataaggtaaggataatgcacaaaaagatttcaaatagttatagaagcagtataacctagataggaaggagacaataggagccaaaataaaattagcatctgctaaaagtgttttgcaccaggagagaacagtgttagactttctgatccctcggtgatctttaagcagcctaattacttcctccttgtaattttgccaaagcaaagatattaaggctaataactggacattcccacctaattgtaactgaacaaaattaaaacgaacttttagtgttaaatacattggcagctaattctaattcaagaaaagatgatgtttaaaaaccaaagtaaagaaatataaaccaaatcacacaaaatgcactccattatgaacaaaacaacctacaagtataatttgtattaatattttacaaaatattcttggaggctggcctcatttgaattgtttcatgttgatattataagaggcaaaaaaattatttcaatgaaactatactactgagaagcttctggagccttcattatatcatgattacacaactcctaaggatataattcctagatacaccttgtgacaatatgcgtattttaaaggtattacctatctgaaatttatttccagcagaaattttttaattttttttttcaagaggtttttggggagcagatggtgtttggttacatgaatatatatatatacacacacacacacacatatatatatacatacacacacacatatataccacatttatatatatatatgtatatataacattttctttatcattcattgattgatgggcatttgggctgattccatatttatgcaattgcaaattgtgctgctataaacgtgtgtgcaagtatctttttcgtataatgcctttttttcctctgggtaratatctagtagtggggttactagatcagatgatagttctactttcagttctttaaggaatctccacactattttccatactggttgtactagtttacattcccaataacagtgtaaargtgttcccttttcactgtatccakgccaacacctttttttgttgttttgttttttctgatcatggccattcttacmagagtaaggtggtatctcgttgtggttttgatttgcawttccccgataattagtgagttgaacatttttttcatatgcttgttggccatttgtatatctttttttttttgagaatcgtctattcatgtccttagcccactttttgatgggattttttttcttgctgatttgtttgagttatttggagattctgaatatgagtcttttgtcagatgtgtagattgtgatgatctttctcccattctgtgggttttctattaactctgctgattatttctttttctgtgcagaagctttccattttaattaagtaccatctatttatccttgtttttgttgcatttgctgttgggttcttggtcacagagtctttgccgaaaccagtgtctagaagggtttttcagatattatcttctagaatttttatggttttaggtcttagatttaattctttcattcaccttgagttgatttttttatagggtgagagatgagaacccagtttcattcttctacatctggctagccaattatcccagcaccatttgtcatatagggtgtcctttcttcacttaatgtttttgtttactttgcaaagatcatttcgctgtaagcatttggctttatttctgggttctctattctgttccattggtctgtgtgcctatttttataccagtactatgctgttttggtgactatggccttataatatagtttgaagtcaagtaatgtgatgcctccagatttcttctttttgcttagtattgatttggctatacgggctcttttttggttctatatgaatcttaggattgttttttctaactctgtaaacaatgatggtggcattttgatgggaattgcattgaattcgtggaatgcttttggaagtctggtcatttttacaatattgattctactcatccatgaacatgggagtgtttccatttgtttctgtcgcctgttatttctttcagcagtgttttgtggttttccttgtagaagtctttcacctccttggttaggtatattcctaagtattttatttttctttttgcagattttgtaaaaaaacggttgagttcttgatttaattctcagcttggtcactgttggtatatagcagagccactgatttgaatgcattaatgttttatcctgaaactttgctgaattaatttaccagttctaggagattcttggatgagtctttagggttttctggatatatgatcatatcatcagcaaacagcaacagtttgacttcctctttaccgatttggatgcccttgatttctttctcttgtctgattgcaatggctaggacttccagagtcctgttgaatacaaacggtgaaagtggtcatccttgtcttgtcccagttatcaggtgaaatgctttcaacttttccccgttcagtataatattggctgtgggtttgtcatagatggcttttattaccttaaggtatgtcatttctatgctgattttgctgagggctttaatcataaagggatgctggattttgtcaaatgctttttctgtgtctattgagatgatcatgtaatatttttaaaatttttttatgtggtgtgtcacatttattgacttgcagatgttgaataatcccttcatccctggtatgaaccccacgtgattatggcagtttatttttttttacatatgctgttgaatttagttagctagaattttgttggggatttttgcatctattttcattagggatatktgtctatagtttkcttttcttttttttttttgttatgtccttccctggttttgttactagagttatactggcttcataaaatgatttaaggaggatttcctctttctctatcctgtggaataatgtcaatcggattggtatcaattcctctttgaatatctgatagaattcagctgtgaatttgtctggtcctggacttttttgttgttgttgttggcaatttttaaattaccgtttcaatctcgctgcatattattgacctgttcagagtttctatgtcttcctggtttaatctaagagggttatatatttccaggaatttattcatctcctctaggttttctagtttatgtatgtaaaggtgttcatagtagccttgaataatcttttgtatttctgtggtatcagtagtaatatctcccatttcgttctaatttaatttatctggaccttctgtcttcttttcttcgttaatctcactaatgatctatcgattttatttattttttcaaagaaccagctttatatttcatttattttttgtattttgtgtgttggttggtttcaatttcattttattctgctcagatctttgttatttattttcttctctggcagaaatgttgatgcctagattagttctccagattaatgaactcctactttataaaaataaatgcacagaaagttctcaagatttaaataggactaaatgtatactgaaatatttgatctatttgcgtctttcaagtaatagtgaatctcctgttctaagagatgctgctttactcttttcccctttatgtaatgtctgacattttttcactgaaacagtgttttaaatgctcctagggtgattatctattcaggttcacttcatgtatagttacaaaactatgtaaccaaaaaataaagtgttttagggtctaggtggaaggagctatcttgtataagtggagaagaggaaggatgagcaaagtttcttcttgtagttggctggctatctttaatcaaaaattccaaataaccagaatttgtctgagttacctttccaccatcttttccacatccttattttatgtacaggataatgcacttgtatgagtttgtttcagtcgaagtaattctttgaatgacaaatttcaggcatgagggagagggtgacacttttgagttatggtctattacataggacactcatttcttctgagaatctctcatggaagtaacataaagctgaaaagtagcttgagtcataactttacatctactaaagtaaaggagctttgttgaataaggaaaacatcttgtctttaatttgtattgtgttcaaagtacatgtcactttctcaatagctgtatgtgcaaaccaagttgaaaataaaaaggaatttgaaacaattcttaaactcaagacaatttcagcctaaatatggacaaaatatgacaggattttaacagcatatataacttctggtaaaaacaacctttattcattgagatatgccatgcaccatactttcccaattataactctcataaatcaacatgtccagtcttgaacataccatatgagacaatgttatcctctaccactgacattataacagagttccagtgtatttttaatcatacttctataggtaccttctctgttctgtgtttcagaaacctgaatttgctaaacagcagctgtcataggcatagcaaagaaaaaaatacttaaaatatattgaggtttytaggtgtagaataagcacmaactaatggctgaccagatttaagagatggaaaagaggaacaaggcattcttcattgagatagttaatacaaagagaaaaaatagttgaataggtgagtaggcaagatagtgaaatagctgagagataaatgtgttaagtgtgaaatgttgatgagatgctgaaatggcatggactaacacagtagttacatggatcgcctgatgacagagctggatgttagaawtttgtagtttgtgttgtgtaagtgacagatgaagccagagcactgtctactgttgtccaagaagagaatgaaagtwaaaaaaaaaaaattgctyaggaacaaaagctgagaacaacaacacgtgcaaggaaaaaaaaaaatgcttacaatacagtctgggaaggctggtgtaaaactaggagaaaatctaagaggaaacattcatgagaattaatatttatgaaaatcaataaagatctaaaagctccagagaggtgatataagggaggaactgcaacatatataatgaatgcggcaattataagtccattagtgatctcagtaagataaaattctgcggactggaggagttgaaaacagttcttagaatgataaggaaaggaggaatctgcattgaaacattttagtaggcatattcataaacaaaaaaggagacatgggattatagaagtcagggttttgctttgagggacttgatagagtcaggaatcagaaaaaaaaaggcattaaaagtagaggaaaagatgagatcattgatgatctgtgatcctgagcaagatgaaacaaggcattacaggtgaagaaatgagccctgtgggatgggaaaagtcatgaacaccaagtgcttttgctaccactgatcgctttaaattcctatttttgaaattcacagtgacacctagtacttttcattaacaaacttttccagcttagcaaaatgtaggctattgtctgtaattgcaaaattcgttttatttatttatttatttatttattatttttttaatttttgagacggagtctctctgtcacccaggctggagtgtagtggcacgatgtcagctcactgcacctccgcctcccaggttcaagcgattctcgtgtctcagccacccaagtagctgggactataggtacgagtcaccatgcccggctaatatttcatattttgagtagagatgaggtttcaccatgttgaccaggctggtctcgaactcctgacctcaggtcatctgcctgcctcagcctcccaaaatgctgggattataggygtgagccaccgcacctggctgcaaaagtcattttaaatttcttaaagwttaggctccaatatgagcaaaaaaatactaagattatggaataaaagtcttgaaaagtgttcgttttgctaattcacccctgaaatttaaactaaaacrtaatgaattttttttacatttttcctcattactaaatgatgtattccatattggctccaagcgtcttggtagaaacgtgaaaactggcttaaagtgagaaaaccacataggctgaaatgccatctgcttacatgttgtgagtccctgtgattataaaacttagatttaaaaaaaaatcatgcattaaggaactaagtagatgttctggaaaagtccctaatagtattcttttaaaagttattttaaagcaaatgttacttgagaaacaacagtaaagggcaagaatgttctaccaacctagagaccgaagtttttctgtcactttcacgtaaaratttaaaaggtgggaaaagcattgttygatgtttttaaatttaattttttttgtaaaaattgtacatatttaaggacttaagatatacaatgtaataatcaacaaaattaaaagacaacctatggtttgaaagaaaatatttgcaaaccatagatctgataaggaattaatatctagagtgtataagaaacatgcagaactcaatagaaaaaaaatccaagtaacctgattaaaaaatgggaaaagacctgaatacataaaagtggcccaaaggagatttgaaaaatagtagaatattcttaaagtaggaatgaggcattctcctgattctgcttctaagtgagcaaaactgactcagaaaggctttctgcatgtcaatgggaaagaaggctttaataacttttataagtataagaatttaccacatagtattttgttttactttggttataaaactgactgcttctgttataaccaagatattcccatcagttctgaaaatgaaaggtaaatttaggtcaagcaactttgaatttcaaaagatcattttcacactttctactcatttgactcattctttccttaatggaattataggcttttctactgtggccttggaagagtctcttgatagagacagcatrttttgcttaaacttgagtgattgcaattggttattggtcaagaatctgattactagtttgacagtttgattttatcagagttgtatagtggtgctggtcttcaaggaacaaatccacattaatcgagtttataattgacaaataagattatcaataagaaaccaacttacaaatcagaatgacaatttaatatttacaaaaaagataaaattggcaagaagactgatactgttcctagaacatggaggtaaggaggtgtagccagattatgtttgaacaygagctctaccactaataccatttattggcaagtgagttaacctctctgtttgtcaatattctccttcactaaatgaggataatgattccacttacctcatgaaactgtgggtgttgtgtgattattaaaacaattagtagagacaaaacatctagaattatagatgacagataaaacactttacatgtcaggkattatcattgtgtccatacttaagaatgaagaatagataagaaagttactcagtgaaagcaataataacaaaaaatgatttgaaagaatgccctrtagaagagattattgtgtatgcatgtgaatgaaacagagaaaactaaattcaaatcatttactctctctgaaacttactttgcaaatctacaaaatgaaaataatagatctaattaaaatggtgctttgagtactaaagttatgcatgtaaaggccttggcatagtacctggcacagacgaagtacctaataaagatcagctgcctgtcaagagaaaacaaagagatgacttgtttttcatcgttttaggtaatttcacatctgtaaattggggaaaatatttgcgtcttacagttttaatgattgagtgagaagatatgcctaaattagtttccatagcatgtggcacatagtaagagctaaatgaaaattaactattgttcttcctcctctgtctctgccttctcctcttcttcctttccctctttctttttcttttctttctccatatctttctcctttccaatcttcttcttaattagctacaatataatccttttgaggagatttgagggataaccctcatttgcttactgaaaacttgagaaacacccttaatttctatattcttgtctgattgtgtctctgtctggctatcctgtatctattcatgcatatgtccatgcctatctkgcagattgatagtatttctgcagaagagttgaattctttgctacctttgttgattattatcgactttgactcagggtaatgtgttctcatcttgtgcacacactctggagctacacagcctatttaaaaaatataagacgataagtacctcacaaattttccaaaaacactccagcttaagttattaattactgaataaaagcagaaatgcatgaaaggttttctggttgttcatcctactttttaatttgcagtttaggtcattagaataaaagctttaaaaaataacattttatagttatagaagaaatatatatttaagatatacaaaatttgaataaaataaaagtattgattatatcacatttattgatgattgtcatatatttctttcccagcatcttttaattttttttaacccagagtccagaatgtatttatctttaatgcatctaaaaaataatttcaacttttatttagattcagtgggtatattgcatgatactgaggtttgaagtacaattgatgcaatcacccaggtagtgagcatagtacccaataattagtttctcaagcctttactcccttcctccctcccctgtctagtaatcctcagtttctattgtggccatctttatgtccatcattacccattctttasctcctacttgtatgtaagaacatatggtatttgrgtttttgttcctgcattaattcacttgggataatggcctccagctgcatccacattgctgcaagagacataatttcattcattcctttttatggctgttattccatggtgtatatgtaccccattttatttattcaatccaccattggtggatacctaggttgattccgtgtccttgctttgtgaatagtgctgcaatgaacatatgaatgcaagtgtctttttgggtagaacaatttattttcttttgaatatgtacatagtaacgggatgagtgagtcaaatgttagttatgttttaagttctttgagaaatctccaaactgcyttctacagtggctgaactaatttacatccccaccaatagtttataaagtgttcccttttctccacagcctcaccagcatctgttgtatttgactttttaataatagccattctgactggtgtgagatagtatcttattttggtttgatttgcatttctatgattattcatgatgttgagcattttttcacattggttggccacttgtatgtcttcttttgagaagtgtccattcatgttttgatgtggttttggcatttgtccttcccaaatctcatgttgaaatgcaatccccaatgttggaggtggggcctggtgggaggtgtttgggtaataggggcagattcctcatgatgagctgtcctcaggatagtgcattatcagaagatctggtcattkaaaagtgtgtggcacctcccacttccctcttgctcctgttctccccacgtcgtgcacctgttcccacttcatctcctactgtgagtaaatattccctgagcccccaccccaaagccaagtggatgccaacgcaatgcttgtatatcctgcagaaccacgagccaattaaacttcttttctttataaattacccagtctgaagtatttttttgtagcaattcaagaatgacctaactcgtaccatttacccatttttaatgggattgctttttgcttgctcarttgtttaagttccttatagatcctggatagtaaaactatgttagattcatagtttgcaaatattttcttccattgtgtgggttgtctatgtactctgttgatagtttgttgctatgcagaagctctttaattagagattccacttgtcaatttttgtttctgttgcaattgcttttgagaatttagttataatgtctttcccaagactgatgtccagaatgatgttgcctaggtttttcttcaaggattcttattgtggaggtcttatatttaaatctttaattcatgttgagttaatttttctagatgatgaaaaataggggtccagtttaattcttctgcctttggctagccagctgtcacagcaccagatactgaatagggagtcactgcttatttttgtcaactttgtcaaagatcagatggttttagttgtgcagctttatttctgtgttctctattctgtcccatcagcctgtgtatctgtttttgtgccagtatcatgctgtgtgtgttactgtagccttatagtgtagtttgaagtcaagtaatatgatgcctctggcttctttttttttttttttyycccccttaggattgcttgtctattcaagatatttcttggtttcatatgaattttaraatagttctttttctagttctgtgaaaaatgacgttggttgcttgataggaatagcattgaatctgtagattgctttgagcagcatggccattttaacgatattcattcttccagttgatgaaattgaaatgatttttccatttgtttgtgtcatctatgatttctttcagcagtgttgtatagttctccttgtagagatctttcacttccttggttagatgcatgcctaggtgttttatttatttatttatttgcagctattgtaaatggagttgagttcttgatttggttctcagcttgaatgttattggtgtataraaatgctattgatttttatacaatgattttgtatcctaaaaaattactgaagtcgtgtctcagttccaggagccttttagtaaagtattttatgttttctgggtataaaatcatatcaacagcaaagaaatatatgttgactttttatttgtctagatggataccttttacttatttattttgcctgattgctgtggctgggactttcagtactatgttgaataagagaggtgagagtgggcatccttgtaacagttttcaaggagattggtttcagctttagcccattcaagtagagattggtttcagcttttgtccattcaagtataatgttggctgtggtttctcttagatggctcttattattttcagatatgttcctttgatgcatagtttcttgaaggtttttatcatgaagggatgttgtattttatcaaaagcttttcccacatctgttgaaataatcatatgatttttgttattaattctgtttatatggtgagtcatatttattgatttgtctatattaaaccaaccttacattccaagaattaagtctacttgatcatagtgaattaactttttgatgtgccactaaattcagtttgccaatattttgttgaggatttttgcatctatgtttatcagagatattggtatcagagatttttttcattgtatctttaccaggttttcctatcaggatgatgctggttttgttgaatgagctaaagaggagtctctccttctccattttttggaatagtttcagtaggattggtatcagctcttctatgtatgtttggtagaatttggctggggctctttttgttgttgttggtggtgggtgttttattactgattcaatttaggaactcgattttggtctgttcagggtttcagtttctttctaattcattcttggaggattgtgtgtttcagaaatttatcttttcctctagattttctagtttgtatgcacagatgtgttcccaatagtttctgaggctcttttgtatttctatgatattggttgcaatgtcacttttataacttctgactgtgcttatttgaatcctctctctttttttctttgttaatctagctagcagtctaccgatcctgtttattttttcaaaaaaaaaaaaaacacaactttggtcttcattgattcttcctatgaatttttaggtctcaaattctttcagttccatctaattttaattttttcttttcctctgctaacttttgggttggtttattcttgtttttcttgctcctctaggcatgatgtgaaatcattaatttgagatctttctaactttttgaggtaggagtttactgctataaactttcctcttaacagcacttttgctacatcctagagatttttatatgttgtgtctattatttttatttatttcaaagaattttttggttactgccttaatttcattgtttacccaaaagtaaatttattagtccattttcacattgctatgargatactgagactagctaatttattaaaaaaaaaaaragagaggtttaattgactaacatttcacatgtctaacacttttagtgagttgttgaagttcctcaacattatcgtgtggctatctaagcctttttgtagatctagaagtacttgttttatgaattcagatgcttcagtgttgggtacatacatatttaggatagttaagactttttgttgaattcaaccctttatcatcatgtaatacccttctttgtcctttattactgttgttggtttaaagtcttttttatctattatatattatattttaatatattttaaaatacatatattttacctaatatgttatatatattatattttaaatatattttaaagtacatatattttatctaatatartagccgctcctcttttttgttgtagtttaatctgcaagatagatatttcttcaaccctttactttgagcttattgatgccattatgtgtgagatgggtatcttgaaaacagcagatgaatggatgttgttattctatccaacttgccactctgtgccttttaagtggggggtttaggctattcacattcaaggataatattaatatgcaagattttgatcctatcatgaagttgtaagctggttgctttatattttctatggtttgattgcgctatagatctgtgggctctgtacttgtgtttttgtggtagcaggtatcagctctatattttccccatgtttagaattctcttaaaggtctctgacacaactggcctaatggtaattaatttttttagtgcttgtttgtctggaaaatatttttatttctctttcagtgataaagcttagcctggtgggatatgaactttttgttgaaatttctttgcttcaagaattctgaaaataggcctccaatctgtctcggcttataaataaggtttatgtagagaagtctgcttttaaccttttgggatttcctttgtgtgtcttctgacctttttctctagctgcctttgagattttttctttagtattgaccttggatagtctggtgattatatgccttggtgacgttcctttttgtatagtatctctcaagtgttctctggatttcttrtatctagatgtctacctctctagcaaaatttgaaacattttcttgatttatcacttcaagtattttttctaggttgttatctttttctyagtctcaggaatgtcactaatttttaggtttggccactttacataatcccatatctctcaaagactttgtttattttataaaaattactttttctttatttttttccgactgggtcaattcaaaagactggtcttcaagatctgaaattctttcctctacttagtccagtttattggtgaagcttccagttgtgttttgaaattaaattagttttttaattccagaatctctgattgatattttaaagatgtttatctcttccttcattctctggattgctttaaaaagtttctttgtgttaattttcaacctcatcttggatcttattgagcttccttgcaatccacacttcaaattctttatctgtcatttccaagtttccactttgctggggaccatagctggagaactagtatggtatgttgatggtatcactacatttwgaattttcatggtgctagaattcttacactggttctttctcatcttgaagcattgatacttcaaatttttgtaattatatttgtgcagatataatttttcttttctttccctataatactattgatttttttttctttccctttccctttcccatctatttttccctagggagtgtgactttagagaatgctgggtaaggtcttttggcttaacttgtgtactcctacacctttctgtcagcaggtttcatattgggcggttcagttccacctacaagcctgtagatggtgtgtatgaccaataccgatgggtgtatacttcatccttgtttactagcagaagctctttcttgcctcaggcaatgggcttattcttgtagtgcaaaatgctctgagctccctcctcagccctagaggtgttgggagcaagatgggcaggtccagactggcaggtttgcctataattccctaagggcaggcatgagcaccggtgctgaagcataatccagtgagtgggtaccaaacaccaagaggtgtgcctagatatggagctgggaagctttcttgtcctcaaattctctacacacagatttggggtggcctaaactcctaatccaggggactgggtactccagatgctgggtgatctgcctaggcatgaagcagagaggctcctctacatacctggatccctgcagagaaagtgtggggtggctcaggctgtcaatctgagcaaacatgtactttgaatacctggaaatctgcccaagcgtggagtggagagggcctgctacaccacaatctatgcacagaaagggtagggaagctcagcctgatgatttaggcaagctggtactctgagtgcctggagatctgcctgggtatggagcaaagagagtcctgatgcaccatgatctatgcctaggaaggatggacagctcaggctgtctcagcaggttttattattttattttttatttttatttatttattttttgacacaaggtcccactctgttgaccaggctggartgcagtgttgcaatcatggctcactgcagcattaacttctcgggctcaggcaatcctcccacctcagcctcctgaatagctgggaccacacctggctaatttatttttattttttgtagagatrgtgtctccctatgttccccaggctggtctcaaattcctaggctcaaaggattttcctgtttcagcttcccaaattgctgggattataggcatgagccactgcgtctggcattcagcatgttttaaatacacacaatttttaatagaatttgattgcaatatttacatattgatttttttaacttccaaaaacatttttccacatcctttgaaactctattttcttgatactgagtaatgctacattatattgatattcattcttatttagtctttccattattttgggacatttaggttatttccaaattttrttattatacataatgctacaatgaagatctttgcatataaatcactgtccacatttccttgttcttataaaaatttactaaaagtggaattaaattagaaggaatttttataaatttattataattgcataggagaaagaacacaaagattaaatcttaaccaaagctatttaccatggtatgataaagctcaaagctgtcctccaggaagttccttcgaaaagataaaatgatgtaggaggctggttttcataaggaaatttaatattctaaaacatgtgtcctgtctgtttcttggcttcagttgkattcacagctgttatctaaggtagaaataatttcctttgtctgtaacagctaagtacattgaatgctgaaagtagtagaacatattatgttgctccatgttgtttatgcccatttgagtagcacaggacagrcagtgtagagaccatgagtctcaagcagcattctaatagtaattctaggagccttctaatagtaattctaggtgaaagaaataattacattttaaatatttctatagatttaccaaaaatataatctgaaggcttctaacctttgtcataaattaaaggcagctattttatatacctttttatgtctaaaaattattttaacgtttcttggccaggtgtggtggctcacgcctgtaatcccagcactgtgggatgccaaggcaggcagatcatgaggtcaggagatcaagaccatcctagataacacggtgaaaccctgtctctactaaaaatacaaaaaattagccaggtgtggtggcgcatgcctgtagtcacagctacccgggaggctgagacaggagaatcacttgaacccgggaggcagaggttgcagtgagccaagatcttgccactgcactccagcctgggcaacagagcgagactccatctcaaaaaaataattattttaacgttccttttggctaagctgaagtaactaaggttgcaaaatgaatgaactattgtaaatggtagaagcatatcagaagctacttggtcctgtatgaaaataaaattgctgctttataaggtacctgccatgtgaatactgtatttactcaccttgatctaactattatttattctgctgtatctatttttatctttgatkcatatttagtgcccagatccatcttgtaaacaggacttgttggcctacctggaacagattaagttctactcccaccaactgaaaatctgcagtcaagttaaagctgagatccagaacctgggaggagagctcatcatgtcagctgtgagtactgcctakcacttacatgatcacaggtggaagatgcttgaaacagagtaactacacccttgtttacatgaccaaatcttttargtaaaattagtttagaaaaactaaattggagtttttattaaaagtacatgtatttaaactagcaagaaatcttaaactagcagatttcttaaagaaaggttaaaaatgttgttytwatttacttcagagattaaagagtaaatcaagttttataagccaattggataagaaatgcatgttaatttagagcatgacttcagaatgtgtacagatggaactccggaatgaatcctataatttttctaaaataaatgcatgtggaattgcaaattaataaaatgattgcttcgctgctattaattgatattcattttccccctatttctttttataacatagatgttcatgtcttgagatttttcatttccatatatattttcagaawtggagtatgataaaacttaatagatttagaggaattttcataaattctttggtggccctgagttttaagctgctataaattaccatggtagaactaatgtataccttttctactcatcttttaatagcagtagatcatttctctggagaagaaatggtaataaaataatatttgatatctatattggattcagttatcagtgactttgagaaggacatggactaagattataaatttaagtttaaatgaaacaatataaatattctgggaatttatatttctgagaaaattttttttaattacactagtatatttatatgtctgtaacatatagggcctctctatcctggcattcgacagtccctcaatgagttaatgttctgaaagaggatgtaattacaaaaacacaaacaaaggatcaccatcaaaagtagtgggcaggagccagttgcggtgtttcagacctataatcccagcgctttggtgtccagatcacttgaggtcaggagttcaagaccaacctggccaacatggtgaaaccctgtctctactaaaaatacaaaaattagctgggtgtggtggcgcatgcctgtaatctcagctactcagtagtctgaggcacaagaattacttgaacccaggaggtggaagtttcagttagccgagatcgtgccactgcactccagcctgggcgacaatgcaagactccatctcaaaaaaaaaaaaaaaaaaaaaaaaaaaaagtagaggggaggaaacaaatagtgactgtctatgtcttgcctatattttatgttaatcttcacaataacatgccagatggatcacttatttatttgttctgttttcttatatagctttcccaatgtcatactagtaaatgtcagagttgagtttaccttcaaaggtctatgattcctctgttcagagagacaacactgaatttgtgatgaaagtgaaaaacacaagtcgaaagtgaataatttggaaattataagatggtattgcattctagctttttattccagtggttgttagagggggaaaaatagtgtctttgatattcaaattttatcaaaaatcccacataaacacagtgagtgcattactagtgccctgtcacttttcaragaaaaatgcattttgtttagtcacaagccatgcaaataggaacatgcgtgtgtatagacacatatgcatacatgtatgtatatatacatttatatagatacacacagcatgtatgtgtgtatagatgcatatgtattaatatgtatacatatttttaactactgtatattccttttggcttattaaacatccagtcttcattttctcatttaacattatactgccttaaatatgtaaaaaagtatgtttatttggaggataaactcttccatttacttttgtcattttcacacactaatcgtgctttgtaaggtctaaatttcatataaattttatttttcaaatatacagtttcatgttgtatgacgctaagctttcaaaaaatctgtggtagaagttcagcctctgcatagctgttaaaatatattggtgttaattatccttccaaaatacaatttcctttctatatatagaaattcattcctgtttggtataatgattcaaattcatgaactttacatatattacagataaattaggcaggagctatttagaatccatgatttacaatttaaaagctgagtcattatataaaatgaggaagagcattgcaaatccaaaactatctgtcatcatctcactcactattccccattagaaaaaaaataaatctgaaaaaggagagcatgcccccttttgcatatcttactgccatctgtttgcaggtagatcctagaaagctttctaaatacattacatttacgtgtgccaaagcacacttactttaatctctcagtgaccctgagttcttgtcttgttcctattctttaaattcagaagatctaatctatcatttttctataagatctcttgaaaaatggcaagcatgattccaaagcagagagacactaaaaattacagaaatttggtattcaaaactacagactattcaaagtttactaaataaagctggcatcccaagattaggttcatgaaacattgccttaccaaatatagtgggttaaaaataagtaggtgtgaacggaatgcatttctaaagtgaatgggcagtatgttctgttctgggtctgaggtgtgaaggtttaggataaagaagatgaattaataaaataaaataacctgagagatattcttataatacaccatttaattaaaattattccacaatcattcttacatctatattgcaagcactcatcttgaagttgcatgttttacctgtatagagacaaaatatatgtagttcattcaaatccattactatgaattgagcccctcactgtgcaaggcatagtagtacatctgagggatgtaaagatgattatatgataatttccttaagatattgaaatgcataaaaaattaagaaacataaaatgtacctgaatatacaaaaaagattccagaacactgtaataaaccatacaacattggcatgtaaaaatgtacatgtatagcaagtgaggaaataatttatttgatgtgcagagcaggcaagagaaagcttcataagtggcgcaaacctgttttgggccttggttaataagtagaaaacaaatgtgtacttgtaggaggaggagagggaaaggatttgagatagaggggacaactgaaataaaacagagatagggaagacatggaatgttatggacatggtgggcagtctgatttgactgaaatcaactttccttggtacttttggtgtgtgttttgtggaataagggtgggtgggcaagtagagcaaaagcttgtaaaggaaactgggaatgttttgaaaggatcatttataatttaattttaccctgtaggcaattgagagtaatgaacaatttcttagtttgagatggcaatagtaaatctatgtatttcaaagttaacattttttagacacagcagtgatagattagaaagataagggactaaaggattgagacctatttaggaatgacttttaaaaattagtctaagatgtttattgcagcactagtcacaatagcaaagacttggaaccaacccaaatgtccatcaatgatagactggattaagaaaatgtggcacatatacaccatggaatactatgcagccacataaaaggatgagttaatgtcctttgctgggacatggatgaagctggaaaccatcattctcagcaaactaacacaagaacagaaaaccgaacaccacatgttctcactcgtaagtgggagttgaacaatgagaacacatggacacagggaggggaacatcactcactggggcctgtcggggggtggggggctaggggagggatcacattaggaggaatacctaatgtaggtgatgggttgatgggtgcagcaaaccaccagggcacgtgtatatctatgtaacaaaactgcatgttctgcacatgtaacccagaacttaaagtataataaaaaaaaaattagtctaagagagaaacagtgagaacttacttagggcaatattgatgagaatggaaaggagtgtatctatacaaggaacaattctgaggaaaatatgtttagaagcaattatccattgggtgttaagggtgaaaaagragaaagaattaagaatttcctaaaggttttgaggttaaatagtttacttagtcaacaatggcatcgttaactaaacagtgtatatagaaggaagaccatgttacggtgagtatggaaactcattcaggttttgcttgttgaatttaagtgaccaaggggcatccaaggagaaaggtttaggagaagttgggtctttggttctggaacttaggaaagaggtatgaaagagaagtatatgggaccatccagtgaaaatatgttggatgccatttttttaaaaatagctgagacagtgatccagaaacaacttttttcacaaagtgattccaatgtacctttatagattctgagacttgactgtggcagttaaaacaaactgggagtttaccatctccataaagtgagtctgcgaatgggcggtctagaactgttacgacagcttcacaaagtcaccagggaatcaggcacttttgtctttcagcttcacttttcttggcttccggctctcgttattatcaaggtcaaaaatatggcttatacggctctaacaatgacttgtatattccaggcagtaagaataaagagaaactgaagcaaacattccttacactttgaaagggaccttccagaaggtccctttcaaatactaattttttttttttacaaactattcgctagagcttagtcatactgttatawttcactgcaaggtatgctacaaaatataaattttgtatgtttgtttgtgtgttaatcctgcacattgctttccccagtgtaatcagagttctgtttctatgaaaaagagaatggatattgggtggcagctaacagtttctatcatattccctctatgattaccaaaatcacagcagtacacatatcatagtcatatttttgcacatattcccctctagactataaagtccttgaatatttttacatgatttatggtgcagtggccaacgactataaaggatgcaaccggcaaaattatgcaggttggcttagycttaaaagtacacattgggttttgcatttagaaggtgtttttatatctttttaaaagcagtatcagtattatggtgaaggcaaaaattgtatcatgatcagttgagtactgagtatgcaatgacagataaaatatggtggcacagrctcaattttccaaaagtttgaagttgaaaggaataaaagagagagaaagaaagaragagatacttgagggtcagagcagacagartcaccaaaagcatttttgtttgttaacatttttatttatatactgcctaaagtggcagtaattgagaaatgtttaggtaaagaaaaaaaagcgaccagaagagaatgaacctgtgaaaaattaagactacaactgatggaataaagtcaagcaaatgagagaatgtgatgttagaacgggtagaaagattaggtttggaaaaaaagaaaaaagagctcttcttctcagccaggatgaagttgaattaagatataatcacatttattaaataaagaaaatgtggtacatatacaccatggcatactatgcagtcatataaaagaatttaattatgtccttcacatccacatgaatgcagctggagaccattatcctaagcaaattaatgctaaaacagaaaatcaaataccacatgtcctcacttacaagtgggaggtgaacattaattacacagggacataaagatgggaacagtagatactggagtctctaaaaggtaagagggagaggggtaagagctgaaaaaattcctgttgggtactatgttcactatttgagagatgaaattaatagaagcccagacctcagcatcatgctatatacccttgtaacaaaactgcacatgtaccccctgaatctttttttttgttgttgagacggagtctcgctctgtcacccaggctggagtgcagtggcgtgatctcggctcactgcaagctccgcctcctgggttcatgccattctcctgcctcagcctaccgagtaggtgggactacaggtgccccccacggcgcctggctaattttttgtattttttagtagagacggggtttcaccgtggtctcgacctcctgaccttgtgatccacccacctcggcctcccaaagtgctgggattacaggtgtgagccgctgcacccagccgtaccccctgaatcttaaaaataaataaaaaattgatttagtctaacttaaaaaaagatagaatcacatttatagaaatgaatgaaaggttgaagaatttcttgctgataaatcccatgtttggtaaaatggaaagagtagttttctgttaaaattaagatatgagcactctattcaagtttcattttagcaatagaacaaaataaggatgtccacatctcaatcacttttctcaacaytgcttagaagagaaaataasctaagttcacagcaagtttttgagatcatgaacagagatagcatatgatagacattttttaccagagccaagctccaggacattgtctggatcttggaacctgatgcagcttcagttcacatggaaatgaagccagtttggccttccacctgctatcctttatcaaataaagaggggagttgccaggtacggtggctcagggctgtaatcccagcacttggggaggctgaggcaggtggattgcttgagcttatgagttcaagaccaaccatgggcaacatggcaaatcccatttctacaaatattagccaggtgtggtggtgtatgcctgtagtcccagctactcgggaagctgaggtgagaggatgacctgaacccaggaggtggaggttgcagtgagctgagatcatgccactgcattccaccctgggtgatagagccagaccttgtctcaaaacactaaaaaagggaggaggttccaagatggccaaatagaaacagctccagtccacagctcccagcatgagcgatacagaagatgggtgatttctgcatttccaactgaggtactgggttcatctcactggggcttgttggacagtgggtacagcccatggagtgttagctgaagcagggaggggcattgcctcacccaggaagcacaaggggtcggggaattccctttcctagccaagggaagatgtgacagatggtaactggaaaattgggacactcccaccctaatactgtgcttttccaatggtcttagcaaatggcgcaccaggagattatatcccacacmtggctcggagggtcccactcccacagagcctcactcactgctggcacagcagtctgagattgaactgcaaggtggcagcaaggctgtgggaggggcgtctgccattgctgaggcttgagtaggtaaacaaagcagccaggaagctcaaactgggtggagcccaccgcagctcaaggaagcctgcctgcctctgtagacttcacctctgggggcagggcatagctgaacaaaaggcagcagaaacttctgcagacttaaacgtccctgtctgatagctttcaagagagcaatggttttcccagcatggagtttgagatctgagaacggacagactgcctcctcaagtgggtctctgaaccctgagtagcctaactgggagacacctcccagtaggggctgactgacacctcatacgcctggttgcccctctgagacaaagcttccagaggagggatcaggcagcagcacttgccgttctgcaatatttgctgttctgcagcctcctctggtgatatccaggcaaactgggtctggagtggacctccagcaaactccaacacacctgcagcttagcatcctgactggtagaaggaaaactaacaaacagaaaggacatccacaccaaaaccccatctgtacgtcaccatcatcaaagaccaaaggtagataaaaccacaaagatggggagaaaccacagcagaaaagctgaaaattctaaaaatcagagcatctcttctcctacaaaggaacgcagcgcctcaccagcaatggaacaaagctggacggggaatgactttgacgagttgagagaagaaggcttcagatgatcggtaataacaaacttctccaagctaaaggaggatgtttgaacccattgcaaagaagctaaaaaccttgaaaaaaaatttgacgaatggctaactagaataaacagcatagagaagaccttaaatgacctgatggagctgaaaaccatggcacgagaactacatggcacatgcacaagcttcagcagctggttcaatcaagtggaagaaagggtatcagtgattgaagatcaaatgaatgaaatgaagtgagaagagaagtttagagaaaaaagagtaaaaagaaacaaataaagcctccaagaaatatgggactatgtgaaaagaccaaatctacatctgattggtgtacctgaaagtgacggggagaatagaaccaagctggaaaacactcttcagggtattatccaggtgaacttccccaacctagcaaggcaggccaacattcaaattcaggaaatacagagaacaccacaaagatactcctcaagaagaacagttccaagacacataattgtcagattcaccaaagttgaaatgaaggaaaaaattaagggcaaccagagagaaaggtcgggttacccacagagggaagcccatcagactaacagcagatctctcggcagaaactctacaagccagaagagagggccaatattcaacattcttaaagaaaagaatattcaacccagaatttgatatccagccaaactaagcttcataagtgaaggaggtataaaatcctttacagacaagcaaatgctgagakattttgtcaccaccaggcctgccttacaagagctcctgaaggaagcactaaacatggaaaggaacaaccggyaccagccactgcaaaaacatgctaaattgtaaagaccatcgaggctagaaagaaactgcatcaactaacaagcaaaataaccagctaacatcataatgacaggatcaaattcacacataacaatattaaccttaaatgcaaatgggctaaatgctccaattaaaagacacagactggcaaattggataaagagtcaagactcatcagcatgctgtattcaggagacccatctcacgtgcagagacacacataggctcaaaataaagggatggaggaagatctgccaagcaaatggaaaacaaaaaaaggcaggggttgcaatcctagtctctgataaaacagacttgaaaccaaacaaagataaaaagacacaaagaaggccattacataatggtaaagggatcaattcaacaagaagagataactgtcctaaatatatatgcacccaatacagaagcacccagactcataaagcaagtccttagagacctacaaagagacttagactcccacacaataataatgggagattttaacaccccactgtcaacattagacacatcaacgggacagaaagttaacaaggatatccaggacttgaactcagctctgcaccaagcagacctaatagacatctacagaactctccaccccaaatcaatagaatatacattcttctcagcacaacgtcgcacttattccaaaattgacaacatagttggaagtaaagcactcctcagcaaatgtaaaagaacagaaattatagcaaactgtctctcagaccacagtgcaatcaaactaggactcaggattaagaaactcactcaaaaccactcaaccacatggatactgagcaacctgctcctggatgactactgggtatataacaaaatgaaggcagaaataaagatgttctttgaaaccaatgagaacaaagacacaacataccagaatctctgggacacatttaaagcagygtgtagagggaaatttatagcactaaatgcccacaagagaaagcaggaaagatctaaaattgacaccctaacatcacaattaaaagaactagagaagcaagagcaaacacattcaaaatctagcagaaggcaagaataactaagatcagagcagaactgaaggaaacagagacacaaaaaacccttcaaaaattcaatgaatccaggagctggttttttgaaaagatcaacaaaattgatagaccgctagaaagactaataaagaagaaaagagagaataatcaaatagatgcaataaaaaatgataaaggggatctcaccacttatcccacagaagtacaaactaccatcagagaatactataaacacctctacacaaataaactagacaatctagaagaaatgaataaattgctggacacatacaccctcccaagactaaaccaggaagaagttgaatccctgaatagaccaataacagtctctgaaattgaggcaataattaatagcataccaaccaaaaaaagtccaggaccagaaggattcacagccaaattctcccagaggcacaaagaggagccagttccattccttctgaaactattccaatcaatggaaaaagacgaaatcctccctaactcattttatgaggccagcatcatcctgataccaaagcctggcagagacacaacaaaaaaagagaattttagaccaatatccctgatgaacattgatgccaaaatcctcagtaaaatactggcaaactgaatccagcggcacatcaaaaagcttatccaccatgatcaagtaggcttcatccctgggatgaaacgctggttcaacatatgcaaatcaataaacgtaatccatcacacaaacagaaccaatggcaaaaactacatgattgtctcaatagatgcagaaaaggcctttgacaaaattcaacagcacttcatgctaaaaactctcaataaactaggtattgatgggccatatctcaaaataataagagctatttatgacaaaccctcagccaatatcatactgaatgggcaacaactggaagcattccctttgaaaactggcgcaagacagggatgccttctctcaccactcctattcaacatagtgttggaagttctggccagggcaatcaggcaggagaagaaaataaagggtattcaattaggaaaagaggaagtcaaattgtccctgtttgcagatgacatgattgtatagttagaaaaccccatcgtctcaacccaaaatctccttaagctgataggcaacttcagcaatgtctcaggatacaaattcaatgtgcaaaaatcacaagcattcctatacgccaataacagacaaacagagagccaaatcatgagtgaactcccattcacaattgcttcaaagagaataaaatacctagaagtccaacttacaagggatgtgaaggacctcttcaaggagatctacaaaccactgctcaatgaaataaaagaggacacaaacaaatggaagaacattccatgctcatggataggaagaatcaatattgtgaaaatggycatactgcccaagataatttatagattcaatgccatctgcatcaagataccaatgacttccttcacagaattggaaaaaaaatactttaaagctcatatggaatcaaaaaagagcccacattgccatgaaaatcctaagccaaaagaacaaagctggaggcatcatgctacctgacttcaaactatgctacaaggctacagtaaccaaacagcatggtactggtaccaaaacagagatatagaccaatggaacagaacagagccctcagaaatactaccacacatctacaaccatctgatctttgacaattctgacaaaaacaagaaatggggaaatgattccctatttaataaatggtgctgggaaaactggctagttatatgtagaaagctgaaactggatcccttccttacaccttatacaaaaattaagtcaagatggattaaagacttaaatgttagacctaaaaccgtaaaaactctagaagaaaacctaggcaataccattcaggacataggcacgggcaaggacttcatgactaaaacaacaaaagcagtggcaacaaaagccaaaatagatgaatgggatctaattaaactaaagagcttctgcacagcaaaagaaactaccatcagagtgagcaggcaacctacagaatgggagaaaatttttgcaatctacccatctgacaaaggtctaatatccagaatctacaaagaacttaaacaaatttacaagaaaaaatcaaacagccccatcraaaagtgggcgaaggatatgaacagacatttctcaaaagaagacatttatgcagccaacagacacatgaaaaaatattcatcatcactgacgatcagagaaatgcaaatcaaaaccacagtgagataccatctcacaccagttagaatggcgatcattaaaaagtcaggaaacaacaggtgctggagaggatgtggagaaataggaacacttttacactggtggtgggactgtaaactagttcaaccattgtggaagacagtgtggtgattmctcaaggatctagaactagaaataccatttgacccagccatcccattactgggtatatacccaaaggagtataaatcatgctgctataaagacacatgcacacatatgtttattgtggcactattcacaatagcaaagacttggaaccaacccaaatgtccatcaatgatagactggattaagaaaatgtggcacatatacaccatggaatactatgcagccataaaaaaggatgagttcgtgacctttgtagggacatggatgaagcttgcaactatcattctgagcaaactaacacaaggacagaaaaccaaacactgcatgttcttactcataggtgggaattgaacaatgagaatacttggacacagggtggggaacatcacacaccggggcctgtcatggggtgggtggaggggggagggatagcattaggagatatacctaatgtaaakgatgagttaatgggtgcagcacaccaacttggcacatgtatacatatgtaacaaacctgcacattgtgcacatgtatcctagaacttaaagtataataaaagaaaaaacactaaaaaaaaaagaggtgagtatataaaaatttctatggaaaatacatactgttgcagttcagttcccctagtcatcttgatgtatgaatgtcctaaattagaaatagaataaaaaatataactctaagaagattaaaatgtatctgacttacctcaaggcattctcatcagggagcagattcttcatcaactgttcacctagtattcctatacaccacgcctagtgggaaactgttgtattttgtaaaaggagacttgctataaagaaataactattgttatattctagcctgtatatatgaaaaaggaaattcaggaayaaaaatcaattcattagaatgtttttaaactcttaaaattaccctttccccaaatgtcatgcttttgggtcagcatttttttggtactgctcaagactgattaattatgtaaccactctgttctgtggatttcttttaatgtgtttaatcacgttctcttagcctgaggcaggtgtgccaaagccacaatttaaaaaactggatgataaataaaactaatcagtcaaaggggaaagatcagaaagactgaaaattcrccaagcaactgcaactcagcttcaacagaaatcaaggggccatgttcattcaattaggaaagataggaaacagcaataattcagctattgaccaaaagagccatgagggcttacagaatgtaggcaatcaagtacttacagaatgacagtaggttaatgtgtttgctttgttaaagcattaaggaaaatagttaatgagctttctgaacctactgcaatcatttgtagacagaaagaaaacagggaaaattaaaaaaaaattggaaaattaactggaatatttatagagaaagaaagacgggaagaagtatgaagtggaagggagagaagcaaaagaaatgaagaaagggaaaggaggagaagcaagaagaggaggaataaaagaaagaaaaaggaaagagaagaaagaagatgcttcagtaaattcaaccctattgagtgttgctttttgtttcttttaatcttaagcaggaggtacatggaagtaatcagaccttagtaatttaaaggatatacttcaaaaaatgcatgtgggggtgctgttcttcctttttttcttttgtattgcattgtaataaagtggactaaggcatttccttgatatctaggtaaactaatattacaatgaattggattttctttttgattgtgcaatgcattcagttataatggtacttgaagaaaccttagaaataatctctttatgttatagctatctatctcatattcattttataamcaatgaaataggtgagggattttttttttttttttttttgaggcggagcctcgctctgtcgcccggtctggagtgcaatggtgccatctcggctcactgcaagctccgcctcccgggttcatgccattctcctgtctcagcctcctaagtagctgggactacaggtgcccgccatcacgcccggctaatttttttgtatttttagtagagacggggtttcaccgtgttagctaggatggtctcgatctcctgacctcgtggtccgctcacctcggcctcccaaagtgctgggattacaggcgtaagccaccgcgcctgacctagaatctcatgttctttatttcattctaggtctcatgttctttacttcattgctactgaaatgaagccctatgacctctcggtgactttagtgctgagatgacaggggtgggaggtaggagaggagtgggtggtattagcataccctgctaggatggttgctacatacatcaagagctaaggaatgattttaattgaaagatgtggggaaacacagactagagcacagtattaataatagtgatgatttaatgattctggattcttaagaagaactaatcagaacagacacttcagcctcaaaatgagaagctaacatgaggctatagaaaagctgctggaccccaaattataagacctgttatagtctagacattaatctctttgggtccatttcttcatctatcaagtttgggatgaaatgagcctcgtggttccttccaaatcagaatctctgatcttattcttctttgttttacctttcccttcacagttgctatccaaattactcttctcagtaccaactgacaaattatattatgctacagaaggcagttttgtttcattttgattgattttaagagggtgcttctccaattttgcttaagcaatctgcatcagtgagaatgagatcagctccttcaggagttacctgctaattgcaaacctagaaaaaagtacatgtgtaccaaaatggtacaatatattgtttatgatttgagaattgatttgacatggtttactgagactgctgtggtatctctctcacaaatggcagtgatctgttttgtgaaattagatcccttttgtgcaattacagagatagaaaaaaaaatctggatgaagcacacacacacaaacctggatatgggaaggaaagaaatgaaggggggagataaaaaaaagtatagatgtgatgtgagagtctctactgttaaatgtactccttacaataattactatattcttattcatatgtcaaatagttccatattattcaaaaggaattttgcctgaatttaaaacttagcataaacaattatttctgttctggagtaaataattagcttggttgttatcaatccttagaaaagagggaggagattaattatttctcttgtgtgctaaacaacctgaactatagaacttcaaagccagagatgaaatgagaggccatgaaagtgaacaagatgtatttgacaactataggaatgtgccaaattccccattaggcaaagtgcagctgaaggaaaaaaacagagctggatgcagacatcctgatgttcacgagttgagctgaaagccrgggaaaaacacagaagaaaaggggagagaagacaaaaaaaaaaatcaagtagctgtagattctaggatagtaaagtgctggcgtcaaaatctataaaggcatgtataaggcagaactgaaagcagatgtggaaaaaggcacaagactgtatggatgatatttgcaaaagtagtcatttcagtctgactcatgctgaatttatgcttgttgttgcataatatgaaagaatactaaagtcacaggataaaaactgtgaggttgtttgtgtgtgtgtgtgtgtgtgttccctagcaaaatcaatgaaattccatattttcccttttgattactaatgtctgaatgttattaatagcaaatcaataactcctartaataattattaaacattgatttttttcatgctttcatctgttccacagtttctcatctgcagcactattgactttgggggctggwtaattctttgttgtggggggcttccttgaacattgtagagtgtttaacaacatttccagtctccacccactctgatgccagtggccatccctttacctggttgcccattttcctgctactgtgagtgttggctgctaacatctcacagctgctccttyttctggataatgttgtcagccaagcaggagtcactatgtatgagtggttatgcaccaccacccctgcatgctctgacaaccaatcgctaataactgactgagagaaggatataaagctcaggctccttgcttcaagatggaaccaactctgctgtacaatttcacaacccrctctgaggtcaggtaaagctagtctcagacttagattaataattttcttattagttccaggccctacctccccatgcttttttcttccctccccttctgagaacagaccttcagtaaagcacatgagtaaatttctctcaggctctctttgtgggtacctactcaagagacaaatagtagcatcattgtgtcctttactgtcactttataggtggagaaaaggtgacaggagtatttgctgatttggtgaatactcttattgacacatttatatatattctctatcctcccaacagtgctacaagtaaacttatgatattttgttgacaagaaaagaaaggctaataaatgaacataacttgccaaatgtcacatggttagtaactgatggagcgaaaatgtgaatttgggctttattttcagagctctttgtgtcattccatgctaacatatatttattctcattttgcctgctctgaaacaacaccgcagagatgaataagcaaggtctttgttctctagaaatgcagccagaaagaaaagacaagcaaaaaataataataaattacaggaagttttatttcataaatagagtttgtttccacctgcttctgaaaaattacaacagtttcagaaatcaagaaaaatataaaaatttgaaactcaaaatagaaacaagctctaaagaattttcaaaagtataaagacttttgggattaattagttactctagatgagtaaacttaactagaaattaataagtaattatagtttagagttgtcattacttgttgatagacagcatagacatttcttaagacagaacattttttcaggcttcaaatttaaagagaaacttattgtgtatggtaattatttgaataacaaatggtaacatgaataacaaatggtaacaaatggtaacaatgtcctaacctaggggtctgtaaaagacagaaatgttcaaatagacatttcttyattgaccctcaataaaacctgaagttacattaaatttcaacttagtgaaggctctttagcacggatttgtggtartaatatgacctggaaatgttactttctgatgatctagctaatcacaaaaaaaaacactgacaaccataggggaataagtgcattaagttgtctctgcaatatttgatgtcttaaggaagctttggtcaagccctgggtcacaggcaattcgtggttgagttttctagcaacattcagtgttttttaaaaagtgatctatactctttctatgtatatattcatacattgtgtagacattgagcacctactatgttggggggggtgtgcatgcatgcgcttacgtggtatttctttctttctttctttttttttttttttgagatggagtctcgctctgttgcccaggctggagtgcagtggcatgatctcggctcactgcaagctccgcctcccggggtcatgccattctcctgcctcagtctcccgagtagctgggactacaggcgcccaccaccacgcccagctaattttttaaaaatatttttagtagagacggggtttcaccgtgttagccaggatgatctcgatctcctgacctcgtgatccgcccaccttggcctcccaaagtgctgggattacaggcgtaagccaccgcgcctggccgcgcacatggtatttcttatcactgactacaaaattgactttgtctcatgcaagttttaggaccctcacttatacttccaaccagctgtaragttcaagtctattcctcttcaacacagagataaattatgtatatgctagcctcaggctctcattcacataacatggaatgaatatgattgaaaaacgtgtaagaaaggtttgtttcagtcaataacactgaattaggcaatttaggctaggttatgctgtggtaacaaacagctaccaattctcagtkactcaacacaacaaaagtttaaatttcacttgcgtttaagtttaatacaggttggtagggagcttttctctacatttttacacatggaccagggattatgtactttctggaatctcactaatgaggcctccatcatttatgtacaaggaaagggaagaatagaaaggttgctcactggacaataaataccttccaggagggaaattctactacacgtaagttgcttagcctagtgtccagcatgtagcaggtgctcattaaatatttgtgattattattattaataatagtcgtagtagtcatggcagtagtcatggaattagctaatattggataaatgttaaatttaccctaaagtgatattattcactgatatatttcatctaattgttgtaagagttatttcaaattatgtgtaaagaaaaaaggtaagaaaatgccgtgcctttagtaagctcatttctctatttattatgaaactgtttttttgtccattcctgttttagcagcaacacgtggcataggctttgaggaagaataatgttctctgcttctgtaccaagattagagtttgtttcagatatagctgatgagtaatggatgaattstacaaaaaaaaamaaacaaacaaaagacttaggctgtcattaactgtattcagcacaagggaaaagctcttcagaaggatggttggactttaatctacttgttcctaatacaaatggagacatttagccctgagatttcaacaatggacatagagacatttttatttgctattagagtgtttatataaggttacatgtcagaaatattcaattactgtacagaatagaactttaactacctagaaattcaaagaagtcatttttttggcaagattaacacttctagtagcaaggacttttaagatgtagggcagggtacaacagcccattatatttacagaaatgtttaggagcagtacagaattaataaatgttttggrcaatagatgccaaagatttgcaggaaataaagtactttcatttgaatagcctaaagaatttcacagaaaatttgcactaaataataaagaattagaatttggttagatggagagagaaaatgtctatgtaactgacctgaaaatataaatgttctaagaatgcaaggtgatgtttttaataataaattttaaaagatttgtttaaattaggaagtagtgtaagtagagatccagataataactaacgctttgctagcatatgcttgtatatttgagagtgtgattgagtgagagagagagaaacagagacagagacagagagattcagtgatataactaggtttcatcatgctaaaaaagtttgtaattttatttaaagctaaaagaatgaagggtggaatatgtgtgtgtgcatgtcagtttggtttacatttgtaaactatatatgtaatatatgcatatgcctgtatagtacatgaaaatgagtgcttattaatgctaggcactgttctaaatatttaaaatgcattgacattttttatacttaccaaaaaatcctccatggaatagctattattattacaatcttatagatatgaaaattgcaacttaaagaggtctaacaactatccaaggtcacaaagctattaagaggcagagccatatcttaaacccagttccctcattctaaagtatgtacatttaatgttaagttgcccagcagaggggcatggaagctttagtgaaaatgtaaaattgagcagatccagggttcctatctttccctttgagcagatgaaacactcttttaggacagggttcttattcttcatttctgtgagtattacggtaagagtaatggtaaccacaatgacaactaacatttattgagctctaaataatgaccagaagtggttttacatcccttaaatatgttatttaaatcttcaaaccaatgaagaaggtcccattattattctgattttatagatgacagactaaggctcagagagctaaggtacaaggaagaaaaagagcctcttttctcctcattccccagttccatcctgcatctcccttttatccaagatgggctctggcatgcccaacactcagcaatagtgcttttgggtcagagatgaaatctgtctatttctataaatgctgtccaacattctcaatgtattattctgaaatagacaaccctagtacaccagaatcatcttcatggtccctcaccctcactctttccttgggcaggacttaaagcacagcatytttagagttcagaaccattgctcctataattcgtgaagtatcaatcaagtttgtccaaagaaaggacattatcctaaggcatttctgcagataggcagtcattaacgtaaaattaaaactaacatgctgatgcatgtgtcatcgccagactgcttaaaggcaccactgattatatattgtcataacaaattccaaccatttttcacaattgagccaaccatagcctttgaactcttggtaacttttatgctcatgtcttctctccctctcactatatatatatatayayacacacacacacacacatttatagaagaggtatttgcctacatataaaaatgcatacatatataaattagttgttctaaacaaggtaaatttgtgcctggtttttcaacctgaagattaaatataataatattagaatagctaacttgctaaatcaatctctgtaaggtgctatgttttatatacatcatctcctttagctgttacttacctagtgtgtagatatttatagatagatgataaatagatgatagatagatgatgatagatagatagatagatagatagatagatagatagacagatattttcttgtttgttactatacttctttgagcattatttggtctcttttgtgttttaagcaattactggagtctatgaaacaagcctcccctttgtaccatttaatttaattagacctctcatttgagctcttgctgagtcaatatttagttccttgtctatatccctggaacaacctgaaacattccatatgccagctaaatggcttaatatgcatggacatatgagtgaatgctttggtttcccttctctctccctgcacaatgtacacgggatgcggctacaaaactcctccactttgccttcccccttaattatgctcatccatggttcatgcagtaattcttttttctggaagataaattatgctggaatagaaggaagagcaatcttcagtgttgtctcactaattttgtttgtatagctgtttttccaatgtagcattttcgaatagccccattatacatctgcttctccacctgggaacactagccatgccaggtgcaatgccatggatggcataattttgcctaatggcattaagtgcctcggagtatgctaaaagaaagggaaaagtgacaaacgagctccagggaaactgtagtttgtttctctttgagggatctgtgcaaatattgggactatttgtggtttgttttgggaagggtgatttgaaagccgagaaaaattgtctgctaattcatacaagaggacttaagaatcytcctttgccaacytttcagactttaaaggctttctcaagaagaaaggattttgctttagcaacaattcctagggacatttatagaagaggtatttgcctacatataaaaatgcatacatacataaattagttgttctaaaaaaggtaaatttgttcctggttttccaacttgaagattaaatataataatataagaatagctggcttgctaaatcaatatctgtaaggtgctatgttttatatacaacatctcctttagttgttacttacctaatgtgtagatacttttatctccattttacaaatgatggggctatgtctcatgaaaggttaataatttgctcatgttcacatacctattctaagataaaactgggggaagattgcactgcttactgactccaaagctcacccatacactttgtaaagaggttcctgccctaaagatgaaattgaatcataaagtagtgacctgtggtggctgaacccttcagggttcccatcttgtctgtgtccatgggtccacaagccagagtaaatggaaatattgacagaaagatttgtgtccacgccctaccattcaccctgctagttgcatgcagcgaataggtttgatgtaatgtcattgaggattttgtttgtcctatgtcacttcataaaataatattacttcttttagagaatcctagcagtaatatttgaggttatatgtacagttgtgctttgtatagatcctctgtgtaaaactatcatcccagcatctgratcacaatgcatattaaaaacgacataactacactttgggaggctgaggtgggtggatcacgaggtcaggagatcgagaccatcctggctaacatggtgaaactccgtctctactaaaaatacaaaaaaattagccaggcacggtggtgggcgcctgtagtcccagctacttgggaagctgaggcagaaggatggcgtgagcccrggaggcggagcttgcagtgagccgagatcacgccactgctctccagcctgggccacagagcgagactccgtctcaaaaaaaaaaaaagaaaaagaaaaaaagacataactattatcaacagaagcaacaataacaaaaattaatccttactagcgcttgttatataycggaaaatgttttaagttctttatatattttactttatttaatctttataataattgtagcaatctctgttgttttaccacaactttgcaaattaaaacctgaggcaaaacttgagtaactggtccgtgaggtactaccatgagtatgttgtggaatccagatttaaatctaggtttttttattccagagcctgtactcctaaccagagcattttactgtctcacaaacgtaaagattctttaagtataaataaatgactgattttagcttagcaatacaaaatttgtctatgctaaatattttttcagttcttattctcttacccaaagcccatttctcacttctccttgcaagaagttcaggtcagaagatatattgataaagagaaagaaaagaggcaatgaaaataaatttgtatgtgctaatggatgcttcttttgttgttgttgttgttgtttttgagagggagtttctgtctgtcaccagactggagtgcagtggcacgatcttgactcactgcaacctctgcctcctgggttcaagcgattctcctgcctcagcctcccgagtagttgggacactataggcacctgccaccacacctggctaatttttgtatttttagtagagacagggtttcaccatgttggccaggatggtctcgatctcttgacttcttgatctgcccatctcagcctcctggatgcttccttctgttttaattcctctgccattggcaatctacttgcaatcattcccaagttctaatgcatctccaactgctccccacatcacaagagagcctaccttgcatccaaccctaaatgttattttaatgatttttaaataaacctgctttaatgaaacatgaacagataagtatagagttcttctctgaaatctagtaaaatgtactcctttgagtaaacacccttgtgaaacatatattttaaatataccatttcagtaagcaaacaaaaaaccaaaacaggtgacgagggcttggggcaggcaattatataaggtgaacattctctgttaaaatggagtgagccagaaacaccagttctagaaataagacatacacaagggttaattcttttcaaaatgctgcttttaccccatttttttttctccccattgttgcaaattgtaaacatctttaaaagatttcaggactctttgtgtttggttaagkttccaacaggtggaagatatcttccaagactgaccatagtcatatttgggaaggaaagatcagaatcaatttaatcaagatactaaatatgaaatgggggagggagcagtcagtggaactaaccagagtaacattctgaacttggaactgaatccagagtttatacttgcacaaatcctggcctccttccccatacaaacccctagtacaggtctttgagattgtttctagcaaactgaatttttcttccttagcctggggggaaaatgcagactctggctttattttctgcatgggaatcacgtgggtagcttaaatattccaggcatcttgacttggcatattgaacrcattttcttattccataagctgttctacatgtcgttagagtgacagcagtgagtagtaaaataagcactggctttggagtcaggtagacctggattcttagtagaccctggacttcaagagtcagtattgcaccatgggtaagaacatggaccatggacccagactgcctggctgcagatcctgctcttgttacaaaatatgtgactatggatctttgtgcttcatctgtaaaatgaggataatagtaagacctacagtacagacttctgatggcaaatgatttaaatatatctaaagctatttaacaatgcctagcacataataagcactgcttactgtgcatttgaactatgtaaatattggcttgcaaggtttgacaagatttgtggtcttggaaaggataagtaatcttctttttcttatctatatccataagatttgtttggtttattttcaggattaaatgtgataatggatataatacttttggcatggtcaagaatcagtaaatactaattattattgtggcattctggattactgtgacttaaatacttcacatgaaacatgagttaaacaagaagggttcaatgaacaggctgagaaagcatatcaccatctgaaatatcattttcttttgtgaatggcattgcaagtttcacaaactgatttttgaacaggatataatcccaaaatttaactgggaatctgaaaatccctcaactgcttagagtataattttttaaatcagaaaaaaaaattgtttcactgcmgggataaaggcctatgcatctcaattctgtttttgctaaaaccacatgtgtgtaatcacaggtctctaagtaaaatgaactcacatactttctgaataaatattttactacttttccatttgtaccaaatatcatctagtctctgctcagtgatatgaaagagtcagtatatgttgaacaacataatctataataacatcagagtgaatagtggccattaatataaaaaacacataataaagtgatatgttttkcctgttttctgttatgttggagtaagtgtgagagcagaacatgcctgtagtttatagattaacaatgttttaaactaatctggggctagaggtcatcaaatgtccctcaataactatctgccaaattcccaactgttatgaaacaatattgactagtactttaaaatttcttgtggcttagaagtacaagaggtaagtacattccacattgaagagtacagatcatgtggatttttgcaacacaatgactgtttagggccttcctttcttacagattcagaaatgctctttatgtgttaaggtaaatattgggttctagaaaattgaaataaattattattagattggtttgggttgggatattcaactaattccttgctttttcagttggaaggtgctcaaatacattgatttgattaagagaaatccattgctcaattccatttgacttattttgtcataaataatatacagttcccttccaggatatttcatattatcctctttattaatcaagaataaaagttttggtgttcaggttactttttcccaaaataccaccacactgcattttattataaataatcttgctaatgccaaaagtaacctatcattatataattcatcaaataatcatacaaattatttatattataaaaactgcagtacaataatagtagtttgagcgcataatgtacgtaagttggtaatgtttttcttgctcattgagagtttagaagagttaccaaagagaggctagtgataggttataggacagactcaaaaaattacactaagctaggatgtacttagtttatagaaagtgtcaaggataggagaaaatattaatataggaatgtgtcccccaaatctgcattaaatcaagagaatattcattatgtatgggtaggaaaacagtttgcatgtatcaaggaactaaacataagaatttaaagacagaaatctagtcactgatataatctgtcatgattttaaagggtctgtggaggacctagaggaaaaagtagcagttattaatcttaaaattgtagaactggttgggactttataagtcattcagtccaacctgcatactgcacaaagaaatttgagctcagaaacattaagtaactaggaaaaaattattcggtagccaaaatgtacattgaatatttagtctcaatttacagctgaaaagctctttctaggcagggcgcggtggcttacgcctgtaatcccagcactttgagaggccgaggcgagcggatcacgaggtcaggagatggagaccatcctggctaacacgatgaaaccccgtctctactacaaaatacaaaaaaaattagccaggcatggtagcgggcacctgtagtcccagctacttgggaggctgaggcaggagaatggcrtgaacccgggaggcggagcttgcagtgagccgagatcgcgccactgcattccagcctgggcgacagagcgagactccgtctaamaagaaaagaaaaaagagaaaaaaaaaaaggaaaactctttctactagtctatgctgtcttccagttacttgacagctgtgttagtgggcctatttgatcccttatcattcagagcacaattataagggatcgaataggctcactaacacacaccgttggtaaggagaataactcaatgctaaactgttatgccacctgccaaagatgccttataggcttctgtctttggccaagattggtttcatattctggagtgagatagaactcaaaggtgtggataaattggcacagccacaaaggttaactaaattcagggctgggatccaggaagaacattagatgaaagtctttggaaagttcatagatgagaaaggttataaatcagacttccttctgtcaagcctcttccaaccccttaaagtccccagtcatctcactatatacttattttcaatagtgtcaaggttatagatgtgacaaattgattcttgacatgagtcatttttttttgtcatctttctgacagaagagagagaatttaaattctgctaaggagagcagaaataattatgcgttatttccctggtatcattaggttaaattcagacaatcctgtagctttggtttcagatggtttacgaagcacrtttaagtatcaaaatcaggaaagtgaaacaaagcattaagattctagtatcaacggaatcaaatactccaggatacaatatctacctaattctgagggcaattcattttctaaayttgctccagaaataactgtttcccctcagcttcaacataytcattgagatggcccctgatcattgctttccttcaaaatctttgcaggatatttgaatcagcagcctccctctttttaatgttcttagttcttatcaaagacaacatcagaakaactaatacatggtttttgtttgttttttgagtttttttggatataggacagggcagtccatctgaacctgttttgattaaggtagcattcttctctcactccttcctttgcttactctggcatgccaaacctgcttgcaaagtgtcatgatctattagattcacagaatcaaagaaaaaaatagtcatttctccagaatcttttaaaaaatgtaatcactacttaaatgtgagccaacaatcaagtacaattagagtttttcttatcctacatcttttgttttatattcattttcctagtgaagatcagggcaagacaatagcagttcactttggtaagtgctataataggagtacagtgtatgggcaaaatacaacagggtgcacaaagaaactggtcatgatcactacttgaaagaggagaatggtgttggggatatcatcaccatctccctggaaaatgacttagataatcaagctgagtcttaaagaacagtgtgaattcaagaaagaaactcttggaagaaaggcaaacatctactcatggaagcatgactttcatttcatactgtgagaaagaaacggtgagtaagttgtattggtggaaaataagattggcaaaatcatagtttgagactataacatgctcaatactctgaacttattctatggttactattgctgcttgaagtttgtaaaacaggaaagtaattatccaaatcatattttagaaagataatcctggataaattaaagaaagggaaacaactctatgagaccaatgggaggckatttcaatggttcatgtaaaaaggacattgatttgcattaattaggcagatgtaaagtcaaagaagggggtttacatttaagagctttaggagatacaataaatacattgtggtgactatgagtggaataggcacagatttggaggctactgtaatagtacttaaaagtttatatatagtgcatactatgtggcagactataacaaatgtttatatttatataatatatatagttatataacttatgtaattgtcatgtcaacaagtttattaggtagatatgattattgtgcctgtttttaatatatgtatgtgccagacactattacaaatgtttaaataaatatataaccgtataatttatgtaattgtcatgtctacttcattaggtagatatgattattatgcctgtttttcagatgggaaaactgaggcccagaaaagttaaataaatcatccatggtcacttgtttaataagtgacagagaaaagttttcaacatagactatttgcttctgaagtctgtgtttttaatcacttttaatcattatgctacactgctggggagaaagtttggcttgcatttgagatccttatagcacatctaagtgtaaatttccaaaaggcaattggaaatatgataataatggaacccaaatgtcagagctgaagatgtggawttcttcagcgtatgaatgttcattggagttgtagacactgtccaacaaataatgtataattttattggcccaaatgagagtaatagggacttcaagacagcttgatgccatcaagagtctacttctagaccccttttatagcgttaatacaaagcaacaactactgtattatttcataaatatatttggtttcatggttgtttatatattcaaaacaattatttgactgtggtacttgcaaattcatagaactcttttgcacctaactacattaataccagatactaaaagttaacttaagaaaataaagaatcctaatcaacatttatctattattaaatttggatttgaagaacttgcgcagtctgtcttctaagtccaattgtaaactccctaaccaaagctttactgttgttacaagacaactggagttagtcatttgtcttccctggtagcattttgaacaataaattgaaaagcctgaaaccaagatacatcaggtatctgaacaaagaagcaagattgatacttttctttccatgctgttgcaaaaacctcactatctaaactcttgactgtctattccacagaccatctcacttctttatcagttccaataaaatatgcattcataaacgctgccctatagcttggtcatatcattatccataaaagttcacccactgaaaatacccctagccttctatactcagtgcaaaagcctttccataagctagaatgcatgttgtgcttgataaaaacataaaatattatctgtcaatttaaaaaattaacaaagaaataaagaagaaaaattacacacacacacttagaaaatgaatgttctccgtgaccctaagatacacaaccatttcgctgaacccaaaggacaaaataattaaaagctataaaacattagcattcaccacattttctcatcatttaaactgcattgtctgcatcacttctagagcaggttttccttaactggaacattttcaataagatttctgtaaaaataaaaaccagtcttttcaaatcaccaaaactctagcacaggacaagttgcctctgtcaccgtttctgcttaattcaaataaatcaaggcataataaccagatattttaaaagagaacaaaacagaagcatggcatgattataagcagaacgataagattaaaaaaaaccaagttagtgcaaattatctccatgacattggcagatccatctctgaaaatcttgaaataataggagcctacgaaaacacattttagcatcttcttgcaaaacaaattctttattcttcctttgaatggtagatttttcaaaagattgaagatacgttgaaatatagtttcttaggacaacggactactgttgtagccaaaaattttctagagcttagcaatccaagtgttatacatatcatgttatatgaacaggaataactcaaattgcactggcttgtacatgtcttatcatttcagctgctcatgggagtgaataggggacagtcatatggacacactgggcactgctacttctttgcttggctgactcctcactcagtgttactgtgtttctcttaggctatgagattttgagttctgcactactaagccccagtattttctctaaaaggctacagagctccctaaaatcaatggccatcttatatcggtcctcaatcaatgattacctaggatgaaaactctgacctcctggtgcccaagatcttttacttattaaaggggctttcctttggttcctccatgcagccattctctcagtgtgtcatcctccttttttgattgacctctctgcccatatttttgtatttctttctgagggaattgttaaacaatatctcaataccatgttgatttgatccatacctacaaacactgtttttattgaagtaacaaaaactttgcttcaaaactctggattttaaagatcaaaatagatgtgagtggggtgagtgtgattccatcgataaaataataatttagaattcaaattatgaaggcaggatcaactagttgtrgatgagcaacagcaaatggactagtcatgcttaagtaaagttatgacctgggagttagataagccagtgctacaccgagtgcccacagcatgaatatccagagcaaggagagtctgcatatttttgaacatgggtgtgatgtgaagcaactagtgctggagagaaacagctgcagctgaagttaccaagatggttagaatgtggaacctcatctaagagactgattacgttgtcttcatctgaactattttaggctggaaatagagaaatgaaaatgggatttggaaaaggagtacttttaattgcaagtaacaaatcttattatcaatgacttaaatcataacaagaagtccagattatggttattacaaagtttaataatgtcattaaacctagattatttaacatttccttctatcatcatttgtttcttactgttatgtgtttcctcataatttcaatatggatacagcagctctaaatttcatgtttttacaccatcacttaagaagtaagagactgagcattctctttatatgacatgcaaaaaagaatctgtgccagaaccactcyagcagatttcctcctacccagctggtcgggactgggtcacatgaaacacctctagaccaatcagttgtaaaaggtcaggtctggtttaattgcctgaataaaatcaggttatcattatcaaggaaaaatgggcaaatagtgtctgccacagaagacattgtggaagatgaatgaaaatgaattgaaaacttattaaatgggtaagacaggttattaaaaatactttagaccttgaatctgggatcttagaacatggccatttttttttacactggtgttatgaggaagatcttaaaggcaattaatctgtttagtcctaatctctagttcctggagaagacaatctcaaatgtttacttttcgtttttttgctatgatgcacattcacatgcagaacacatttcttatgagtaggcccatttcactgaacactgtcttaataaggtgggcttctaagcttgattcctaggaaactagctttagcccttcccctttctttcctgctccaggargtatatcagaatgcaagtgagtaaaagggcataattagagggataaccttgaagccactccaatttgtgagaaaacagtaaatcattttctaatttcaatatttgaactattrttattactatcaaattatggctcttgtgagacatgtcacaaataattgaaatgcaccaatgtgtctggacccctaggttaaaagctttcttctagaggacaaccctcttctttctttgtgaccattgtgctattatcattatattgttgtattttttttatctatggatattcaaattgaacagttagatttaaaagagaagacaaaacccagggaatctaaagtggaaagcgcatacatacacgcaccattcagtctattattaggcatatagcattcaaaaattggggtcagttcatatgaggattgcccagaaattcaagcagtttttaatcacaaaagtcaatcttccccttgaaatggtgcaattaaggtgcagtagaatgagcgagcaatcacatttggcacatgtttctggaggacaagagaagctggggagcaccattcagaaaaaccaagtggggacaaagttcaatgatgaaggatttttaaaaaattttaaaaagactcccaaactagagaggaagaatatcttagtrcaaagtattcagaggtagaataagaagactgtgttgggagaccttagccaggacaaaacagtcccaattaagagatcttttcaatgagctacaaaatatttccttttctcaaaaaagtagcagcacaagatggttgagagaatgagggctttggagttacggcgatttggaattaatcccaagtttacctcttactatctgtgttaccttgggcaaggcactgaaattatctgagtcatagttcttagataccttatctaataagtgggaaaaataatacctacatcacaaggctgttactaggattatagataatattttaaagcatatggtcttgacacaagtttacaaaatgggagccattattacaaattcagctttgtgcattctttcagtttttgcaataacaattgataaaggagtgttattgttgttttcaaaaccttgacaatcatagtaatgacaatgaaacaggatatatacatcccattctgctatatcattaatctggatcctcacgttctgtccttctgacaaccctataaggtagatgtcgttggttttccatttaacagaggagaaaacagactcagagagagaaagaatttgtttgaatttgtgtagtttacctccagagtccctattcttaacccctcagctctacttccctcctcccttcagcttacacacaccctctcacctacatggtcatccacgtaaccttgagaactttattctttgaatttacacaaagacmaacatcacagtgattaaaaaccacacatggcttcttgcttctcctggttgctgaattccaatgcctggggattagtttagatgcctactgctttcaggttggggattgctgccaataaaatttcctgtttcctaagcagctgggaagccaacaaccagctgctctgaaatgtgtttgaacctcgtcctctcagctaggagacagctgtgctgatctatagaaagactctggaagattgtttgtgttttataagacactctaggcaggaagagagagacttctgatttgaagagagactaaattcaggaacagaactctttaatatttcccgatcacagacacttctccaacctctgatattcacttaggtacagagtgtgtgagtctcaaataaatagaagacagtcactttaattgttttcctcagggtgcatttttacacctgacatattctatgcctcacatctgagataacaaccttgttgctccaggcatctctggaataatttccaaagcaccgtactgtcttgttatctgcttccctttacttccagtgtgttgatgaagcaataatggtatgagttaatgctgctgctgcttaacctatgtttaaacaactgacatagtacatattgtaawgtttgtagttcctagcaggcaaggcgctatggcagtgcccacatctaccagttaaatgagactacgagaaagatatgtatttcaaaagcacacaagagccctgaaaactggtacctttatcattgattttgttgttgcaattgtctaaagctagtcatcttttcagtatagctctcactttatagataattgtgaaagtcagctattaatttagtaatagagccaatgacatagtttatagggtcaagttaaaccatggttgaatcttcaaagaccctgaaaaatctgggtcatgaaggaaattttcaacatgtggcaaaacttcagctgtatttcaaaaaaatagagaagctgatgttttatttaaaaatcagaaaaccatattctttatataaacatgtacagtatatatacttatgtgtataagtattaatttacaattaatctatgcatcccattgctcttgcagcctctattttcccaacaaaatactggaatttgtatagagatgaataggcatatttgacagcatcttaaggatcaagaatatgtaaaagggctgagagctaaagcccatccctctatcatattttttttctagtgatggaggtagagaagatgacatttatacaaaatgttgattttgtacaaacatttctttgaatgagagtatgaatgtgtgaactttattttttaagcatactcaatattataatcacagaaataaaaaaattaactactatgagattttaagaatgaaatcacgacatactaaaaatgaggggatatgcatgctcaggctaaaaatccatkttgctagtcatggttacttttactctcagaacattttcctagtcaagatgttttgactacttactgattttcagctagagttaaccaatgggagaaaattgacagactgctgacaagcaatcatttatttgtgttagtttatctacttggcatgggttcatcttctccatttccttcagcaccaggatggtaacaacttgggctgatggtgaagtgagggttgctttacatttggcttcttagtttttccgttgcctatataattaatttcttgtgttaaattccatgtttgaagcacctacagtagtttctgttttttttttktttttttttttttttttttactgagctctgactgatacactcaccaaaaggattgtgattaaccgagctgacctcacactattttgaaaagtgtgtgaagtgtgtgtacatacttatgtgtgtgtaagtacaggtgtgtgcacatgcatgtgcacacaaatgtgttgtggataatgggaaagagtcacagtacctgccccttcacctctaattgtcaagaaatgttcttgtgctgtttctggattttcaaccgtgggtagaatttgtcctaagctttattccaccaaaatcctcaaatttggtgtaatattattttccagttcaccttataaacttataaaagctatagctttggccaggcacggtggctcacacctgtatcctaacactttgggaggccaaggcaggcagatcacaaggtcaggaatttgagaccagcctgaccaatatggtgaaaccctgtctgtactaaaaatacaaaaattagcagggcgtggtggcgggtgcctgtagtcccagctactagggaggctgagacaggagaatggcgtgaacccggaaggtggaggttgcagtgagccgagattgcgccactgtactccagcctaggtgacagagggagactctgtctccaaaaaaaaaaaaaagaaagaaagaaaagctatagcttcatttatgtgcatgggtatgtgtatacacaaatctaagattagctgttatcacattaaatcttaataaacaatactgaaatgtatttgtattgtaattatgctgaaaggaaactgagyccaagatatgctaattgatttctccccaggctttgtatttagaatgtggcagagttgggactcaaacacaggttgtcgactataaaactgatgttttrttcttgggccaataagacatatttctcaagaagttagtttttaataaatgtccaacaatgatagactggattaagaaaatgtggcacatatacaccatggaaaactatgcagacacaaaaaatgatgagttcatgtcctttgcagggacatggatgaagctagaaaccatcattctcagtaaactatcgcaaggacaaaaaaccaaacaccacatgttctcactcataggagagaattgaacaatgagaacacatggacacaggaaggggaacatcacacactggggcctgttgtgggtgaggggaggggggagggatagcatttrgagatatacctaatgttaaatgacgagttgctgggttcagcacaccaacatagcacatgtatacatatgtaactaacctgcacgttgtgcacatgtaccctaaaactttaaagtataataaaaaaaagagaaataataatctaaaagtgggaatttgggactttggaactttctgacaagcatgacttccaacagatttgcattctgagttttaaacataaataatgagaaacattatttgatcaagggtttttgtgccatgtttagaggccagaaacctcctggtagatggagtgagggtatgaaatgtctggaaaatattaacagtttgtgcagaatacaagagaataattgaattcatgtctgcctttgacagtattttgcatgtggtttctgcacttaataattctacaatttatataagaaatatttccagtaacttattcatatgccagatatctcctgtagactgtgtcaagtaataaaagggtaaaaaagaacattgtctccacctacatggatcatattgccttctgatgaatctaatgttaaatgaagtatagatttctataagaacataaaaaagaggatccaatctagtcttagtattgtggaactcttccctgagaaagtgatgttagcgtcatagtatgatgctggtataaagatagacatagaaatgaagcagaaatagagccaaacatawatgatcaatttatttttgacagcaattmcaagattatttaaaaagaaaagaaaatcattttgactaaawgatgcttgaacaatatctgtatatgaaaaaaatgtactgcacattactccatatacaaaaattaatacaaagtaagcataatcataaacataaatctctaacttcaaatatctggaagaaagcataaaggaaaatctgtttaacattgtagtagccattttttgctaggacaaaaattattaaccatagaagatgaataaaacaaaacagtgacatttctctttatgctcatcaaaattcctaaaatgtaaaaagaatcaaaatatcaaaataccaagtgtgactgaggatgcagaataactataatgctcatacattgctggtggaattcaaaatggtaaaataactttggtcaacagtttgttaatttcttatgaagttagaaacatacttaacaacagaacatagtttttcttctagttatttacccaagagaaataaaaacatacaatacaaaatagttgtacaataatgccataacaactttatttattatagcaaatgaaataaacaaaccaaatgccagtcacaaagataatgaattaacaaattgcagtatatgtataaaatgtartacttctcagcaataaataaaataaactactggtacatgcagcaacatacgtgaagcttacacatgtaatgccatgtgaaacatcacacaaaaaattacataccatagaattccatttatatacaactatagaaaatatacatctaatctgtggtgctctatagcagatctgtggatgcctgatacctggggtgggaaggatcttgactgataataggcttaaggaaaccagttgwcataaatagaacactgatgtaacaatactagaattcacattcctttctagtgtacctaaagcatatgatatttgattatacgtcataaacaaagcatccacaaatataaaatgttttaaatcattcagagcttattctttaatcacaatagtattttaggttagaaatcaatagtaaaaggaagactagtaagtcctcatttactagaaaaatttttaaagactcgtttaatacgtgagttaactaaaaaatcagtgaaaacatattgaaatcattctccctgagttagagtatgattcaaaaataccttgtatgctcacttgtatactggcatttctgtctagtggaataatacagaacaaaaattaaaaaaaatgaaaaagtaaagatacaactgtctttattcatagatgatatgctttcatacatagaaaatctaaaagactatagaaaaatatataaggattattaaaaattgaattgaacaatgtctgtatgtgcaagtcaaagctgtaaccataggagaatatgctgagcttcattagtaattaatgagatgccaattaaacctcaatataatatctctacatacttgcaaaaatgcctaatgtgaaaaatatgggaaaaaaaatgtagatgaagatgtgtgacaattggaagactcaagcctgtaatcccagcactttgggaggccaaggcaggcggatcacctaaggttgggagttcaagacgagcctgaccaacatggagaaaccctgtctctactaaaaatacaaaattagccaggtgtggtggcacatgcctgtaatcccagctacttggwaggctgaggcaggagaatcgcttgaacccgggaggcagaggttgcagtgagccaaaattgaaccattgcactccagcctgggcaacaagagtgaaactccatctcaaaaaaaaaaaaaaaaattggaacactcatatattgttgctagaaatataaatttgcagaagcactttggaaatccctggaattatccaataaaactgaatatatgcattttcataattccacagtggcactctcaggtacatacttgataaaattgtatacatttgttcaccaaaagacacatactagaatattcataagttcctatttattttatatttatatattttaagtagctccaaactacctaaaagcctattaatagtagaatggataaactgtgatatttatatgtaattaagcattcaagaatgagaaataattgatcttataaatgtgatttgattgaaagaaaacagttatgcaggttaccaattgaaaaatttcacayatatgttatatatttaacatgtatgtaatctattatatatttagtatctattatatattatataatacatctagcatacattacatattaatatataagatgtctgattatatatcctatcacatatttgatatatatgtgtcattttatatattatgtgtatacatacatatatataaaggggaagcatttatatgaaaggaatcagatggcttaagaagtgataagtgaggaaaatagttttagggataatagataaccttttaataagtctggctatgttttaagatatggttttataaacacttatatactacagtgaaaaagtcagtagaaaggaatagaataaagatatattacaagaagagccaagtgcagtgacttatgcctgtaatcccagcactttgggaggccaaggaaggcggatgacctgaggtcaggagttggggactgacctagccaatatggtgaaaacccgtctctactaaaaacagaaaaattagccaggcatggtggcatgcacctgtaatgccagctacttggggagctgaggcatgagaattgcttgaactcaggaggtggaagttgcagtaagctgagatcacaccaatgcactccagtctggacaacagagcgagaccccttctcaaaaaaaagaaaagatatattagaagaaagaagttattaaatgtgcaaagtctgcaagaaggtagagaggaagagaaccagataattttcattttaatagaaatggataagaatgaaagatagaagttggggacagtttcatttttactgtttcgattttattgttgttgtctgtttgcttatttcatatttgttgtaagtgaagtaatctgcagaacaagtgggaatatgaggggctagaggtttgatgaaagtggaagtttagactagtgtttgggtagaatggatacaagaattagctaaaaacacacagatgcattttctgttagtttcaggttggggaccattaatttatctagaaactaatttgttcagtgagggtgttgtggtttggctttgtgtccctacccaaaactcatcttgaattgtagtaatccccatgtgtcatgggagggacccagtgggaggtaattgaatcatggggcaggtttttcccatgatgttctcatgatggtgaataagtctcacaggatctgatggttttataacagggcagttcctctgcacacactctcttgyctgccaccatgtaagacatgactttgttccttcttgccttgattgccatgtaagacatgattgtgaggcctccctagccctgtgaaactgtgagtcaattaaacctctttccttwwtaaattacccagtctcaggtatgtctttattagcagcgtgagaacaaactaatacaaggggattctctaaaaatggtagacagtcacctgttggctcagtgttagggaaatggataattttgttctgcaagacatctgtagtagagagagaagtgagctaagaaatattaaatattgccaaatattatcaaaatggtagaatgatcgagattgaaagagttgaaaattataggtacgtgraaatatctgtggtctggaagctctgcatgggttgtaaaactaatgtcatttggtcttttagtttcacgcagcctagttgttccttgcttatggtcaagaaagacataagtgtaggatcaaggatggaggctggtgctttgttactcttagctcatagatcctgaagcataatcaagatgcagggtttaatattattatacagcccgctatggagagggcagatctcagtgtcctgattgatggtgctgagaagaggaagctaaggttgaaacactggtgttgagagaaccatgccatacctaacccactcttgctggctctacatgggaaagaatatactaatttttctgaatctgtttaattagggctgtaatattttggaaaattggttcttcagctaagcatttgccttaagtcaacatggttgaaggatagctaaatattaggattattaccaatatgtatatttttataataggtcattttaaataaaagtaaaaggaattctgagtagccacctgaattggcattgtttgtgattatttctttttacgggatataaaatgtttctggcctagagtatctccttcagaaaaaaattagctttaggaaaaaaagcatcttatagatgctttttgacaggacaagattataactgaataaatgtcatatttccttttatgtatggccctttctgtagtgttacatttacttttcttttagttatttcatgcattgatttctcccctttcaacttaagttgttgtcttttgttgtcacattctaacggaacattgacaaaggacaaatctactgtgccaattatatcagtggcccattggaatgattcttcatatccaaagaatgaactaccttctcaatttaattagaagcttgacaatttcaatttggagatgcaacaccactttgcctggatttaacaaagctccttatctgatttgcctgtgaagccaccctggctgtttagcatttttgaatgcatctgaaaagggagaatgctctcaatgccaaccgttcttttaaaaatctgttcagaaacaaaagaatgtattaagccagtattgggataaaattagctcttaaaagagacattcagagtagatcataaaaacattgaataagttaatgcattttggttacagaaaatatatttaagcatttactgtggcataaaactactaccattaggtcaatcttgaggtgcaaatggcacctataagttaaaaagactacaaatatccttaagtctttttagaaatagtttatgctgtcagttgtaatctgccattacatatacatatgccctttgacattgcctatgctaacttcatttccaaatagtttaactgattacttttgatatggttaggctttgtgtccccacccaaatctcatcttcaattgtaatccccaagtgtgagggagcgacctgtaattccccacatattgagggagggaggtgactggatcatggaggcagtttcccccatgctgttctcgtgatagtgagttctcatgagatcgatggttttataaggcagttttccctgcttttgtttgctgtctctctcctgttgccatgtaagatgtgtctgcttccccttctgccatgattgtaagtttcytgaggcctccctgccagacatgcagaactgtgagtcaattaaacctctttcctttataaataacccagtctcgggtagtatctttrtagtagtgtgtaaatgaacgaatacaactttaaaaataactacattgagaagaaactctggagtcctaggatcaaatyctgttatttttgcaaaaccaagcaaacaaattgacttaattttattggagaataagaaaaaaaagtttggttaatcaggattgtatttatactgacacatttaaaagatttaaagataaatgttatgtacttccatgtcctagaacctataatgtgatttgtttatggttcttctttgccttattgatatgtgtattgagacccagrttttaaaatttaaaaatgttttgttatgaaakagtcttaatctaaatgtctttaaatggtttggggcctataagggtgactgagtacttctatttgctcttccaaagaaacacaacttggaaattagtatataaattttcaaaccacaatcctaacaaaatgcattggcaaataagatactctattgctcctggtagcaacatgcattacaaaaataagagcaagcttcttaaaagcagagttgctggctagtcaactttaaaattttagacactctgttaaggttagtataatttatttaactatttgatatcgaaaaataatcacatattggaagtaggatattcttggaggcaggtttatgtaatgagaaaaaacgcaaggtagaaccagacttacttggttccagttccagccctactatctaatatctgtgttactttgagcaagtcaccagaccttccagttcctttgtttcttcatccataaaatgaagataataagagtacttacctcatagggttgctatgagttactttatgtcaactgcatactacagcatataatagatattagcaattattttaagctcttctgacacttggaaccaaactcttgacatttgtctttcaaaaattgcttttgtgcaggaccaacatccaacaggggtctttgaattcaggtacaccttgagactcaagatcataggctacatttggtaccaatttaccaaaaaggttactggacagaccatatatctttccaagcagcatcaggtttttctctcagcaggagtctcagaagaagcagttggcatggcagttcacactgccctgtgattgggaagctgctttcccaggtgacagaccaggtgcaagaaagtgagatccacaccagtggaagtgaggttcacgtaggcttagaatcctcatgtaaggcgtatgtctggtaacagtcttgaatccaaactatagggagttagactagtgtcctacgagtagaaagcattctagtgttttgacacaatctctgtgagaaacttccaaaagcaagagaaggaatatgtaccatgtctttttgaatattcctcttagctatcactaattacaatagggttttggcaagggtttgctagcagacattccaaattgacatagttgtcaaggatttataggtatttagtgtttttgagaaaagatccaggtattctatacaaactacttacatggacgaaatgttaacattttatgaggaaacagaaaatgtattttattgttgctaaactccacctttttgtagtaaatggctattgatatgtttttaagagcaagtcctttatccgtaaacatttgtagaattggtccaatttgtaccgttgttaaactgaaaccatataataccacaaagcacagaagagacactataataaaagtaagatttatacaggataatatttaacaggattctatttaaattggcgtattagggttatttgcaaaacacattacataattagcataagagttaattgaacataatcacttatccatctagatacaaaaaaatgaggcagaacttattgatttatgtttkggcrtagacaatattgagcagcttattgtgacattaatagactatcaggctcagttatttttatttttattatttatttatttttttatrtggggtttcactgtcacccaggctgcggtgcagtgacgccatcttggctcactgcaacctttgcctcctgggctcaagtgatcctccctcctcagcctcctgagtagctggggcaacgggcacatgccaccatgcccacgcttggcaataattaacaaaacctcctggaataatagctcttttttctcttttttccctacagttggacagtgtcacatccctgatccaagcagccaaaaatttaatgaatgctgtagtgcaaacagtgaaaatgtcttacattgcctcaaccaagatcatccgaatccagagtcctgctgggccccggcacccagttgtgatgtggagaatgaaggctcctgcaaaaaaacccttgattaaaagagagaagccagaggaaacgtgtgcagctgtcagacgaggctcagcaaagaaaaaaatccatccattgcaagtcatgagtgaatttagaggaagacaaatctactgaaaccactattctacatatagtgcctatatgacaaaatcctgcctaaccacactgctttattttacacttaagaagttctgtaatttcactaagttttggtgtttaactcacaaataacataaaatattgggcgctaaatcaacaaaagcaatatatatttgggatcatatcactgtcatttctgtatggtcagcacctaatagttaaggaatatttgcttgttgaatgaatgaaattatcacgtgtcattcagcgtttcccatcatagagattatctactattcgttaccaaataaacacaggagaggccagagagtcctgtttatctgtaatacttcatgtacacttatcatccttatcttgaattaaaacactaacatgagctcctaacttggttttttaatagaaacaaaagacttttataaaatattttcccatttaatctccatgctttctttatctgatctaacctggcacctaaccaggcagaaatgtatgattcctgccatagcaaaaaaaccaccttttaatctctagatagctgtactcattgtcaacttattaggctaatatccattataaactaatcaaatttgaatagttaggctacttgctggattttgaaggtcaaccttgtttattaataaaatgctttcttaacattataaaggttacaatgagttctgatgccacatactcaccttttgggtttccaatgtgttagagagttctgtacttttgagtgttaggcctatccgaatacatatgtgaaagaagagttatcacccattgggaaaatgagacaacaaactatatcccaaagtgagttatattaataataacagaagtgtaagttctgtatgaccctatttttacaaacataaaaatacatttttatcagcttgcaattgtaattaaaaggaaaatggcagtttgaaaaatcttttgacgttgagtaaaatataactgcatgaactgtaccattgaactatgaagcagttaatggcaatgaagctggagtgattttaataacgttcttttaaataaaagtcactggggtcattttacaactccagtcactgtgttcattcctagttgagttcataatggacttcataatagtcttagagtctagtgtacctctctctgtcattctctctctctttttctctcccctgatgacctgcctctctctgtctttcaaaaatgtccttaacagaaactctttggaggccataagttttgttttcattttttctcattcatagagttctgattcacagactttaaaaaacattttctattctacattatcataatagtattatattgtacctttttacttctaaaacattgccattgatgagaggcgtctcagcaacgatgtaaccttagattgatgagaaaaaaatttacacatacaataccagttgatattaggagaaccagtttgggtaaaaggatgcatgaaacatagaaaagcataaagattgacagtacgatatgtgtggaatcttaagcataatggtatgggaaaagaaggatctatttaataggtcattattaattatgcaggaaatgttaaatttcttgtaatgaattatttcaatcttccaagtagctggattgcctgagctcagtgtaaaacttcctaggaggtgaaggcaataaactcctccctgttttgcaccatagactggcctacaataactattctgaacagaatgcactgcccagaagaaaaggcagtgaagaagggaattagggaattcagatgactctgtttttcagaattatctagatgattgaggcaaatagagattttcttttattgaaatgctgccatcattttctgctctaagtgtagatgttgcacgagtgacatctgtggtatatccttcttccagatagaagtataaatttataatttagtggggagaggaattttcttttaatcaccaaactaccagctgtatagaaaatttttttgaaatcaccaaactagcagttgtgtatcttagctcctaaagccacattcacaagaatcataagcatctcatttagaaaatctaatgtccaccggacccaacatcatctttccacatgttggagtttagaacatgcagtattggacaccaaaagaacagaaataacttgaaattatacaattaccaaataacctccatctctttgataaaaatgactttttacccaaagtgagatgtgaacaagttctcctctttaacccaggcagattttcagcttagctcaaagcaaactataattaaataaaacaataaaaattttaactcaatgaatatcctaggagttaatctgctgtggtaatcnatagtgacataaaaacaagatgcatagagctgaaaaaggcatctgtccacctgagtgaattcctgtagtaggcagcatttcaagatttagtttgattcaaacctgctgataaaacaaatgcttatatgcaagaaaaactagcagcaagatatgaataaatctccccattatgtagttaaaaactaatcagcatgacacatttatatttaggtatttcttctgcagaggattgccagaaatttcttaatgagagtgataatttggtgatccacctatgtaccttttgatgtctcatcacagagattagtgcttcctctgataatacatttgcttgatcctgctaataagaactcacctttctttttaacgaaatcaatttgtgttaatttacatagggaaaaacgttccttgagagggaggagaggggtgtttaccacccacaggagcagttccatccctggttacccaccagtatccctgccagatgttagactggaattagaatgaaaatttaaaaaaaaacgaaataataatccactaaatggccttctaattagagaaatttgaagatttctatcaaatataaaaagtgagaaatagaaatcattccctttaatttatgacaaattaaaattattgaagtaaaatgtttctaagtcagtttctggatagttcttgaatgagtcaagaaaaaactcaaacactaaatttctaagctaatttgttcattattcctttctgtttattatttattatatgagtgcaaattgcaaatgtattagaaaagacaatatagccttcacattcacaagtgtgccttctggcctttgaaatcttttaacataagatcaatataacatatttgttccccataaaaatctcttatgtacagggaataaggtcctccatagctacacagagacacccattcttgcagtctggcattcttaacacctttagcttcaaaggcagtcggtttcaatttcaagctaaaattgtgaatatacaattaagtgcgcaacttgggccttcagaccaaataattaatgctcctcaaattaaataatgagtggctgaaaagcctaatgtgtaacaacagagtaagtgacttcaacggcttcctgaaccttcattttgagggtgttctcatctcacccacctctgggctaggtatcctctgttaattgctaacaatttcctaccaaaatagtgcaatcaggactgcccatcacagcaaattactccaattaatgccctttcctcttctgtgaaccaaaaatatctctctcctgtctctcatctctatcccaggtataaattgactaataaattttacagagttttagtcaaaattatgaattttaatttccagcaacattattcctttagtctttctattccccaaaacattcttaaattttggtatcaaatgttcatttctgtcctagagattgtggttcccatggctacagatttttgtatagtggtagtatgagtggaataagatctgagacttttcctggtgatatccaccattctcttgtgaactcattgcagaataaacagcctctttcactttcattgtaagtagttctttaggttggcaaagcaggcaccagaatctgaatttgaatgaaatctgtactttcttttgttggcctattttttgccaagacagcctgcctattgtatatttaggaatcaaatattcattttttctgtttgtaaagccagaaatatttcagttaaaaagaatataattttatattattttaataattctttttaagtaaagtaggaaaatttctgccacctgagatgttactgtttttatttatatgaaaattccatttttttctttatgactcttttcccataccattatgatatgttcagcattagtattttccattttaccactaaacaaataagccaggactaataacaatagcagtttgagagtttttattttggcattttggttttaattaggaaagaaaacatggatgctattaaaactagttgtagttaaaaatgttttgaatgaggctactaacgctatcttagtcatctcaaagagaaagagaagaagtaaaattttaaatacctttttggcatttttaaccaattcatatgaacaaaaacatatattctattaaagcaaaataaagaatagtttaaaacactagtcttcttgcatgtgaatattttccccctaacagacaagatagaatccatttctggacactctaaaagaaagtaatgttaattgagagagctgtctccaaatggaactcaacctgaccagaatcccatccgcaggcaagagatgggctgtggggccgaccataagttttattctgagacgagatgctttatggctgctggctgcattatggcatctagcagtccccactggtttgtgggaacaaaacacatggattgatattcaatatgagtttggtaagttggagaaaaatggagacgatacggagtagtctaaaggcacaacaaataagaaggtgccagaggtagggaagggtctgagaggggtagttgcagaagcatttagctttcatagatgaggggagagttttttggttttatgaagattaggcagccctcctgaggaaagtattaaggatagaatgagacacttgtcttggtggtttggtgaagtcgtgtcgaaggcaaaaggatgaactacacatattttgagcatgatttagtaatattgtttgcaagttgagaaacagaaattcagccattctcctgactgatggtaggtgaaattcttcccaatattagagccaatctgggttaccatacgttcatatatttaacagctatttgttaaacaactgtgatgttccaggcactgttctaggttcttaggatacaccatataacaaaacaaatagtgatccttgccctcatgtgccagctctgtgttaaatgctaactattatcttattcaatcctccaaataaccctataggatatatatcattccacagacaaggaagctgagggttaaatgggataagaatcttgctcaaagtctcactggctttaaaatattaatatatattttacatcattcaagacagatatataattagctgaatattctcacctctattaactgaatgtagagtgtcaggtacatgggaagtaagttatttacgtgatctgaaataagaggacaacctttgccaaattacttttattaccatggagaagaaagcttcaatgaaatgcctgtttcagcccatcttcagtattggttggttaataccatttgttaacaccaatcctttcctcttttactgctaacatgtgactgtgtttaaaattatagattgcagcagagtgttggccaaggattattgtagtaggataaagtttccctgtatttgaaatttacccaaactgtagcaaatacatctttccttctttatggaggtcacacgtgtgcatagtatgtgcctgaatacaggtaaactttgtgttttaaaattacatggccttttttagagtcgactgaaggctagactcttcttgcccatgttgctggataggctttcaaatctcaggccttggagagttaaatgactttctgatatttcttacggtggagccacataagaaatacacacattcctagtttgagcaatggatgtgtatattggggatcttcacttttatgtatctggtagtcatgatggtgcctattcccaactgtaggaaaggaaagccctcaaggagaaaattctctttcaaaaaggctcagatttctaacaattatgtctaaatgtttcttcaatttagaacatgtacaaaagctacttaatattagcagagtagttcttgtgttttcatttcaaatgaaatattcccagttccaaagtttatttccttggcattttcaagaaggatggttatttttagttctggttatttggtgttggaggtctgtgacacttccttatacatttaaagccccctttgaatagttg

SEQ ID NO: 6941 - DNA, 12198 bp, Homo sapiens
cttaaacccaggaggcggtgagccaagatcccgccattgcactccagcctgggcaacaagagcgaaactccatctcaaaagaaaagaaaaaaaaaagtaaaaacaacacctaggaggtgttactattcttactttatagatcagaaatatgctttcaataattcttgtttatttatttatttttgagacggaatctcgctctgtcaccctggagtgcagtggcacgatcttggcttactgaaacctatacctctagggttcaagcgattctcctgcctcagccttccaagtacctgggactacaggtgtgtgccaccatgcctggctaatttttggtatttttagtagagatgggtttcatcatgttagccaggatggtctggatctcttgaccttgtgatccgcccaccttggcctcccaaagtgctgggattacaagcgcttgtaatcccaccacgcctggcctatttttttaaacatttgaaagtacaacacacagaaagtataactttaaggtggcataaaaactaggtgttagaatttttatctcaaccaccaagccaagctgacatttagaacaaataactggccttgtatctgaaaacagagaatactgaagtgtttgatatttccattatccctagtttgctgcaacatgttacttttcatttgatagaggtcaaaaataaaattcaattgatacaatgatttaaggatgctaaaacctgggctgtattgtttaaaaacaaaatttataacgtgaataaagaaaaaaaatatgttactagaataaagcaatgagatcatgctaccactgctccatcttcagaaatttatagttgtgaaaatcagccactgtcttgttttaaaccaggtttaatgactatgtagtagtcatcatcaagagtctgcattctatagctcaggctctcccctagccatacttggagatttaggagagtcaaagagacagataaaattttgacaaagacaatgcaatctaacgaaagtcgccttgacctaaatcagcaaacagcaaatgcttcatcattcattgtagttttacctcttgaggaagttctagtttagaacggtcagttccttcttttgactgaaggcccatcagataagggacaggagcatcaagaaaatgtagcagagaagcaggtagaatgggcacataaacatgttgccattgaaatgggaacaaaagtgtggtgatgccttctgccacagtcatcaggcgttgataatctgcacagaacaaggaaaaaggaaagggaagagtccaagtaaaaacacaatcacttcattaagctggaaaatgtggatcttaagaaaaaaatttctgcgttaaaagtaaatatttctttatgatcatacagaaaataggtcagttctattccactataattaaagaattaaatggtttcatttgaatagttttaagggggtgtgggtaggtgggaaacatcacactctttgcttcttaaaatcatgggtagacgaacttatattctcttaaagtgtggaggaatcaagaactaataaaactgctcttggcatttatcccactaaaaatgtacaagatacagtgtaacattgttattatttttgagatggagtctcgctttgttgcccaagctggagtgcaatggtgcgatcttggcgcactgcaacctccacatctcggattcaagcgattctcctgcctcagcctcccaagtagctgagattacaggcgcccaccaccacaccaggctaatttttgtatttttcgtagagatggggattctccatgttggccagggtgatcttgaactcttgacctcaagcaatccgcctacctcggcctcccaaagtgctgggattacaggcgtgaaccaccgcaccaggccagtgtaacatttttgatcatttttttatacatgaatgcttacacaattcccatttttcttttttcttttgttttgagacagtctggccccgtcgcccaggctggagtgcagtggcatgatctcggctcactgcaacctccatcagaggcttttttcttacacagtatatatgactgtggctatagctttggttagctgattatatttattttagcctttattttgggggtacaagaagtcaaacagatacatgcattcatagttacactttctatgtctaacccctagccacaaaactatcatatctgggtattctcgagttaacagaaaattaaggattagtgtttttgttatgttttatttacatgaactcactagtttatcaaaattaaaagctccccacaatagtaaagcagccttttaaaccactctgcaaaggctgctttatacttacatatgtccacaagtccgatttaaatgtttggaagtagatatgctttagaattcagattttttaatttagaaaagcagtatggtgcatataccacatatatgaactatctagggcagtatcctataattaaatacattaatatttctgcagcaaaccatatatgtcccagtaggacagataatcaaagaatatgaatagggtcactttggttcaggtctggttttgctgatgaatgagttacaaaaagaatgtttggttttcagaattttttggatttgtagaattgaggataatggattgtgggcttgtaataatcctttcacagaacccactgtgaacaaacacagtaaaatctttgggaggaagaatttaggggagtctttttaaaaaggttaagaaaatgatcagatgttacttgagtcacatcaactcaaagacctgaccaagcataaacaggatgttttccatttaaattttttgtgtcattttataattttaaatgactacctttttggtaatgaatcatcagttatccacagcccaagtttacttaaaattttccttatttgattcataaagattcaaattttaggtgaaaatctgtttataggaataacttctagaacaaacaccaggtggcctaaaaggtaggggtcagtcatacgagcacaaagagctaacctaattacctggggtggatacacacattttacagccaaggcccactgaagaagctaggctgagacagctggtactctctgtgcaggtgaggcgggtagtagaggagatcagaaaatcagttcctaccactctgctaggataatcaggcagatgtttgaactgtaggcaatatgggtcttttatcccaggggcgggggcggggtgaggatgaaaagctgacctgaaacccctgaggtcggctggatggcccctagaagtagaaactgtgccctaatcagaactaattgaagttctgcactatcacaggactccattatggcacttggcccccgtactgtctctcctctctgtgggtttcctaaggacagagtggcatccactttctctgattttacccataaagcatagggcccacttcacacccagtgctgactaaaatttactgataactactaaatgttatgttttttttcctcttaagttcaacagaatcctaacaaaatacaaaaaaaggccgggcaggcacagtggcttatgcctgtgatcccagtactttgggagaccgaggtgggtggattacctgaggtcagaagttagaggccagtctggccaacatggtgaaaccccatttctactaaaaatacaaaaattagcagggcatggtggcaggcacctgtaatcccagttacttgggaggctaaggcaggagaattgcttgaacccaggaggcggaggttgcagtgagccgggattgcactactgcactccagcctgggcaacagtgagactccgtctcagaaaaaaaaacaaaaaacaaaaagccaagcacagtggctcaagacctgcaatcccagcactttgggaggccaaggcaggagaatcacctgaggccaggagttcaagactagcccgcccatcatggcaaaaccctgtctctagtaaaaatataaaaattaggcatagtggcacatgcctgtaatctcagctacttgggaggctgaggtacaagaatcacttgaacccaggaggcagaggttgcagtgagctgcgatcgtaccactgcactccaggcctgggtgacagagtgagattctgtctcaaaaaaacaaaaaacaaacaaacaaaaaacccaacaacaacaacaaaaactcaccaggagtaggcagagacagtaatttacagttatagactatgaagaccaaatccagagaaatctccttagattctgctctgtggccatcatttcaaccaaggattggggccttttatattcttgtaacctcagtatctaccacagtatctgacatataatagaggctaaaacaatatttttgaacgaatagatgatgatgggataagaatatatataattttgctagatatctataacttaaaaagacatgcttagattttattccatccatgtgttgtgagtgttctatgtctattcttctttccagttctgtattctcttcaagactggttgaagtaccacacacattattaattttttttttgagatcgagttttcactcttgctgcccaggctggagcgcaatggctcaatcttggatcactgcaacctccacttcctgggttcaagcgattctcctgcctcactcagcctcctgagtagctgggattacaggcacacgccaccacacctggctaatttttttggatttttagtagagatggggtttcaccatgttggccgggctggtctcgaactcctgacctcaggtgatccacacgcctttgcctcccaaagtgctaagattacaggcgtgagccactgtgcccagcccacacgctttttaataatgcaattactcagcagaaataagacaattctttttaactgaatcaagaaataaaaggcagagttttcttctttaagcattttttttaaacttaaatattttaggaaagtctttttataattgatactcaaagtgatgaatgtataaaagaagttattttaatatttaagacaggcctcagcaaggcacatgaggctcttcatgatttggcccttgtctgcctcattccttatcatcactccatatgcagtaagaccacttgcttgcagtccatgttttcacaggccttgtgccccttgtatattgttttcctctgcccagaatgtcccttcctcttgcactgcctgactaggttccactttttcctcaggcaattgcttctttggaaagccttccctaacacttcttattatcaccagagtactatctacatgcttcaacagtaccctatctttatttccatcccaggaattattcatctcactgaaacattacaattctatcataattctctcttcatggtctctcttccccaataccccatcatctcctagagagcaatatatgtatttttctttttatttatttatttttggagacagggtctcactctctcgtccaggctggagtgcagtggtgcgatcttggttcactgcagcctctgcctcccaggttcaagtgattctcatgcctcagcctcccgagtagcttggattacagctgtgcaccaccacgcctggctaattttttgtgttttttgtagaaaggggtttcgccatgttggccaggctggtcttgaactcctgacctcaagtgatctgcctgcctgcctccgcctcccaaagtgctgagattacaggcatgagccactgtgcctggacatatctgtatttctaatctcagaattgttaacattcaacatatgacctactacatgatgagtagccagtaaacgtgctttgagaaattaatatgttaacatctaaggcatgtaaaatgaaataaaagtagacattaaaaaattatgcttgactatattatacaataaaaacatactgtcaaaaatgtgcctagtgatggctctggcacagatcccaaggtggcaatggcctctgctgcctcagcccctgccatgctgtccaccagcatcactgtggagaataaggtcagcycctcaagggcaacagaggggtctaggtctggacctgtggctggcggcacaggagccatggtggtgcagaccagragctgtgtctagcaaggcttatgccctgccaagcactgccaatggagatgtgaagctgctggtggtatccagcaygcctctggtggacttcctgatgtagctggaggattatacacctatgatcctggatgctgtgactgattattttttatttttgagatggaatctcgctctgttgcccaggctggagtgcagtggcatgaacttggctcactgcaacctccgcctcctgagttcaagtggttctcctgcctcagcctccccagcagctgggattacaggtgcacaccaccatgcctggctaatttttgtatttttgtagagacggggtttcactatgttggccaggctagtctcaaactcccgacctcaagtaatccacctgtctcagccttctaaatgcagggattacaggcgtgagccatgcgcctggcccaatgtgactgagcattatctgaattatgttggctttgaggtctcagacacatgcataatttggcttatctccctagtttcacagaaattcatctcaggtattgccaacaatgacctacggcactagaaaatgaaaggcacagcctctggcagctcctgaagtaagagcaaagactaatcatggagtacttgacccctgtcctcagtatgacatcaatgtggagccaccacaccacctaagccacccaacctaaacatgtttgtctgtaacaagcttcactgtgaccaaaaaatgtcaaagaaagggctaattgtagattaaacacaggtaaagagagaattcataaagcaggagacagatgtggagaaattacccagaatgcagcacagagacacacagaaaattggaatgaggctgggtgtggtggctcacgcctgtaagcactttgggaggccaaggcgggcggatcacaaggtcaagagatcgagaccatcctggccaacatggtgaaaccccgtctctactaaaaacacaaaaattagttggtcatggtggtgcacacctgtggtcccagctactcgggaggctgaagtaggagaaccacttgaacccaggaggcagagtttgcagtgagacaagattgcaacactgcactccagcctggcaacagagtgagactccatctccaaaaaaaaaagggttgagagataatggaagattgagcaagacagattaacatgtttaaggctggacacagtggctcatgcctgtaatcccagcactttgggaggccacggcgcgtggatcacttgaggttaggagttcgagaccagcctgaccaacatggtgaaaccccgtctctactaaaaatacaaaaattagctgggcatggtggcatgcgcctgtagtcccagctactcaggaggctgagacaggagaattgcttgaacccaggaggcggaggttacagtgagcagagtttgcaccactgtactccatcctgggcaataaagtgagactctgtctcaaaaacaaaacaacaacaacaacaaaaaaaagtttcactagaatttcaggaggattaaaaaaagatacatgaatgcaatatttacaaagatagttgagaattttccaaaatgggtaaaggacattaattcttaaatttcaggaaacataatgaaccacaagcagaacaaataaagcctcattcagataaatcagtcaaaatatcacacaccaaagacagaaaatcttaaatataaccagagttgaaaagacagatttctggctaatgagtaacaatgagagtcattcattagaatgacattagaggtgatggctgacttctcaacagcaatacaggaaaccagaagatgatagaatattatcctcagagttctaagagaaaaaaacttttaacatataatttaacatccaatgaactatttaagatgatagaatattatcctcagagtactaaggaaaaaaaaaaaacttttaacatagaatttaacatccaatgaactatttttcaaaaacaaggacaaaataagatctaatagagaaagctatctcaggaaaggaacttctaagaacacatgttaggaagaagactgatctcaaaagaaatctctaagatatgaaataaaatgtgaattttcaaaaaataataactgaggctgggtgcagtggctcacacctataatcccagcactttgggaggctgaggcagaggactgcttgagcccaggacttcacgaccagcctggacaagacagtgagacccccatctctacaaaaagaaaaaaaaaaagtaagaaaaaaattagcccagcatggtggcgtgtgcctgtagtcccagctatcaggaggctgaggcagtaggattgcttgagcccaggagttcagtcgcatcactgcactccagcctaggcaacagagtgagaccttatttcaaagaaaaacaaaataaggtcactatgagtaaatttaaacaaaaccaagtgtatagaataaaaatgtctaatttgagggattattaaaactgaacaatcataacaagtaagccacaatgggcatggagttaaagcattttatagttatctgtgaagattctataacataagagtaactgttcatgttgaaatctcaaaatttatcattaagaaaaagagcatataacatctaaacagaaaaaactgcaatgagaaaaaaatttaaatcaattcaaaacatcaaaaacagagagagagagaaaagcaagacaaatggccaaaataaatgaaattttaaaaattcttagaactagccaggtatgatggctcacacctctaatcccagcactttgagaggccgaggtgaaagaattgcttgagcccaggagttcaagaccagcctgggcaacatacagagaccccacctctaaaaaaaatttaaaaattggccaggtgtggtggcatgcacctgtagtcccagctacaagggaggttgaggtgggaagatggcctgaccctgagaagttgaggctgccataagctgtgatcacaccactgcattccagtctgggcaacagagcaagaccctgtctcaaattatttatttatttatttatttttagaattcaatgataatgaaagtatcagatactaagacttgtgggatgtagctaacacaggactcaagtgcttaagatactggttttggtgggcaggtggggagaaagaaaggtttaataagcccaaaaaaagtagtagaaagaagtgaataataaaaacaaaaccataaattaataaaacagaaaacaaaggtacaacagaagataccaatgaaagtaaaatctggttctttaaagagtaatagggctgggcacaatggctcatacctgtgatcccagcactttgggaggccaatgcaggaggatcgcttggacccaggagtttgggactagtctaggcaacacagtgagaccctgtcatttcaaaaaataaaaaaaaaaattagccaggcatggtggcacacacctgtagctccagctacgtgggaggctaaggcaggaggattgcctgagcccagggaggtcaagactgcagtgagcctagatcgtgctactgcactccaggatgagcgacagggtgaggccctgtctcaaaaaaccaaacaaacaaaaggaagtaatataattgacaaacttcaggtaaaaataattgggggaaaaagagaatgcacaaacagtattaggaatgaaaaggaggacaaaactacagatataacaggggtcaagaaaacaaggaaatattaagactttttgctaatatattgaaagcttaataaaaattttcttagagaaaatagcaaggaacaaaaatttattcaagaaaaaaatagaggtggccaggtgcattgcctcaggtctgtaatcccagcacttgggaggccgaggcaggtggatcactggaggtcaggagttcaagaccagcctggccaacgtggtgtaacttgtctctactaaaaatacaaaaattagctagctgtggtggcatgtgcctgtaatcccagctactcgggaggctgaggcaggagaatcacctgaacctggaggcaaaggttgcagtgagccaagatcacgccactgcactccagcctgggtgacagagacagactccatctcaaaaaaaaaaaaaaaagaagaagaagaagaagaagaaatatagaggagcttctggactggcaaatacattaaggtgctgggtaagtccaaggaaagcatagcagttctgcacccacccctacaccttttgcacctctcttccatttggctgtttctgagttgtatcctttataataaaccagttagcaataagtaaagtgctttcttgagttctgtgaatcattctgggaatttatagaacttgaggggttgggggatggtgttggggaacccctgattttgtagtcatccaagaaaaaatgtatgtggcctggtgctacggtttggacatggtttgttggccccaatgttggaggtgaggtgtttgggtcctgggggtggatctctcatgaatggctttgtgccattctcatggttgtgagtgagtagtttttcactcttactttccatgaaaattggttattgaaaagagtctggcatctccctcctctctcttgcttccttcctcttgccatgtgattctggctccccttcacctcctgccatgagtagatgcttcccaaggccctcatcagaagcaggtgctagcacatgcacagaactgtgagccaaataaacctcttttatttttctttgagacagggtctcgctctgtcacgaggctgtagtgcagtgacataataatggctcactgcagcctctaactcctgggctcaggtgatcctcgacctcagcctcccaagtagctgggactacaggcatacactaccatgtctggctttttttttttttttttctttggagatggagtttcccttgttacccaggctggagtgcaatggtgcgatctcggctcactgcagtctctgcctccagggttcaagcgattctcctgcctcagcctcccgagtagctgggattacaggcatgcaccaccacgcctgggtaactctgtatttttagtagagatgaggtttctccatgttggtcaggctggtctcgaactcacaacctcaggtgatccacccacctcggcctcccaaagtgctgggattacaggcgtgatacactgtgcccggccttatttttaatttttttgtagagacggggtttcaccatgttacccaggctggtcttgaactcttgggctcaagagatctgcctgtctcagcttcccagagtgctgggattacaggtgtaagccactgcaccaggccaaacttcttttctttataaattaaccagcctcaggtattttatagtaacacaaataaaccaagacacctgatacctcatttgtggctggcatcagaagtgaggacagtcttgtgagaatgaactcttaaacctgtggagtctgacattcagttaggaatgaattgaactgttgggcatccagttggtatcacaaattgacaggtgttggggaggaaagactctctcacttggtgtcagaaaaactgagatttgttataacagcccaggctcatggaaacctgtggtttgggaagagggacaatgagagggtggggaattaggaacctttaattcctgggtggccactcatgggatggagcagtagctgtgctgagaccatttactgaaggtaaaagtaactaatggaatttagagatgaatccacctcccagggagtgggattcactggatatataaggaaatgcaaaccaacagaaaaaagttaaatataaaatcccttggttattgttctatgtaaaagctaaaatgaaatttaaaagagtgctaggtcaaccttgatgctggaccaagctcagatttctgctggtcagggcgtgacaactagcctcaaagccactcccaacgggaaaaattatgtggaaaccgcctgggcatttcctcaccaacacccttaggtattctgtagtttcttggttttgtggttcccccatgtggagtacctttctggtgaccagagatcttagagacactctttgttgtttccacataattttgt

SEQ ID NO: 6942 - DNA, 152165 bp, Homo sapiens
  misc_feature (1)...(152165): n = A,T,C or G, or insertion/deletion polymorphism (see Tables 1-2)
aactgtctcaaaaaaaaaaaaatcaaaataatgagatagagtatgttaaaatgtctagctcagtgtctggcacacagaaacaatgagttacatatattgaatactttctatgttctagggactgtgctaagcactctacatgtattatctccttcaaacttcacaataacttaattttgatctgcactggacaaataaggaaattaaagctagagtaacattaagcagattgtcttatagatactaaaagaagtgagatttgaacccaggtagtgagagtctggaggttgtcccctttatcagcacaccaaaccaccccaaaacatactggttgaaaaaaaaccaaaattgaataaaatttttgtaagaatttggatcagtccttgtcaatcaaccaaaatgagtagaattttaggaaatgtaaagttttgaaactttacaaaagtttttgaaaatgagtaggatgcaataaaaactggacataaatcttttggctcttttttgtttgtaaatagatttgtgagtacaattttatttatttatttatttatttatttgtttgtttgtttgacagggtcttgctctgttgcccaggctggagtgcagtggcacaatctcagctcatcaaaacctccatctcctgggttcaagcgatcttcccatctcagcctcctaagtagctgggaccaaaggcatacgtcaccatgcccagctaagaggtacaatttatatatattaaaatgtatttgctagccaggcgcggtggctcacgcctgtaatcccagcactttgggaggctgaggcggacagatcacctaaggtcaggagttcgagaccagcctgaccaatacggtgaaaccctgtctctactaaaaatacaaaaattagccgggtgtggtggcgtgcacctgtaatcccagctactcaggaggctgaggcaggagaattgcttgaacccgggaggcaaaggttgcagtgagccgagattgagccactacactcctacctgggtgacagagtgagactccatctcaaaaaaaaaaaaatgtatttgctgtaagagtacattgggttttgacaaatatatctgtctgtgaaagcactaccacaatcaaggtacaacattttcccattgctccggaaagctccctcctgcccttttgcagtcaatttcccaccacatcacctctggccccaggcaaccactgatctgcttcctgcccagtctagaatttcatatgagtagagggatacactatggactcctctgtgcctggcatcttttgcttagcatatttttgacagccatgcaccttgtggcatgtatcagtggttcattcctctttactactaagtagtgttcccttgtatgaggataccaatttaattctccattcatctggtgatggacatttggcttatggattagtcaggagatagaaaccagtaatttgaacacgaaaatttattataattgttagctagtaaaaagtggttaacaacaacaaggggtaaaagagggttctaaggtggctcaaacctgtaatcccagcactttgggagactgaagcaggtggatcgtttgagcccaggggtttgagacccgcctgggcaacagggtgaaaccctgtctctaccaaaaatacaaaaaactagctgggtgtgattgcacatgcctgtgggtggtcccagctctttgggaggctgaggtgggaggattgcttgagccagggaggtggaggctgcagtgagtcgagattgtgccactgccctccagcctgggtgagtgacccgccacccccccaaaaaagagggctgtaagggatcgagaagtagcaaatacgatgaggagaatggactctccaaaatatttaagtcgtgttaaggagaggagaggttatttttctcttttgatgctatgacaatccttgtcaacaccgttcttcaccaccacactccagccacatataaacaaccaagaaagaagggattgattgctaatgtaactatttagagcccaaaacattcattggaccacattttactggtagtcagagtcaccatgtgccaccagcttagcagtgctatcaatctctcattcctccacttccgcagaccgtggcaggactcagctatcccaagcatgccatgccgtccatttgaggctttaccagtaagtcctttggagacagcagatcattgctcagatttttgttcactgagctaatttacttctctgtcattatttcagaggacaatctgcatataatgatacatagctaattcttgagtatcctttcaacttcgtttcattgtagcttaatgcagaatatacttacacagtgtcatcctgaagtgataattaaaaaagtatacggatattttcaaattagtgtttaattttgtaatgtgtgactattttcctaaaagctttaggaaagattttaggaattctatttttatgagattagtatattttaattgcatgcattgtttgttggtgattcaatttttttcaccttaaaaatattaatgtggggcttacaaactcataaatcagttactggtcaaatttaaaaaaaaaatgacgtgccttggctagtgcaaacagtaaatcagtttttttactgtgtttgtttgattcgcttggaatctaacaaacattctgtaagaagttaccaccgaagacaggagaaacagatacctggcacttccttccttactaatgaaatgttatgcatttcagtactttctacgtgaggaaaagcaatattgcataagagtaattaaagtgttcacaattaggtccatactctggtttctcttcagatcgtatacgtcttttgtcttttactaaagatttccgtggaagggaacaattctgagtttttgactaagttttgttttgttttgtttgagacggagttttgctctgttgcccaggctggagtgcagtggtgcgatcttggctcactgcaacctctgcctcttgggttcaagccattcttctgtctcagccccccaagtagttgggactacaggcactcaccaccatgccaggctaatttttgtatttttaatagagacagggtttcaccacgttggccagtctggtcttgaactcctgacctcaggtgatctgcccccttcggcctcccaaagtgctgggattacaggcgtgagccaccgtacctggcctgaccaagttttgaggccttgcatatgtggagcttatttttatttttatttattttttaatctttattttattattattttttgagacagagtctcactctgtcacctggagtgcagtggcatgatcttggctcactgcaacctctgcctcccgggttcaagtgattctcgtgcctcagcctcccaagtagagctgggattacaggtgtgcaccaccacacctggctaatttttgtatttttagtacagacggggcttcaccatgtggatcaggctggtctcgaactcccgacctcatgtgatccacctgcctcggcctcccaaagtgctcggattacaggtgtgagccaccatgcccagcccaggacttattttttaaaaaatgttacagatattaaagtttgtatatttttctggtagaatcaacaacctgttatcacctagataactgctcttctttcaacactcaaatataaattgaggggctaaataggaccagagttctgctagataccagaaaagtgaagaaccacagagtccaactcttgctctgtggagtttacaacacagctaagaagacacagaaaagccattacaagtgtttttgaagaagtacagggtgcaacatgacctaaaggtcaattacccagactgtggctcaccctgatttcttgattcttcttgtattttcttttcttttcttattttttttgagacagtcttactctgttgcccaggctggagtgcagtggcgcgatctcggctcactctaatctccgcctcccaggttcaagtgattctcctgcctcagcctcccgagtagctgggaccacacgtgcgtgccaccacactggctaattttttgtatttttagtagagacagggcttcaccatgttggccaagatggtctcggtctcctgacctcgtgatccgcccgccttggcctcccaaagtgctgggattacagacatgagccactgcacccggccaattcttcttatattttactaattattattttattgattttttttttttttttttttttttttagtagagacggagtttcaccatgttggccaggcttgtctcaaactcctgacctcaagtgagcctctcgccttggcctccgaaaggactgggattacaggcttgagccactgcacccggcctcattttatttttatagagacagggtctctcactattttgcccaggttggtcttgaattcctggactcaaatgctcctcctgccttggcctctcaaagtgctgggattacaggcctgagccaccatggccagcctctttcatttcaaaattgaagaaagaaagtgaagatacaagctacattaaatgatggtatgcacgcacatgtatcttctaggaagaacattattcagtcaaataatcgaggttctctcaggcaacctctctggaaggtttgcttgtatgtctagtggtagatgccccaaatccccaaagaagaaagcagggagtggtgtggaaggggttgccatgtggagatgaattgcattcagttttctatcttttaagttttatttttacttacatggccgggcacagtggcttattatgcctgtaatcctagcacatttgggggccaaggcgggaggatcacttgaacccaggagtttgagagcagcctggtcaatacagtgagaccctgtctcttaaaaaattattttttaaataaataaatgttatttttttacttagatggagacagagtctccctctattgcccaggctggtcttgaactcctggtctcatgtgatcttcctacctgggcttcccaaagtgttgagtaaattacaggtgtgagccactgagcccagccagttttctttcaaaggaaaaagaactggttgtcgagttccttccgagaaggcaaaagacagctgagcagggcaagaaagccgtgcctttgggaggagcagagttcatggtctaattcctgttgctttagcctccgattgttacttgcggggagagccgataacatcggatgggtacagggctgcggaactggagcgccttggctatttacactgacctggaaaatgtcaggataaatgacagaaggcgggggttggtgactgcactccttctagaagtctcaacgctttgtgggtattgagttgtgttttttccccctcacggttgacttgtcactaagtcactaaggatggcctgtaaatggggtgacggctgggggaagggaggaccttaaagtgagacaggcacccccacacaggtcacagtttaaaagacgatggttcagaccgttatgcgaaatgatctcagagcggctgttcaccttccccaaagctgcattaaaagaaataaggatgggtgacaacccctttagaagacagacccccacactgaggctagccctcttatcggctggccagggcgaggaggggtgtgtgcagggtcgccctcgatgccgcagccggggccagtgggcacgaatgcggccccacgccaggcttggcctccgaacccgctaggcgcgcgcgcacggtagaagcgcgcgcctccgtccctcgcgagcgcgccccccacccctctccgtcgcacgcgccgagccccggcgcccccgcccgccccgcgctcccacagcccgagcgccgctcagctgacccgcgggcgccagacgcggcggctctcagctcgcgagcgcagctgcggctgcgagggcctctcaggccgacactccccccgcgcccctcccccacccggccgggctccggacccgccgcgcgcgagcccgcggccgcttcccccgcgccgagcgaggaggcaggctgcggcggcgagaggcggctgcgcggccatgggcgcgccagtgtcgccctagggcgggcgcacagaccacagccggagcggtggtggcagcctccgcagaaagccttcccgggcggcggcggcggcggcccctggagcagcgcggccgggatgagcgggagctgcgcggcgcccggcccgggctcgggctcctccccggccgcctgccgcttcgcgcactacttcgtgctgtgcgggatcgacgcggacagcgggctggagcctgacgagctggcgggtaaggccagggctgcggcggcgctgagccccctcaggggcgcgggggacgctgtggggacgcgcgggaggcggggtgcaggctccagacaaagtcagctcccggtggcgccctcccgccgctttctggccgaactggcgctcgggcgcgatttaatgacattgttatttattccgcgtgcgggctttgcggctgcgcccaccggggctttcgcctccaggcgctgggttattaataacaggcgcgggggtggccccaagggcacggaccccgcctggcgcgccggccccttcgcytgcagccgcactcggaggcggccggtgagtcaccgggcgcgcrggctgccccccgaccgccgtgcctgcctcccacccgccagccacccggccccggccgcgaagtttcggccccgcacgtgacgcggctttcgggcctcttcgggagasggggagtcggactcagctcggctcccgccggggtagcgtccgcggaggagccggtggccgtgcggagcgagcgcggggcggggaccggtcggactctgccctctgcgccgcctgccgctctgcggtgccggccaagtcaccttttggaatcctgtggatttggccgcgtctgggagctggcagggacctttggacgctcgggacccagcaccgcgctttgttgacactgcctacactgttcccgagtttaaattcagttgggtgcaccgtgtgttagtgcctggttttcccggaggggtaccggtccttccgcttgactcatttgatggcgcagtgcggggctgtgctgggcaaacgacgccgttaaaaggggccgctaaagggcgatgggcgggggcagggcagcggagtgcgcagtgtcgagaggaggccggggagaaacaactgatttcatttttcacgcctgttcctttctgcttgcctccgcgggatctgaatcttgatttgttgttgttgttaaatgggtgagagaagtgacatctaccgcctgaactttgtgttaaagacttaggtcatagcctttcagaacaacttcctttggacaaataattccttattgattgcactaacgtaaatttttcgcttttcctttggtgggggtggggagactgggaagaatatattaaataataaacaatagtaaacaaaactgttcagccttaaaatacagyccccatcaacccacgtcttggctatcttcttcttaactcagcttcagagcaaaacattttctttttttcatattcttcggaggtagaaacacaaaacattttcaacaaaaactgtaagtctagttttagttaaaaaaaaatttggagagataatagaataccaagtttttccgtatgtgtaattatgtaatcacattgtttcttcaactaagatttcatgtacatgttaagaatggctttgttaaaggatatgaagaaaaaatgtctgcagagagatttggagagattcttctcgagattggtgaaggaatattgttatttttctagactcctttcttccctaaagatcctaaacatttgtggcaccagggtcacttggaggccttctgtcagtgatgactaatgaaaggaaaaaagcctgtatttttcttttccgtttgcctactgaagctaaaactgtaccttttaggtgtgacctaggactctttaggcacagagagaatgatgttaacaaaaccatcaattagactttaatgcatttttaagaaacaaactatgatgtctctttttgcaaaactgtgtgagtgtgggtgattgggatttctgcttctcataatatttaatgtattcaggtaataatgtattttgccttgtaatatttcagtatcattcatccaacagttttgaaagcatctatctgtagtcggttttttaggcactggggacagctgtgaagaaagcagtcagaaatccctgccatcatggagcatacgttcnagtgtaaagagataatgaaaatacaatcatctctccrtaaccatgggggatggattctagagtgtcccccacaccaaaatcctcggatgctgaagtctcttataataaaatgttgtagcatttgtatataacctatgaacattttcctgtacactttgtcatctctagattacttacaatacctgttacgttgtaatgttatgtaaatagttgttatactgtattgtttagggaataatgacaagaaaagaagtctgtacatgttcagtacagatgcaaccattgtaggcctaactacattttcaatctgtgcttggttgaatctgtggatgcggagtccacgtgaagtgccgactgtatatagttctccagatgttaataagtgctatgaggaaaaataaagcaggggagtggatttagggacatgccagcagagtggtgggatggtggggttgtgattttaaataagatggttagggaaggcctcacagggagggtgacatttgaacagagccttgaaggacatgaggaagcaggccagatggatcacctgggggcacagcattgcacgcagaagaaacagcaagtgcgaagaccctgagtgggacagtcmctagtttgtgctggtaacagcaaggagtccagtatggctggagctgagggagagggagagtagtaggtaagatcaaagagaaagggcaggggagattgtatagggcctcatgcagtttttaggcttttaactctgagatgggaaagtattggaaggttttgagcagagtaatgacaagatctgatgtgccttctaaaatgactgttgtggctgccatgttgggtagactatatyagggcaggggtagaggcargagaccagttagggagctctttcagtatttgaggtgagaggctggatgctgtggctcacgcctataatcctagcactttggaaggccgaggcaggtggatcacttgaggtcaggagttcaagaccagcctggccaatatggtgaaaccacatctcacctgaaaatacaaaaagctgggcgtggtggcacatgcctgtaatatcccagttactctggaggctgaggcaggagaatcgcttgaacccaggaggtggaggttgcagtgagctgagatcgtgycactgcactccagcctgggcaacagagggagactctgtctcaaaaaaaaaaaaaaaaaaaaaaaaaaaaaggtatttgtggtgagagaagttgttggcttggtgaascagcaggaaggactcagattctagatagatgttgaaggtaggcccaacgagatttgctgatgatttatatgaatatgtatgaattctatgaatatggtagtcatattcaaagaagtgatcaaagatgactccaagattttggggctgaacaattataaacttctctcctgaaataggaagactgatggagaatcagactggaaatcagttcagttttggatgtattaagtttgatgtgtccattagacattcaaatggagatgtcacatagacaagacatctcttgggggaagatctggactgtaggtataaatttaaagccatgaaattacttaagggttgagtatagatagaaaagagaggaggacacgcaaatgattgagccctggggccattctagcatgcataggtggggaggatgaggaggaggaggcaaccgaggagattaaggagtgtggatagtgacatggcaggaaaacaggagaatgtcatatcatgttctcaactaagaattttcttgactatttcygtagagcaacatttggggatcatgaaactgtgttaggcaaattagccagaaggtagtttctgttttgctgcattaatttcaaagttaatgatagtcaagtttctattttgccttgctggagctgatctgtctttatcacactttcttagcaagttgtcaccgtgcctctagaaggtcttaattgacttctattaaacataaattctaccagttgcttcatagactttcttaacatacgcatattcctagaattcacactctgcaggtggtgggacattgaaatcaaagacaacaacagttaaatagactaagaccttataataaaacttatcaaggcttcaaatggtttttagaccctcctagtaaaaccaagcttaaacagcaatggaagagacttctttcatctcaaatacgtagaactcttaatagctgaaaataatttaactatatacataaaaatatattttaaaatggaggacttagaaactttatggtgatgtccacatgtatatactgatatactcatattacctgtcgtcctttctgtaccacatcgaagttcttgtgcttctcctacccactgtatattttcaagaggtactttgcccatgaacaaaacgtcctttgggagaaatgtttaaattccctttaaatattaaagataaggaaaaggtttcaaaacgagattctttattgcatgtagaagaaaggaggtataaatggaggtaaatcatgcaattagttgatgtcagggaaggcagacatcattttgaaatcttattttatagcttttatttcctttaagacctggctgtaggagtacacatggcttaatttacagcagtcaatcttttgagcaatgggaaaatgaaggacatgataaggccttgattaagtaaaataaatatacaagccctctaagagagaagggactttgcctctttcgtagtaccttatatacagtacacagtgtttaataagggaatgaatataagtttacatgagtctacaaattatgtgatgaccagaatattcttaaagtgttcccttggtagcctggattcagccctcctaatagttgtcgaagtctgatggatgagatctctgccatagaactttgtttagatcttttccttagtgtctctctctagctatttttagctttggttgtgttgggtgtggttttcaaaagagcgtagagacggtggagaccatgatctgaattcaaataagcagaacatttagtcaagactgacagaatatcatgtcacgttagttmttgaagggaccttagacatatttatggtaaagagactgaggctcagagattaagggccctctcagattacatttgatcagcagtagacacctgactagtgcctggtggttccagtccactatgctccatagttattctatttaaactcagaaaaaagatgagcttgactcattcaacaagcatttcaggattgcccttattccagactgaatgtcatagtcaagactgtgctgaagtgtgttttttaaaaacagtggccgggtgtataggcttaattgggatagaagctgccgtgatccaaataccattgatactgtgtcaattgttagctttgttgacatccttggctcacaataggttcttgggagtttggaaggtctgccccgggtagctcaggggctggggaaggagtagtacagggatcagccttcattttaatgaggccaaagaagattcaagatctggttgctgtgtgctagtttggctctttgtccccaaacctcatgttgaaatttgattcctaatgttggaggtggggcttattgggagatatttgggttatgggggcagatccctcgttaatggcttggtgccctcctagaggtaatgggtgagttctccctytatgagttcccacaagagctagttgttaaaaagagtctggcaccactcccctaccctcttcgttcctctctcttgctatgtgatctctaattggctagccttctgccatgagaggaagcagcctgaagctctcaccagaagtagatgctggcgccatgcctcttgcgtagtatagccgccaactatttcttttctttttctttcttttttttcggggagggtgggtggggggtgtgggacagagtctctgttacccaggctggagtgcagtggtgcaatgttggcttattgcagcctcaatctccttgggctcaagcagtccttcacctcagtctccctagtagctgagaccacaggcatgtgccaccatgcctggctaatttttgtattttttgtagagatggggttttgccatctctacaaagatgttgcctaagctgatctcaaactmctgagctcaagcagtccacccatccttggcctcccaaagtgctgggattacaggcagtgagccaccatgcctggctgcgccatttctttatagactacccagcctcaggtattttctttatagcaacacgaaaacagactaagacactgtggtataatgatcatttaattttggaaatctactggaaataaaactctttatagtgaaattggcccaagagtgagtgaagctaaattctctgtgataaccccaaggctcaggcttatggcccattttgttaatacaggacacaccagcatagacaactgggaagacaagggaggggaagagggtgagacatagtgtctttgagggaggagagaaagggaaagaaaaggggacagggagagagaaaggaggctggaggagtacaagttctgtttgctgctaaggtgttaagacagactgtyctaaaattcctgtgcacatccttttgcttgtatttccactgttggtcacagatactctcagagtaataaaagtaaatatctagaatacaatgcattgttagtcatgatttccataaagcttcatacggaagaaaacaatttcctcttctataatttactgaatggtagagatggttctatacaggatgctttaggaaacgtgccatatgcctgatccttagcatttttgtttaataatgacctaaattttgtttttggtaaaaccataactagctattatattttggattatttaatgttaaatgcttacagtgtgtcagattctggagtacatacgtaagyggtggccactgtcctataagaatctrtgatgaaatagtaaaatagctaacatttatagagtgctttccacatgccagacactgtgctaaattcktgttgttgttgttgtttgtttttgtttttgtttttgttttttcccagacacagtcttgctctgttgcccgggctggagtgcagtagcgtgatctcggctcactgcaacctctgcctcccaggtttaagtgattctcgtgcctcagcctcccaagtagctgggactacaggtgcgtgccaccatgcctggctaatttttgtattttttggtagagacggagtttcatcatgttggccaggctggtcttgaactcctgacctcaggtgatcctcctgcctcggcctcccaaagtgctaggattacagttgtgagccaccccacccaaccactgtgctaaattctttatagtcagtacctcattcagtctggacaacaaccttaggaaataggcattcttttctctctctctctcttttttttttttttttaaaagactgagtctcactctgtcgcccaggctggagcgcagtggcgctatctctcctcactgcaatctccgcctcccgggttcaagcgattctcctgcctcagcctcctgagtagctgggattacaggcacacgccaccacacctggctactttttgtatttttagtagagatggggtttcaccatgttgatcacgcttatctaaaactcctgaccttgtgatccacccaccttggcctcccaaagtgctgggattacaggcgtgagccaccacgcctggcctgttttctcttttgtacacaggaggaaactgagtctagagaatgaatactttacttcagttcctataataagtaagaagcctggattgaagatctgtctgacataattcatccatacccataacatccatacccataaccactatatttgctgtctccctagtaacatatgctgtatcatacagattgtaaaatctaccagaatatagatcccaaatgggtaaccttatcgtcaagtgaaattatcttcttattcctctatatgggaaagatattaaaggcgacactatcgggcaggcctttatgacctgacctagcttgtttcttctttggtcagcactagtaatttctcttgcatgcatttcctcattcattcatcacagatttagatttagaagattatatatttaatgatatttttgcttttgtcaatgaatatttttaaagataaggtgttactgtataaaggcttttactatgaaatataccacttttaactttttaaaaaacctctttgctcttcttactgggttttatcatttcttagcataaataatttgtcattaggtgagtttatagttttttaaaggaatgtatgaatgcttgtgaaaccatagctggcagggcagtgagtacagcagttagagctgaatgcacagtcagaagctgagattccattcctggcctgtcacttatgacagccgcaggcatcagtgttctcgtctgtcttgaaaagggttaaatgagatgaatgatttctaactaccacccttggggcctgaaattgtttttgagtaaaaaaactaagtttatctgttaaaaaaaaattaatcctaaatgtcatagaacaagaggacgagtacacaccacatgtatagtcagccctccatgtgtgtgggttccacatctgtggattaaaccatcatcaaattgaaaatacagtgttccaaaaaaaataaaaaccaaaaattgtggttgcatgtacgtgttttttgttctcgctattgttccctaaacaatacagcataacaaccatttacatggaatttgcatcgtactgagtattataactaaccaggaggtgacttaaagtgtacgggagaatgtgcgtatgttatctgtacgtactacacgattttatgtaaggggcttgagcatcctgggagtcttggaaccaatcccacacagatactgagggataactataccacatgaggagcgattaagtaattagaaaatcagccaccaggaaagggagaaamtcaattagtttatacagttccctttccagaaaagctactttttttttttttttttttgagacagagtttccctgttgttgcccaggctggagggcaatggtgtgatctcggctcaccgcagccagcgcctcccaggttcaagcgattcacctgcctcagcttcccgaatagctgggattacaggcatgtgccaccatgtccctctaatttttttttgtatttttagtagagacggagtttcaccatgttggtcaggctggtctcgggctcccgacctcaggtgatctgcccgcctcggcctcccaaagtgctrggattacaggccactgtgcctggccgaaagctacaatttttaagaagcattttgaaatcttaatgtcaattaatggactcccaattattatctacatggacttttaaggacccaggggttcctgtttgaaattactgtactaatctctagattattactgtagtatggatgatactgccagttcccaaatatagtcattgagatcttagaataatttttttctacttaaaattctctaataacttcctttgtatttagaataagattcaaacttttaggtatttgtttataacaaataaatattacatttatttgtttatttataacaagagtgagacagggtcttgctctgttgtccaggctggagtgcaatacttcaatcacagctcactgcagcctcaacctcctaggctcaagtgatcctcctacctcagcctcccaagtagcttggactgtaggtgtgcaccactatgcctgactgattaaaaaaattttttttgtagagatggggtctgtgttgcccagggtggtcttgaactcctgggctcaagggatccgcccatcttggcctctcaaagtgctgggattacaggggtgagccactatgcctggcctatgtgtggattttaaaaactctaaaatggaccaggcgcggtggcttagccctataatcccagcactttgggtggccgagacgggtggatcacttgaagtcaggagtttgtgagcatgctcaccaacatggcggaactctgtctstactagaaatacaaaaattagctgggcgtggtggtgtttgcctgtaatcccagctactcgggaggctgaggcacgagaatcgcttgaacccaggatgtcaaggttgcagtgagctgagattgcgctgctgcactccagcctggttaacagagtgagaccctgtctcaaaaattaaaaataaaataaaataaataaaaacagtaaaatggaagctagagttttcttaaaaatgagaagcttgagattgatgaaaaagcaagataatggataaatgatttctaaaaaaaggtatctaacagctttgtgaagggctaataaaatttctttcaactataaaatgtattagcctattcctttcctcttcaaataagatacggtaaataaaattaaccatttttaccaggtatatgcaagcaagcatgcaggtaccaacaaggctttgatttttttttaagcaaacatgtcttatttatttataarctagtgccaagtgatgagcatgtaaatgatgggcagtatttatgaaatttcagaaagtggttgtactaaagagcacttgtagcttcagttgtggttttaaaggaatatcttaggaaactgcatttacagatttgttcttcatggcacctacatcagctttgggcacagtcagtcagtacagttctctttgtttcaataaagtttaatcctatatatatatttttttatatatatttttttctgtttatactctcctattgtgctttacaatgcactgttctacctaaggcttgactttttaagatggcaccatgtaaggtcctcttggccagagattccaaaaatttttgatatgggactgtctttccccattactcttctctcttctctcttctctcctccctccctccctccctccttccttmcttmctcccttcctccctctctcccttccctcccctcccctccccttccctctttctctcactctttctctctttctccttttctttctcagaatctcgctgtgtctcaaaaaaataaataaataaataaataaacccaggctagagtgcagtggcgcaatctcgcctcattgcagtatctgcctcctgggttcaagtgattctcctgcctcagcctcccaagtagctgggactacaggcactcgccaccaagcctggctcatttttgtatttttagtagagaaggggtttcagcttgttggccaggctggcttcaaactcctggcttcaggtgatcacccccctcggctacccaaagtgctgggattacaggcatgagccactgcgcctggcctccattacttttcaaacaaaatgcagcgatgactggttgagtgtgaggaggtaagaactcagaattctaggaatgaaagtattagtattttatctgctgctgagacagcacatcctgaggatagaagaggccgcaagattagctttctcagatgttctgcaccttttccaagaatctatgactttactaactttatttgaaattaactcttgtaactatttttactaacatgggtttcttgggttaccttttatttttctgttagaaacttgtgtatatcactcatgcagaaagctaattttgaaataatgctttatttaaatgactttcaaagatatgtgctagcattattaagtcagaagtaatcccaggaagtcacccttattctatgatgctatgaaaatagctaacatttatgaggcatgaactgtggttggtgatttataaacgctaattctcacaataacttgaaaatatgacttttctcatttgatagatgagaaggatgacattcagtgagttgcccaaagacaggaaaggccatagcttggattccatcccaggctgtctggctgcaaactagccttttttcctacgccctgctgcccctctgagtccttcagaccagctgtcctcaactgctgggtggtgacacattaatgggcctactgttcatgagctaggtcacaagtaattattaacagtagtagacatactgaggttatgatatatattttaaaataagtggaatggattcaaggtcttccctctaatgatattatttttattcagttccattcctgtatgcttttactgggtgggagagaaaggtggcattatatgcatcaaaccagtaattgtgcatagccccatacataatgggaaatctattttatgctactggtaagctaccgttactgatgagctatgaatagtttccacatattaataaagccttttaggaatatcactgcagaagtagtcagtctgtttgctttactttcctctagaaaactattttgtgcattatctgaggacacccatgggagtgtgtgtctcaacacttttgctgatctggattgtttctagatacttttctcaattatacaatgtgacagtgttttggaaagagtatttataaattacaataaaaaatgatccaaaaggtgatctgagctaaagacgaacaaacaaaaatgtgatggagttaataatgttagggttgtagttttttttttttttttttttttttgagacagcgtmccactttgtcccccaggctggagtgcagtggcatgatcttggctcacttcagtctccactttctgggcttacgcagtactcctgcctcagtcccccaaatagctgggactataggtgtgtgtgctaccacgcctggctaatttttgtattttttgtagagatggggtttcactatgttgccgaagctggtctcgaactccagagctcaagctatcagtctgcctcrgcctcctaaagtgcttaggtttacaggcgtgagccactgcactggaccctgtagaattttttcattcagttctgctgtgaagactgaagtgctgaatcyttaaatatagtttgtggacctctagattttaaactgtgaaacccagtttaaagattttttttttttttttttttttttttgagacagagtctckttctgtcgcccaggctggagtacagtggcgcaatctcagctcactgcaagctctgcctcccaggttcacgccgttctcctgtctcagcctcctgagtagctgggactacaggcgcccgccaccacgcctggctaattttttgtattttttagtagagacggggtttcaccatgttagccaggaaggtctcgatctcctgacctcgtgatctgcctgcctcggcctcccaaagtgctgggattacaggcgtgagccaccgtgcccggcctaaagatatttttaagtttaaatatttttaagtttaaatctatttttatagattcccagagaccttctgatgaaaatccacttaattttgcttaattttttcctgtccatgcctggagaatccaggtttctgctttgtagactatattttcttgcccctcccttctcttcctcttttctagtacaacatactctgtcatttatttaaacaggaaattatcctatagtttgagaaaacatcaatgtagaagtgataatgtaaattaagtaaatttctgatcatcttaattcctcagtacagcttgacacaagattgctcatagaccaggcttttgtactttttttctctaatcccttcttcaaagatcacccttattttcaccttggtcctcatgatgccacctcttattgctcttttggttgtccctttttgagaaaaacctgtagaagaagaaatattcttttgacaaaaaagttcttgtatcattatgtaaaacctcatagtgaaaaagctcgctctttttttttttagaaataaggtctcactctgctgcccaggctggagtgcagtggtgtgatcatagctcactgcaggcttgatctcccaaactcctgggctcaagtgatcctcctgcctcaacctcctgagaagctgagaccacggctgtgcgccaccatgaccagctaattaaaaaaaacattttttttttgtagagatgggttcttgctttattgctcaagctggtctcgaactcctgacttcaagtaatcctccctcctcatcctacaaaagtgctggrattataggtgtgagccaccacgcctgacctgaaaaaactcttggaaatgtctgtctgaatcttccatttaccttcatttctagcagaaactgggaaatttctttttttcttttttcttttctttctctcttttctctgkctctttcttatctttcattattattacttttttttgagatggtgtgttgctctgtctcccaggctggagtgcagtggcatgatcacrgctcactgcaacacactctgtctcccgggttcaagcgattctgatgcctcagcctcccgattagctgggattacaggcgtctgccactacgcttggctaatttttgtattttttagtagagacagagtttcaccatgttggccagactggtctggaactcctgacctcaaatgatccactcaccttggcctcttaaaatgctgggattacaggtgtgagcccctgtgcgcgcggcctcattcttcttytttttttttttttttttggagacagagccttgctctgtcacacgggctggagtgcagtggcacagtcatagctcactgtaacctcaacctcccwggctcaagcagtccttccacttcagcctcttgagtagctgggactacaggcatgtgccaccatgcctggttaacttttttctttctttctttctgttttttgagacagtcttgctctgtctcccaggctggagtgcagtggcgtgatcttggctcactgcaacctccgcctcccgtgttcaagtaattctcatgcctcagcctcccaagtagctgatattacaggcatgtaccaccgtgccctgctatgtgcctggttaatttttaaatttttttgtagacatggggtcacactgtgttgcccaggctgtctcgaactcctggactcaagctatcctgcctgggcctcccaaagtgctggaattacaggtgtgagccaccacatccagcctgaaactgggcaatttcttatatctcacatcttttcgggtttagtaccttttatttccagtatctgttcagttttcttcctcttccttctcttgtggtcctttgagaaaacagggacaatctgctagtctaaggatattctttctagatattaaatttatatcaattttttattgctgtagatcaggactaaaacagcaaaaaggaattgtttcctttgggcagagatgtgacttgcttttgaagggggaagtgggtagtcacaatctactcttacgtaattccctgatgtagtcctcctttgttacaagaatcagcaccaacattatcaattggaattctatgagaatgacatactaactttaataagaatacattgagcagtaggaatttatggctggttataggtttaaagcttgtaggtgatttacttttagaaccacagtgttttctatttttaggttaagttatcctcaacttcaactctaacttttaaggaaatataaatggctggggtaacaagataacagattgtttaaaactatttcctatctcctgtctcaagtgtatgtattttcttaataaataaacttttgtcaggatttcaaaatattcttgctcagctcgaggaaaatgaactttcacactggacttaacttgttttgtgccattgttcaccagaacaatgactgtgatttcacagttaaaacacaggcattggtacccttgaggtgactatgtgaaaataggttattttgtttggtcattctcactcctgtctggcagtgcttcattttttcactggcagctctagctacaatctgattttaattaaatatgtgaaagctgtgtgtactagaatgtaaaatcttgtatattcttcatagtgaaggactgacaggacccgtttacagtgaaccacttgtaaatcatcttgtttctggtggatggrgccaatggggaaataattaaagtattgagtgtatggagaggatagaagttggtagaaaacaaaaacttaagaaccatactggtgattccaaaattccccctccacctcccttttattattttattttttattttgaggcagagtctcgctctgtcacccaggctggagtgcggtgacgcaatctcagctcactgcaacctccgcctcccaggttcaagcgattcttctgcctcagcctctcgagtagctgggactacaggcatgcaccagcatgcccagctaacttttgtatttttagtagagacagggttttgctgtgttgcccaggttggtctcgaactccagacttcaagagctccacccgccttggcctcccaaagtgctgggattacagggagccaccgcgcctggccacctcccttttaaattattattattattattattattattattttttagagacagggtctcattctctcacccatgctggagtgcagtggcgcgatcacagctcactgcagcctcgatctcccgggctcaagtggttctcttgcctcagccttccgagtagctgggaccacaggcacatgccaccacacctggctaatttttttttttatttttgtagagacaagatctcaccgtgttgtccaggctagtctcaaatggtccttgcctcaaatggttcttccaccttggcctcccactgttgggatttcaggcatgagccactgtgcctttttttttttttttaagagataaagagtctccctttgttgcccagartggagcacagtggctattaacaggccatcatagctcactacagcctcaacctcctgggctcaagggatcttcctgcctcagcctcctgggatagctgggactaatggcgtgcaccacggtgcctggccagaattctctttatctctttgatacctctatcaccytctctgccacttagaacacaaaatttgtggttagartagaagtggtagagggatagccagcaaatgccctagaccccagagcttctgtagatttaattgtccattgaagaatcatggagtcattataagagtctcttgcacaagtgttgagcctacttaatgaatattgaacgaaattacattcacttttccctggaatgaaayctctaagcaagagtaaaaatttagctttttctgaatgtgaacataaggccatgaagtagacataccttgttgaatcattatggggcagaggcccagatatgaaatgtctgttgacatgtatgcacattcagtatttatttcagtgccttattgaactctattgaataggtcaggtgacagcttttatctgaacatcagtctttgagggacagttgaagcactggtatatgtgtgagcgagagattggtgtttttttcaaatgtagaagaggtaactkcttacattttttgctcttaaaagtatattatttcataatattcaaatttgccttgggatttaaagtataaattgtcattttagtaacacaattgaatattttttaatatctctgaactaatgagatacagttttctttcaagtgtgggaactattttgtaccctgttccctgacctctgccttttgaccctgtcactttgtgatgagattatagataggcctttgagcttttctccagtctgctcaggtttccttacacagcaacatataaagctttaaggtcctttaaaagatgctcttagaattaaagagaacattcagatttaattggcatgagtttcgtaaatattttttctttaaaaagtctttttcttccttaatgctttcctgtcccccaaatctatttaattatgttttctaaaatggtatatttcgggagaggctaacaattagagctttctaggataaggaaatccaagagagattcaactgtttattccctatttgttgtctctaggtatgagaagttaaaatccagaattagagggtgtcatacaagagcaggagatttttttcagagagaatcagtgctttaaccttcttataataagcactttttagataacaccttttagatactttttcagatgcctaaaatagagtaggaagagaaacaaggacagagaaaaggagactgatttcattggctatgtgttaataactcgtgagttttttttttttttttgagaaagagtaannnnnnnnnnnnnnnnnnnnnnnnnnnnnnnnnnnnnnnnnnnnnnnnnnnnnnnnnnnnnnnnnnnnnnnnnnnnnnnnnnnnnnnnnnnnnnnnnnnnnnnnnnnnnnnnnnnnnnnnnnnnnnnnnnnnnnnnnnnnnnnnnnnnnnnnnnnnnnnnnnnnnnnnnnnnnnnnnnnnnnnnnnnnnnnnnnnnnnnnnnnnnnnnnnnnnnnnnnnnnnnnnnnnnnnnnnnnnnnnnnnnnnnnnnnnnnnnnnnnnnnnnnnnnnnnnnnnnnnnnnnnnnnnnnnnnnnnnnnnnnnnnnnnnnnnnnnnnnnnnnnnnnnnnnnnnnnnnnnnnnnnnnnnnnnnnnnnnnnnnnnnnnnnnnnnnnnnnnnnnnnnnnnnnnnnnnnnnnnnnnnnnnnnnnnnnnnnnnnnnnnnnnnnnnnnnnnnnnnnnnnnnnnnnnnattgtaaattaagcattggccaccacccctggataatatgatattaataggaaggaagggggttttccaagttggacaggcggtcttgagctcccgtcctcacatgatccacctgcgctggcctcccaaagtgctgagatagcaggcatgagccactgcacctggcctggcaatatgtgcttttaaaaaattgtagcttttggctgggtacggtggctctcgcctgtaatcccagcactttaagaggtcaaagcgggcagatcacctgaggtcaggagtttgagaccagcctggccaacatggtgaaaccctgtctctactaaaaatacacaaaaattagccgggcgtggtggctccccagctactcaggaggttgaggcaggagaatcgcttgagcccgagaggtggaggttgcagtgagccgagaacgtgccatggcactccagcctgggcaatgagtgaaactccgtctcaaaaaaacaaaaaaaaaaattgtggcttttaaattatttttctaaaaaagaaagagtgaatggataaaatggagttttctaattcaggtgtttacttttgagagatagaaattaaatccgtagttcttgcaactttttttttttaaacccaaatcctttctacaattagtaattaaagtgaaatgagaaaagaaagagtagctttgaatctcactcagttgcttaatgctaaaataatctattaaaatttttttttctatggaaaggggaaaacactagtgacaaataagatgggaagacaggaagaagctagttagcagaagaggcaactcagtgacaagataaactcttgatctctatcttactggtccgatttgtgtgttgtcacgtagaatgaaaatatgtttagacggtataagaaacctctgatggaaaaatctggktgtctccctgcaggttgctaagaaagagtgatgtttcagggaggctgagtcttgaagcagcagcagcagatctgacacttgtccttcacagctcctttcctgtctcccatagtaagggctatgtaaacatttcatgatcagtgctggyacttgcagccgagaatgcggagaatgcttgcagtttcccttttcatgcagcagaatgataacagggacaatcttttgattgtcttattatgttttggcttttgttgcttttaaaattyccagtttgtgttgctgtaagggaggtaacatttctcaccctttctgtaaatgagtttcctgccaaaacctacctgtgartttcaaatgtttagaccaatcaaccaaccaaagaccttgagataacctaagaaggtataacctaagaagggacagttacacagtaattgggaaaacttctgcaaggacagatgtgcatttctcattttctttaaacctatcaatttactgaaaatgaatatgatttttgttaataatgacagtgccaaaaaaaattactaaaatctttttgagtaaatgaaaccaaactcctaaaaaaagaaaactttttttttttttttaaagagaattttggctgggtgcagtggctcacgcctgtaatcccagcactttgggaggccgaggcgggtggatcacgaggtcaggagatcgagaccatcctggctaacatggtaaaaccctgtctctactaaaaatacaaaaattagccgggtgtggtggcgggcgcctgtagtctcagccactcgggaggctgaggcaggagaatggtgggtgaacccaggaggcggagcttgtagtgagccaaagtcgtgccactgcactccagcctgggcaacagagtgagactccgtctcttaaaaaaaaaaaaaaagagagagaattttgattagttcttatctggagatatattgcttataatttttttctcttggtttttttgtttgtttgtttttgagatggagtattgctgtgtcacccaggctggagtgcagtgttggcgatcttggctcactgcaacctccacctcccgggttccagtgattctcctgcctcagcctcctgagtagctgggattacaggcacccgccaccatgcccagctaattttttgtatttttagtagagatggggtttcatcgtgttagccaggatggtctcgatctcctgaccttttgatctgcctgcctcagcctcccaaagtgttgggattacaggcatgagccaccgcaccaggccattttttggtaattttttagaatgagttgaattgagatgaattttagttgttcctaagtactgtgtactgtgactggcagtggctcttaactgttattttttgagacagagtctcactctgttgcccaggytggaatgcagtgacacaatcatggctcactgcaacctctgcctcctgggctcaagctatcctactgcctcagcttcttgagtagctggaatcacaggcatgtaccaccatactcggctaatttttttgtgtgtttttaatagagacagggttcaccacattggccaggctggtcttgaactcctggcctcaagtgatctgcctgcctctggctcccaaagcactgggattataggcatgagccatcgctcccagctggcattggctctttaaaatttttgggaggagaatataacacagtcacaaaataatgtaagggggcaaattgtggaaaagaaggtctatttatgcccagctcactgctcctactttttgtttccagagccagatatatatgttacacacataaaagaggtatgtaggccaggcgtggtggctcatacctgtaatcccagaactttgggaggcaggtgaattgcttgagctcaggagttcgagaccagcctgcgcagcatggtgaaactccatctctaccaaaaatacagaaaattagctgggtgttggcagtatgcgcctgtggtcccagctactcggtaggctgaggtgggaggaccacckgagcctggaaggtggagatttcattgagcctagatttcaccactgtactccagcctgggtgacacagtaagaccctcgtctcaaaaaaaaaaaaaaaaaaaaaaaggtatgttgctgggtgtggtggcatgtatgtacctgtaaccctagctacctgggaggctaaggtgggaggattgcttgagcccaggagttcaagaccagtctgagcaacataccagacccttgtctcaaaaacaaagaggaatatagattagcccacttcaacattttatgaagtggtgggagatgacttgggaaaagaggttgaatcagcctttggagttctctatcagttagaatgctgtggtttataggtcaaagaggagataaaggaatttggctggttcacaaaatttaaaaggagtttttgggggcatgtgttcagggtgtaatttgaacgtggctccagcttcatttcactgcagctgtttaggcgcaacctttatgcactgttgacttctcttcwggtggcttccctcagagttattaagtggcagcagaagttaagagtttgtattcgcacatcacaccttccttagaagagatttaactttcctcctctagccttcactcctgtcaggaaacaaaaatatgggtgtttgctgtggcctgtcctttaacaaatcagtgtggcaagtaaaatgggattaaactgattactgagactaatttgggatgaaaactatatagctagttcacagtagaagagggagggaagtggctgctgggaaacattcccaatacaggttgagtatcccttatccaaaatatttgagaccaaaagtatttaggattttgtgttttttcagattttggaatatttgcatatacataatgagatttcttaagggtgggacctaagtctaaacatgaaattcacttatatttcatatgtaccttattcatgtagcctgaaggtaattttatacagtattttaaatgattttgtgtacccatcacattagttcaggtatggaattttccacttgtggtgtcattagcagtcaaaaaatttcagattttggagcatttcatatttctggattagggatgctcaacctgtattctctacttgttgaatgctagactataaagatggccctctgaaggacagaaaagaggccagttgtggtggctcacatctgtaatcccgtactttggaaggccgaggtgggaggatggcttggcttgagcccaggagttcatgactagcctggtcaacaaagcaagaccctgtctctacaaaacaaaacaaccccctaaaaatagaaaagagccactgaaaggtgttttgttgttgttgttttttaaagaggtggaatcttgctctgtttgcctaggctggagtgcagtggtgagatcatagctcactgcagccttaatctcctgggctcaagcagttctcccacctcagcctcccaagtagctgggactgcaggtatgcaccaccctaaaaggttttgaacaaaggagtggcttgctcaaaactgtagccttaggaatatcactctggatggaggatatagcatggaattaaactgggacgagatttgaagtggggaaaccaattaggatgcttttttttttttttttttttttagacagagtcttgctctgttgcccaggctggagtgcagtggcacgatcttggctcactgcaacctctgaggaggctgttctgtaagacaaattagaaggcaacattctgaattagaatagtagtggtgggagtaaagaagatgggggatggataggaaagataggacacacaagtaaattgaatttggcaacttctttttttttttttgagacaaggtcttgctctggcacacaggctggagtgcagtgatgctatcacagctcactgcagcctccatctcctgggctcaggtgatcctcccacctcagctttccaaatagctgggactacacccacgtgccaccacacccagctaatgaatttggcaactttattgtatgttgggtttgtcaacctaaataacaaatarggataggctctctaaaagaaaattatttttattttgaaataaggtgttgcaataggaatatacatgcgatagtaaactgtgtgttctttaacattgtggaatttgtatagcttaccagtttgaatgtctgcaagtgcttgcactgggttctaacctccgcctcccaggctcaagcagttctcctgccttagcttcccaagtagctggtagaacaggcacactccaccgaacccagctaatgttccagtcatctggtactaccatagaaaaatgtttaccaattagctgtatagaagaatctgatgttgaactgcctgctattggttgataatgcttgtatagtacttactatgtagcctggcaggatgtaattgcacaataaatattagccacattttcatcatcataattaattggtttaaaccttgggcagtttgatgatgaaatttaaggtattcctggaactctcctttagatattttttctttaaaaaatttttaaaaaattattgtagatacctggtcctgctatgtggcccttgctcgtcttgaactcctggcctcaagtgatcctcccacctctgcctcccaaagtgctgggattataggcatgagctactgggcccagcctatgacatgttttatcgtagaatatgcacctaattttaatatatatatatctgttttaccatgttgccttttaatctcttaatttaataacaataataaaagtattgcttgaattacacacacacacacacacacacacacacacacagtttttaagagagaggttctcactatgtttccctggccggaatgcagtagctattcacagatgtgattacagcacactatagcctcgaactcctgggctcaagcaatcctcctgcctcagtctcttgagttgctggaactacaggtgtgcaccaccatgactggcttcaaattatattttttaattttttttgagacaagagtttcacttctgtcacccaggcttcactgtagtggtgtgatctcagctcactgccatctccaccttctgggttcaagcgatccttccaccctagtctcccaagtagttgggactacaggtgcatgccaccatgcccagctaatttttatatttttttttctagagatgggrctttaccatgttgcccaggctggtctcaaactcctgggttcaagcaatccacctgccctagcctcccaaagtgctgggattacaggtgtgaacctctgtgccaggccactattttttagtttttatagccagtcaaatatggtccctagtttgcagctggcaatcatgtttagagacgttaaatgaattacctaagtttgcattgctagtggcagaattagaaccacaacagagattcttctgggtccaaatccaggcccctttaactatagagaacagtctcagagaaacttaatcattctcatgtgtaaaagagcccaccttttaaatctgatagagagcagggcatttatatacttaaaaggaacattaataaacctattatatgttaacctaaatcacattctaaatgaaaacaagactaactttgggccttttatgcatgaaaattacagattttgttggttgtgcatctgttttaggagtagactatctacgtgtaagcgaccagaggcatccacataagcaagatgtataaattgcttaacaggactcaacgtgagtgtaaaaggactcaatagatttactcctttcttttctttcgtttttttgtgagatgatctcagctcactgcaacctctgcctcctgggctcaagcgatctttctatcctagtctcccaagtagttgggactacaggtgtgtgccggcrcacctagctggtttttttatttttttgtggagacagagttttgccatgttgcccaggctggtctcaagtgagccacctgccttggcctctgaaagtgctgggattacaggcatgagccactgtgcccagctaatcccttaatagatgcagtagtcgaattggcaaggttgtgaataccaggaaccaagaatcattgagggtcatcttgaggctgactgccacattgattaaatctgttaggatctataatcttcagcagtggttttaagtagagcatactaaagcaatagtagtgtgcaggattttgatgccatctccgctgaaggaaataatacaatctgctatctttagaattgcagtatggcatgggctggttgtggtggctcacacctgtaatctagcacttagggaggcagaggtgggaggatcacttgaggctaggagtgtgagaccagcctgggcaacatggcaaaaccctgtctctaaaaaaaatacaaaaattagcaaagggaggtggtgcctacctgtagtcccagctactctggaggctgaggtgggaggatcacttgagcctgggagttggaggttgcagtgagcagagatctcgccactgctctccagactgggtgacagagccagaccctgtctcaaaataataataataataataataataataataataataataatagaatgaaaagagaggggtggtagtggaagggaactgaaaagtgcatgataaattatgtaaggaagcattaggctttggtcagaaatgttgttagccagctgcaagtgaacccatctggcacactttttcattattcttctgaaatattcatggactcttaacagttcctaccttgtttgcactagatcctcacatactcttaccttctggcagccagwctatrgttgcagtgggttgctcttgttttgtttcttgttgctgaggatgtaatcaataaagagtagatactcaaggtaaagtttatggatactcaaattcacttacaaataatggctaatcactacattttattatgctttaatgtgtatatatataatattttatctctgaattatgaatctattctagtcattaaatagtaacattcattttcttttcttttttgagctggagacttgctctgttgcccaggctggagtgcagtggtgtgattctggctcattgcaacttctgcccctctgggcttaagcagttctcctgcctcagcctccctagtagctgggattacaggcatgcactaccatgctcagctaatttttatatttttggtagagatggtgtttcaccacattggccaggctggtcttgaactcctgacttcaagtgatccactcacctcagcctcccaaagtgctgggattacaaggatgagccaccacaaccggcccactttcattaaagaagttttttttwaatttagagagcatatgattaaaagttgacttaaatttttttatttgcaaaaggcatttgcatgtttcttattggtttccaagagatctcttgaaatcatttaggaagtagatgaagagagacagtaaataatccttttatttttaaaaattaaattatcttcagatcattgatagtaggtttatctaggattcaaaaatgtttctgaaaattggtcttacaaactcaaagttcgtaagactgctttttgcactgaatagtaacttgagttcacttaggtgttcctgcttctgttttaggaagaaactttgctgctttgtctttacaattaaagtatgatcttcttacattaactctctgctttacacaggaatggaatcctcagtttttgtttttgtttttacccccaaaggaggttagcagttggagttcattaaaaaatgctgagattttacctagttgagtgatagatttagattttagaaagagtaggatcagtctttccattttttgtagattaacactgtgatggcggtgttgaaaaaggtgggctgtttgtgttataaatttgtatgatacggattttcatgtttaagtccagtcttcctttggcttctcttcttttagctttgactccattgtctgctttggctttgcaaggtgaaaaaacatggccccagggtcagtgcttcccagaaacctagctgactttgatggtcagtagaactcatttgccaccttttaaacaaaaagtttgtagactttgcaggctctccatctgtctcaccaagctaggtgcagttattgtgcagaaagtttgcttaggggcagaggaagccttatctacgtaagtatttagaatttgttaaaaaaaawaaaaaaggaaaaaggaaagcagtttatagatgaatacttaaatagtttcattttgtacaagtcacctggttttgttcccatgtgtkaggaagaaatgagttggacagaattagaagtcttgtcactgaagtaattaaagttattacagagcagcttttttagattagaaaggaagaagctagaaattagtcattggttgctttcattatctattatttgctttcattttatttttcttacaaaactgctatcattacacagatcgtatacaactacaagccttttattttattttattttatttcatttttttttttaaagacagagtttcgcctttgttgcccaggctggcgcgcaatggtgcgatctcggctcaccgcaacctccacctcccgggttcaactgattctcctgccttagcctccctacctggtagctggaattataggtgcccgccaccacgcccagctaattttgtatttgtattagagatggggtttctccatgttggtcaggatggtcttggaactcctgatctcaggtgatccgcctgcctcggcctcccaacgtgctgggattataggcatgagctgctgcgcccggcccatttattttaatttaaatttatcctttagaaagcaattctgtagtatgaaatgtgtgtactctttacctgtgggtacataaattgccatttttatttattggacttttgggtrgtaatgaggtagggctggccagatagtattaatatgatttctaagcatgtctttctgacttctagacttgaagctacttgagggaaacagtttagcataatagtttatcatctctaaaatagggaagtatttaatttataatggtggctaagttgatgaatgagataatgtacagagtctggggtatatgggaagtacccaattaatgtaacctgttatttatttatatttgtagtccttcagcatctactacagtgcttgcacttaatagatgctcactgcaactttgttgaatgaatgatgtggcttaaacttacggagaaagttccagaatatatagccattgtcagcatgattgatgaatctattacaaagggaaaaaatgctcatgtgtttgatatttatacctcattttgactgtagttactacactcttaatgccatactagctcctgtcacaggcctgacaaatagtaggcgctcaatgtatgtttgaataaattattgattttttgttcttcctggaaawggcaatgttttctatttgtcactttatgttatgctaaacaggtttgagttttaggagtcctctttactataaattgaggtggttagatgttggctaatcaggtttcaaaatatgtatatatatattttaaacgtaagcatcaagtctcaagtaagccccttttcctagagatgaactgttgcaggcatgtggagcataaattgttgttgttgttattattattatttgagacagggtctcactatgttgcccagactgttcttgaacttccgggctcaggtgatccttcctcctcagcctctcaagtagctggaattataggtgtgtgccaccacgcttggcttaggaaattattgtgaaatgtatttgtgtatgctatgcttgagctgggatatattttcttgctgtttctcttttgcgatatgtggataaggaaatgctttgctgtgctttaaattgcgggctttgcccccttgagatgcgtacatgagtatggtgcagctgtgtatctgtgactcggacagatcctgagtatagatcctttttggtaactgatctcctcttttcttcatcccttacatacggagttctctttttaaatccctgaacataactgggatcttgacaaaggttccagcaaatctcctattctattttctcgtaagaatactccctctgatcttagtactttcttccacggtctctgctaggtgaaatgagctcactaagcatagtttactctctctttttggtagtaaaggagctggttgcaatattaaacaaggtgttcagggtagccctcactgagaggtgatctttgaacaaagacttaagaaagtaagggagttagccaagtagatatttgggaaaagtatcccaaagtaaacatcaagcggtcacctggtgagttcgagtaaccctaaagagtctggaggagtgaacaagaggaatgaataatagaaggggaagccacaggaggccccatcatgaagggccttatgttgttgaaaggactttggtttttactctaagagaatggggggagccattgcctgatttgaacagggtagagagacctctgacttagttttaaaaggatcatcctggcagctrgctgtattaagactaaattgtgtgtgtgtatgcagggaggttcaagggtagaagcaggaagatctgttgggaagcctgcagtaatttaagtaagggatgatggtggtggctcaggccacatagtagcagtggagatagtgagatgtagtcaatttctggacatatttggaagattgaaacaataggattttgttatcaaaaggcggggtgtgagagaaaggggatgaatcaaagatgactctaaaggttttaaacttcagtaagttgaagaaaaatggaattaccatcaacttaactggagaataccatagtatgggttgcataggttggaggagggttggcacagctcaggaatccatttttggacattctgagtttgagacacctgtaagatattctggtcaagtaggcagttagacgtatgagtctggagttaagagagaagactgagctggaattatacattatggaggcaaaatatttaaatccttgagtttagataagatcaccaagggagagaatgtggatagagaagaggaagagggccaaggatagttcatggatgttctaacagtaagattggatcagtaagcacatttacaacattttaggggaaaaattactaagtattttttgaatatatggagaatagaacagtaaagaaggaaggcagcagcagcactaagagtatctcttttttcttcccttttttccttccgttgtaaaattcctaaaaaatttccatgtggtaatagactcaaggtcagagtgaacacacagctaacscttttcttggtggattaatgccttgattctatttctttcactgttgtttttcttttttcttttatttcttctttcactattttattgaaattcttaaatccatgattaaacttcaagtgtataattgctaaacagatattaataagtgctgtcagattcttacatttccattacactttaattaagctaaacagtataggcaaaacwttcctaatgttaataaaaattaaagatgtaaattctgaaaatcatcagcggttgaacataataggattttaacatttttcttgtgtttttactctttgtctggagataactccaaaatatttgtgtttcagctactttacatgcttaagcagtacatggtaatgaatgataaatacctggtctagttgatggaacatccttgccaatactttgaattagattaactaattctggactataatatggcataggagacagtgtcctcttttattcttttattctgtgtttccagttttgtaagcttgtctttgagtttgatttgttgaggaaaaataacttagggagggtagcttaatttgccatgagttcatcgtttcctccactaatgtgaaggtttaactaaaatagaccgaagactgactgtttttccctactctcccatgagaattttctatcagtacgaggatggtagaaagtttacttttcatttttcatctggggttagaacttatgttccaagtgacatatttaccagtgaattaaggtgtatttgattatatgatctatatttgaagggacaagtatattttctttctttcagctgtttttcttttcgtattacaaaaaggtaatgcttccaggtgctgaatagatgatagtcaagagtcttcagtcattcctagagaggagatgaaatggtgttagttgcatttgttagtaaaaatcatttatctggctatattcctgaagaaccacagaatttcaaatgctaaaataaactttcatttgctaaatggatgcatagttaatgcttagtcatgagattgattcatgtttgggttctactactgaaattaagccagtcctttaggaggaggcaagcaaaggggagttgattcagtgttgtgtaaagtgttatccatcagtatgagtatttttcatgttttattcatgagtaatagattcaaagaagttttaataaagtgcccaattttatttgcataggtcagaataaactttgtaaataagtttgtgatacctgggtacaaactaaaaggctaggaatgaagttatttgggtcttatgcctaaagtttaggagttccaggaaaatttttctgttaagccctggaggtctacatgtttctgtagatcaaagaggtgagaaccatttctcttattgtgctgttcttgtagttgcactgtaataatctttcatggaacaactgagaactcatgtcattgtggagagtcaccagtgcaattgcctcttgctccaagcccaggaaaaagaaaacaagggggttggggggtgggttctgattcatatatgtataaggaaattaagaacaccatctatgaggaattgctgaaaagaacaataaaactgtctggtctttgatacacgtctacattattttagaaagggctcagtgtctgagtatctctagcgctgttatcaaggtagtgaactcctaagactagtctatgcgattgcttttgtttggggtttttagacttttttttctaagagacgggatctcttttgcccaggctttagtgcagtggtgagatcatagctcaccggagcttcaaactcctgggcttaaccagtcctctcgcctcagcctccaaaatagctgggactactaccatgcctggctgaagggttgggagacttcagagcagcttcttgcctgcattggttttgatgtggctaaagtggtgagcatttctgtgtctttttttttttttttttttttttgccaccacagctccccagtttctctggttttaataggttgtatattgttcccacstttcagccctttctttttctctcttctccttttccctactctctaaaatacctaaagggtagtagtcagataggttattttttttcaattgctaaacttcctattcaccttatgccttgaatttgtacgtttactttttgcctttaaaaacaaagttcgagatcagcctgggtgacatggtgaaaccctgtttctacaacaaatacaaaaattagcctagtgtgctggtgcatacctgtaatcccagctacttgggaggctgaggtgggaggaggatcagttgagcccaggaggttgaggctgcagggagccatgagcatgccactgcactccagcctgggtgacagagcgagaccctgtcttaaaagaaaaaagaaaaaaatgaatatgaatataactatatttttaaattctgatatgcattttatagaaaatttaagcaatacaggaaaatgtaaagaaagtaaaaatgaacagcamctcaactgtttagagataactactaatacatttagtagccattatgtctctctactctctatgcctgtataattaactttaatatatattgtttgattttaatatttgtatttaatgtcttactaatcatatgtagtaaaatcattatggatgctgtcttaacctgtttaaacccaatgatatattgtggagataattccattttatatctacattatctagaataccatgtactttacacccttatttacaggtatatccttatttacagattctcttactatagattctgaggttgttttgatttttttgttattttaagcagcattgaggagaacctcctagtgggaaaatctttgcacacatttttaatgattccttcaagtcacatttctaaggaaactgctgggtcaagaggcatgcatatttcttttttttaatcatattgccaatttactcatctgctagtattcttgaaggaatataaacagttcggcagtatttttacacttcagtgtgtattttgttaagaaaacagacctgactgaaagacctagaatcactttattctgtaaacaataggtttcttttcttgttttctatttttattttttatttaaagtagaatagagatagggtcttgctatgttgcccaggctggtcttgaactcctgacctcaagcctagcaaacagtagttttcttaatattgttctgcaaagcctctgaaattcccagatgtcataaagttctcttttgaaaattaagaatggccttttagctgggcatggtggctcacrcctgtaatcccagcactttgggaggccgaggcaagtgaatcagctgaggtcgggagttcaagaccagcctgaccaacaatgtgaaaccctatctctactaaaaatacaaaaattagctgggcatggtggcaggtgcctggagtcccagctacttgggaggctgagacagaactgtttgaacccaggaggcggaggttgcagtgagccgaggtcatgctgctccactccagyctgggtgacagagtgagactgcatcttaaaaaaagaaaaaaaaggggggaggagccaagatggccaaataggaacagctccrgtctacagctcccattgtgagcaacgcagaagacgggtgatttctgtatttccaactgaggtaccgggttcatctcactggggagtgccagacagtaggtgcaggacagtgggtgcagcgcaccacrcgcaagccgaagcagggcgaggcatcacctcacccgggaagcgcaaggggtcagggaattccctttcctagtcaaagaaagcagtgacagagggcacctggaaaatcggctcactcccaccctaatattgtgcttttccaacgggcttaaaaaatggcacaccaggagattatatcccgcacctggctcggagggtcctactcccagggagtctcgctcattgctagcatagcagtccgagatcaaactgcaaggtggcagtgaggctgggggaggggcacctgtcattgccaagttagttgtttgattaggtaaacaaagcggccaggaagctcgaactgggtggagcccaccacagctcaaggaggcctgcctgcatctgtaggcgccacctctgggggcagggcacagacaaaaagacagcagtaacctctrcagacttaaatgtccctctctgacagctttgaagagagtagtggttctcccagcatgcagcttgagatctgagaacgggcagactgcctcctcaagtgggtccctgacccccgagtagcctaactgggaggcaccccccagtaggggtggactgacacctcacayggccaggtactcctctgagacaaaacttccagaagaacgatcaggcagcagcatctgyggttcaccaatatccgctgttctgcagccactgctgctgatacccaggcaaacagggtctggagtggacctccagcaaactccaacagacctgcagctgagggtcctgtctgtwagaaggaaaactagcaaacagaaaggacatccacaccaaaaacccatctgtacgtcaccatcatcaaagtccaaaggtagataaaaccacaaagatgggaaaaaaacagcasaaaaactggaaactctaaaaatcagagtgcctctcctcctccaaaggaacgcagctcctcaccagcaacggaacaaagctggacaaagaatgactgacgagttgagagaagaaggcttcagatgatcaaactactctgagctacaggaggaagttcaaaccaatggcaaagaagttaaaagctttgaaaaaaaattagatgaatggataactagaataaccaatgcagagaagtccttaaaggacctgatggagctgaaaaccaaggcacgagagctacgtgacgaatgcagaagcctcagtagccratgtgatcaactggcagaaagggtatcagtgatggaagacgaaatgaatgaagtgaagcgagaagagaagtttagagcaaaaagaataaaaagaagtgaacaaarcctccaagaaatatgggactatgtgaaaagaccaaatctacatctgattggtgtacstgaaagtgacggggagaatggaaccaagttggaaaacactctgcaggatataggaaaacttccccaatctagcaaggcaggccaacattcaaattcaggaaatacagaggacgcgacaaagatactcctcgagagagcaactccaagacacataattgtcagattcaccaaagttgaaatgaaggaaaaaatgttaagggcagccagagagaaaggtcgggttacccacaaagggaagcccatcagactaacagcrgatctcttggcagaaattctacaagccagaagagagtgggggccaatattcaacattcttaaagaaaagaattttcaacccagaatatcatatccagccaaactaagcttcataagtgaaggagaaataaaatactttacagacaagtaaatgctgagagattttgtcaccaccaggcctgccctaaaagagctcctgaaggaagcactaaacatggaaaggaacaaccggtaccagccactgcaaaaacatgccaaattgtaaagaccatcaaggctaggaagaaactgcatcaactaacaagcaaaataaccatctaacatcataatgacaggatcaaattcacacataacaatattaactttaaatgtaaatgggctaaatgctccaattaaaagacacagactggcaaattggataaagagtcaagacccatcagtgtgctgtattcaggaaacccatctcacgtgcagagacatacataggctcaaaataaagggatggaggaagatctaccaagcaaatggaaaacaaaaaaaggcaggggttgcaatcctagtctctgataaaacaaactttaaaccaacaaagatcaaaagagacaaagaaggccattacataatggtaaagggatcaattcaacaagaagagttaactatcctaaatatatatgcacccaatacaggagcacccagattcataaagcaagtccttagtgacctacaaagtgacttagactcccacacaataataatgggagactttaacaccycactgtcaacattagacagatcaatgacacagaaagttaacaaggatacccaggaattgaactcagctctgcaccaagtggacctaatagacatctacagaactctccaccccaaatcaacagaatatacattctttgcagcaccacaccacacctactccaaaattgactacatagttggaagtaaagcactcctcaacaaatgtaaaagaacagaaattataacaaactgtctctcagaccacagtgcaatcaaactaggactcaggattaagagactcactcaaaaacactcaactacatggaaactgaacaacctgctcctgaatgactactgggtaaataatgaaatgaaggcagaaataaagatgttccttgaaaccaaggagaacaaagacacaacataccagaatctctgggacacattcaaagcagtgtgtacagggaaatttatagcactaaatgtccacaagagaaagcaggaaagatctaaaattgacaccctaacrtcacaattaaaagaactagaaaagcaagagcaaacacattcaaaagctagcagaaggcaagaaataactaagatcagagcagaactggaggaaatagagaccaaaaaaacccttcaaaaaattaatgaatccaggacctggttttttgaaaagatcaacaaaattgacagaccgctagcaagactagtaaagaagaaaagaagaatcaaataggcgcaataaaaaatgataaaggggatatcaccaccgatcccacagaaatacaaactaccatcagagatactataaacacctctacgcaaataaactagaaaatctagaagaaacggataaattccttgacacatacatcctcccaagactaaaccaggaagaagttgaatctctgaatagaccaataacaggctctgaaattgaggcaataatcaatagcttactaaccaaaaaaagtccaggaccagatggattcacagccaaattctaccagaggtaggtacaaggaggagctggtaccattccttctgaaactattccaatcagtagaaaaagagggtatcctccctaactctttttatgaggccagcatcatcctgataccaaagcctggcagagacacaaccaaaaaaagagaattttagaccaatatccttgatgaacatcgatgcaaaaatcctcaataaaatactggcaaaccaaatccagcagcacgtcaaaaagcttatccactatgatcaagtgggcttcatccctgggatgcaaggctggttcaacatacacaaatcaataaatgtaatccaacataaacagaaccaaagacaaaaaccacatgattatctcaatagatgcagaaaaggcctttgacaaaattcagcagcccttcatgccaaaaactctctataaattaggtgttgatgggacgtatctcaaaataataagagctatctatgacaacccacagccaatatcatactgaatgggcaaaaactggaagcattccctttgaaaacaggcacaagacagggatgccctctctcacgactcctattcaacatagtgttggaagttctggccagggcaatcaggcaggagaaggaaataaagggtattcaattaggaaaagaggaagtcaaattgtccctgtttgcagacaacatgattgtctatctagaaaaccccatcrtctcagcccaaaatctccttaagctgataagcaacttcagcaaagtctcaggatacaaaatcgatgtgcaaaaatcacaagcattcttttacaccaataacagacaaacagaaagccaaatcatgagtgaactcccattcacaattgcttcaaagagaataaaatacctaggaatccaacttacaagggatgtgaagggcctcttcaaggagaactacaaaccactgctcaatgaaataaaagaagatacaaacaaatggaagaacattccatgctcatgggtaggaagaatcaatatcgtgaaaatggccatactgcccaaggtaatttatagattcaatgccatccccatcaagcaaccaatgactttcttcacagaattggaaaaaactactttaaagtttatatggaaccagaaaaagagcctgcatcgccgagtcaatcctaagccaaaagaacaaagctggaggcatcacgctacctgacttcaaactatactacaaggctacagtaaccaaagcagcatggtacgggtaccaaaacagagatatagatcaatggaacagagcagagccctcagaaataatgccgcatatctacaactatctgatctttgacaaacctgagaaaaacaagcaatggggaaaggattccctatttaataaatggtgctgggaaaactggctagccatatgtggaaagctgaaactggatcccttccttacaccttttacaaaaattaattcaagatggattaaagacttaaatgttagacctaaaaccataaaaaccctagaagaaaacctaggcaataccattcaggacataggcatgggcaaggacttcatgtctaaaacaccaaaagcaatggcaacaaaagccaaaattgacaaatgggatctaatgaaactaaagagcttctgtacagcaaaagaaactaccatcagagtgaacaggcaacctacaaaatgggagaaaatttttgcaacctactcatctgacaaagggctaatatccagaatctacaatgaactcaaacaaatttacaagaaaaaaacaaccccatcaacaagtgggcgaaggatatgaacagacacttctcaaaagaagacatttatgcagccaaaaaaacacatgaaaaaatgctcatcatcactggccatcagagaaatgcaaatcaaaaccrcaatgagataccatctcacaccagttggaatggcratcattaaaaagtcaggaaacaacaggtgctggagaggatgtggagaaataggaacacttttacactgttcttgggactgtaaactagttcaaccattgtggaagtcagtgtggcaattcctcagggatctagaactagaaataccatttgacccagmcatcccattactggstrtatacccaaaggattataaatcatgctgctataaagacacatgcacacgtatgtttatagtggcactattcacaatagcaaagacttggaaccaacctaaatgtccaagaacgatagactgtattaagaaaatgtggcacatatacaccatggaatactatgcagccataaaaaatgatgagttcatgtcctttgtagggacatggatgaaactggaaaccatcattctcagcaaactattgcaaggaccaaaaaccaaacaccacatgttctcactcataggtgggaattgaacartgagaacacatggacacaggaaggggaacatcacacactggggactgttgtggggtggggggaggggggagggatagcattaggagatatacctaatgctaaatgatgagttaatgggtgcagcacaccagcatggcacatgtatacatatgtaagaaacttgcacattgtgcacatgtaccctaaaacttaaagtataataataataaaatttaaaaaaaaaagaaaaaaagaatggccttttatgattcctcagagatctagaaccagaaataccatttgacccaacaatcccattactgggtatatacccaaaggaatataaatcatcctgttacaaagatgcatgcatgcgtatgttcaytgaagcactatctgcagtagcaaagacgtggaatcaacccaaatgcccatcaatgatagactgggacctgggagccattatcctcagcaaactaacacaggagcagaaaaccaaacactgcatattctcacttacaaatgggaggtgaatagtgagaacacatggacacagggaggggaacaacacacactggggtctgttggaggttgggatgggggaagagagcattaggaaaaatatatttagtgcatactgggcttaatacctaggtgatgggttgataggtgcagcaaaccaccatggcacacatttacctgtgtaacaaacctgcatatcctgcacctgtaccctggaacttaaaataaaaataaaaattaaaaaaaatagtcacattaaaaaaaaagaatggccttttatggaaacccataggacccaagaaagtaataattttctaaagaatagaaaattagagccatatagatagcgtaattaaaataataatatttgtttcagaataattttaaaaattgtaaccttaagttttatgcacattttttaaaaaatcaggattccttttcttagaattaaggaaaaagtcagtgccgttttacgataacaagaagacttggttatcattgctgataggggcagatgctacattttatctctcatttctaaactttcttactaaagtcagaatttaaaaatgaacttggccaggcatggtggctcatgcctgtaatcccagcacttygggaggtccactcggaaggatcacctgargycaggarttcagaaacagcgtgtacaacaaagcgagacttcgtgtctctaaaaaaatttttaaagaattagccagrtatagtggcaggtgcctgtaccccgagctacccaggaggctaaggcaggaggatcacttgagctcaggggttcaaggctgctgtgagctatgatcgtaccactgcaccccagcctgggttgacaaagcaagacccagtctctaaaggaaaaaaaacccttggctttcagtagtactctgtttattgatgttatgccaaaaggaaccagttttcagctgtacccaataatatattctctgcatatggggactgtagttctgaccttagaaaaatacatagccattaattaattaaattggtctccttgaaagcacacttgttgaaaggtctgtccttttacccaaaggaggaagaggtttgattaatttacagattctgctctggtgtataacacaacatttgagaaaatgtcaggttctcatgagttgaaaattatacaggaaatttatttatttattgttgtttgacaaaacgagtatgatctaaacatttatttgtttattgaactaggttcaggagtccaagaggtcttgtgatgtagtcaagtttttaaagtggcagtatgtcttgccaggaaaagaacctggtcttagatactgtgggttctgcttctggtgagagagtcgcttaaattcttttttttttcttcttcttttttttttgttttttgagacagatgttgcctaagctgctgtgcagtagagcgatcacagctcackgcagccttgacctcctgggctcaggtgatcctatacctcagctttccgaatagctggggctataggtatatgccaccatgtctggctaatttttaaaactttttttgtagaggtggggtttcactttgttgcccaggctggtcttgaacttctgcgctcaagtgatcctcctgcctcggcctcccaaagcactgggattacaaatgtgtcccactgtgcctggctggattctaatgtgaactatattagatgttaagtttaatattttaatatttttaatatcttacgttttaagcgaaagaagacaaatgcctttaaaactttttagaggctgggtgcggtggctcacaccttcagtcccagcactttgggaagccgaggttggtggatcacctgaggtcaggagtttgagaccagcctggccaacatggtgaaaccctgcctctactaaaaatacaaaaaagtaaccaggcttggtggcaggtgcctgtaatcccagctacttgggaggctgaggcaggagaattgcttgaacccggtggtagaggttgcagtgaaccaagatcgcaccattgcactccagcctgggcaaccagagcaaaactccgtctcaaaaaacaaaacaaactttttagtttgaggccgggtgcagtggtttacgcctgtaatcccagcattttgggaggtggggcgagtggatcacgaggtcagaatttcaagaccagcctgaccaatatgatgaaaccccatctctactaaaaatacaaaaattagccagcttggtggcatgtgtctgtagttccagctactcaggaggctgaggcaggagaatcgcttgaacccaggaggcagaggttgcagtgagccaagattgtgccactgcactccagcctgggtgaccgagactctgtctcaaaaacaaaacaaaaaactttttagtttgctagccggaaattttcatctaatcatgtctaagatttcttttaaaatacttcaatgcctgctccctgtcttaaaaagttgggaggggagtagataaaacaagaatagtaaactattgataattattgaagctgggtagtgagtacatgggagttcattatacttttccctttttctctggccttagatatatgtttaacaatgtgtatgtaaaaaaaagaaaagtaacacaacaataagtgcaaatctgctgagattgcacacaggcacaggttcctcagtgttaacttgtctgataggaagcaacatggcagtgacctcagagaaactctagaggaaaaaagcgtaatggctaatgaagcatatttgctggaaagagagaaaaactcagaactgtcattccccatgtgtgactctttgtttctgttaaacatagcagatatgtctgtgccaattaaacttgaatgttagtatgatatttttagaaattcatgttgcggactgtaaactcaaaataaattttggttgcggttgtcgaatgtatcaaacaaatattaccatatttttatagaacaaggaaacttagtatacagaaagtacacttccaacaaatgtttttcactcctccctgggtcttttagatgtggggttataatgttgcttttaaatgcagaataattttatactcttggaaataaaaattktttgagatggagtctcgctctgtctcccaggctggagtgcagtggcgtgatctcggctcactacaacatctgcctcctggttcaagcgattctcctgcctcagcctcctgaggagctgggattacaggcgcgtaccaccatgcctggctaatttttgtatttttagtagagatgtggtttcaccatgttggtcaggctggtctcgaactcctgacctcaagtgatccactcaccttagccttccagagtgctgggattacaggtgtgagccaccgcacctggccaaaataaaaactttattcccactaaatatgtattactcagggaggagttgraaagaaatataatggagaaagaatttaagagagctttgttttggtaaagatttggggaaatgttcagaaaatggttatagaacgacaccgtgcttaataaataacattttgaaatgggaaaaacaaatatgctgtaacataaagccaacttacctagatttgttattatatgggtcatatatatagcatatatatatagtttctaatttgagaaagaatttttaaaatcacagaaaatgcctggttattaaaactagaaagcaaagaaaaaataacttgaaagtacaaacactagccatacagtgttaatatttcactgtatttcctttccatttttaaagcttttgtgtagattttcttgttaccttacatattcccccacttttttttttttttttttttttttttttttttggagacagtgtcttactctctcacccatactggagtgcagtgttgtgatcctgactcactgcaacctctacctcgagtgatcctcccacctcagcctcttgagtagctggaactacaggcatgtactaccatacctggctaatgtttgttttattttgttttgtagacatgggtttcactgtgttgcccaggctggtgtcaaactcttgggctcaagccatccacctggcttagcctcccaaagtgctgggattacaggtgtgagccaccgcgcctggcccatatatccttttatcctgatttttcactaaacatttgaaatatgtacttttcattattatatatccttttcattactacatacattttagaggctgtataatattacattytgggtatgccttaatttgcttaacattcttttgtcatttataatttttcactgttaaaaccatgctgtcaaataccacatgttcacatttgtaagtggaagctaaacattgggtactcatagacataaagatggcaacaacagaaactggggactattagatggaggagaaaggaaggaggggaatggttgaaaaacgggtattatattcaatacttgggtgacgtgggaacatttgtaccccaaacctcagcattatacaatatacccaaatagcaaacctgcacctgtaccccctgtatctaaaataaaagttggaaaaagaaataaaaatagataaataggaaaggaaatgaaaaaacatgctgctaacatcatctttttgtacgtgaattttttagtttttttggattctttttcacaggataaaatcccaaggatgtaggctctggctctgataaggactttttagtttattatgaatggactgagaagcttctgtgtgtctgtggtgggggcgattgtctaaaaactgattccccttccctttgtttttatgcttttgattttttcaagaaactaggttattttccctgtagaatgtcccatattttggattctttgtttattgtctatttcttggtggttaacttgttgctctatctcctggatttcttaagaactttcctctaaagtcttaattagattcaggttcaacattctttgggggaaagaataaatattttattagtggttttatatagttcatagtgcatcctatcaggagggcataatgtctgattgtctcaagctgtagatattttcattagtttattcttgcctttccacttttggtggtgttccttttgatgcacaggagatttaaattttttttgtagttgaattaatattttcctttttatttcattgtaatttcagtttcactctattcatattcatagatttgatagttattggctgggcatggtggttcacacttctaatcccaacactttgggagactgaggtgggaggatcacttgagcccaggacctcgagaccagcctgggcaatacagggagaccccgtctctacaaataaaataataaaaattagctggatgtggaggcacatgccagcaattccatctgcttggaaggctgaggcaggaggattgcttgagccctggaggttgaggctacagtgagctgtgcttgtgccactgcactgcagcatgggtgacagagtgaaaccctgtctcaaaaataaaaattaaaattaaaaatgtgacattgataatatcttctaaaatattttttatgaattaacttttaaaatgtattttaatgtgtattaaagttacttattacatatttaattaattcattcattaattttgagatggagtctcactctgttgcccaggctggagtgcagtggtacaatctcagctcactgcaacttctgcctctcaggttcaagcgattcttgtgcctcagcctcctgaatagctgggaatacaggcttgtgccaccatgcctgactagtttttgtatttttagtagagacaggttttcaccatgttggccaggctggtctcaaactcctgacctcaagtgatctggctggcctcccaaagtgctggaattacaggcgtgagccattgtgccggccatatttagtaaatttaaatcactttttatatgttgtttgtatcttatggatagagagtagatagagatgtgatatacttggaatttattttgctgtagggtaaggatctgagtagattatttttcaaaaaccagccacatgttccagtctgtgtttattgaataaacattccctttctgttttctaattttccttttattacrtgctaagtaattacatatactagtgtctgtgggctttctctttttttcctagcaacttgtttrtatgctgctatacttttgatgattgtcataacgttataagagaatttctaataggactaacctttttctaatttctcaccttttttcaaaatggtagcacagtatgtttgatcttaaacttccgtaacagcctagtgggtttttttccagataaaattttataagtcacttaccttataaaaactttgaaaaggtatctatgctgacaagcaaggagcataaattacttttataaaaagtcagatcttagtagcaggtactgtcaaagaagcaagctaatgacttggagtgtaaggagtgataccacacacatcatcttactcctaacattttctgttacaaaacatatggaaactctacgtagcagttttgcatctttatgaaccatttggtatgaaatctctcttgttttttgagacaaagtctcactttgtcaccaaagctggagtgcagtggcccggtcaacgctcactgtagcctcaacctcctggagtcaagggatcctcctgccttagcctactgagcctcccaggtagttgggactacaggcatgggctaccatgcctggctagtttttgtattttttgtagagatttaagtgttgtctaccaaaaaaaccttttttgtctcactacaacatttttttcagtaccatttacttatttgagacagggtctggctctgtcgcccaggctggagtaatggtggcacagtcttggctccctgcaacttccacctcccaggctcaagccaccctccacctcagcttcctgagttgctgggactgcagttgcatgccaccacactgaggtaatttttatattttttcatagagatggggttttgctatgttgctcatgctggtctcaaactcctgggctcaaagaatccacccgttttggcctcccaaagtgttgggattacaggcatgagccaccgtgccctacccatttttaaaaaattttaatttttgtggatacatagcagatgtatatatttatgggttacatgagatatttttatacatgcattcaatgcataataatcccatcatggaagatgaggtatccatcccctcaagcatttatcatttgtgttacaaacaatccagttatactcttaattattttaaaatgtacaattacattatttttttcctatagtcaccctgttgtgctagcaaatactaggtcttattcattctgtttttttgtgcccattaaccattcccactttcccccatcctaccttctacccttctcagcctctggtaactatccttctactttctatgttcatgagttcaattgttttaattttttttttttttttttgagacggagtctcgctctgttgcccaggctggagtgcagtggtgcgatctcggctcactgcaacctccacctcccaggttcaagtgattctcctgcctcagcctcctgagtagctgggactacaagtgcccaccaccacgcccagctaatttttttgtatttttagtagagacagggtttcaccgtattggccagactggtcttgaactcctgaccttgtgatctgcccgttttggcctcccaaagtgctgggattacaggcgtgagccaatgtgcctgaccagttgttttaatttttagctcccacaaataagtgaaaacatgtgaagtttgtctttctgtgtctggcttatttcacttaacataatgacttccagttcaatccacggtgttgcagacaacaggatctcattctttttatggctgaatagtgctccattatgtataagtaccacattttctttatccattcatctgttgatggacacttaggttgcttccaaatcttagctattgtgaatagtgctgtaataaacgtggaagtgcagatatcgcttcgatatactgatttcctttattttgggtatatacctaggagtgggatcactggatcatatggtagctctatttttagttttttgaggaacctccaaactgttctccatagtggttgtactaatttacattcccaccagctgtctacaagggttcccctttctccacatccttgccagcatttattattgcctgtctttgtataaaagccattttaactgggatgagattatatctcattgtagttttgatttgcattcctctgatagtgatgttgagcagcttttcgtatacctgtttgccatttgtatgtcttttgagaaatgtctattcagatattttgcccatttttgattggatgattagattttttttcctgtagagttgcatgagcttccttatgtattttggatattaatcccttgccagatgggtagtttcaaaatattttctcccattctttgggttgtctcttgttgatagtttcctttgctgtgcagaaggtttttaacttgatgtgatcccatttgtccatttttgctttggttgcctgtgcttgtggggtattactcaagaaatccttgcccactccagtgttctggagaggttccccaatgttttcttttagtagtttcatagtttgaggtcttaaatttaagtttttaacccattttcatttgatttttttttttatatggtaagagatacggggtcaaccttcattcttctgcgtaaagatatccagttttcccagcaccattgactgaagagactgtcctttctccattgtatgttctcggcacctttgtctaaagtgagttcactgtaaatgtgtggatttatttctgcattcyttattagactgtttcactggtctaatgtgtctgtttttatgccagtatcatcctgttttggttactctaactgtagtataatttgaagtcaggtaataaaattcctcgttttgtttttttcctcaggatagctttggctattctgggtcttttgtggttccatgtaaattttaggtttgtttttttctcttcttttcttttttttttggtgggggggttggggggcgggacagagtctgactgtgtcgcccaggctggagtgcagtggcacagtcttggctcactacaayctctgcctcccaggttcaagcgattcttgtgcctcagcctcctgagtagctaggattacaggtagtcgccacctcacctggctaatttttgtatttttagtagagacgatgtcttaccatgttggccaggctggtctggaactcttggcctcaagtgatctgcccaccttggcctcccaaagcactgggattgcaggcatgaggcatcacgcctggcctagaattgttttttctacttttgtgaagaacattattggtatttttatagggattgcatgaaatctgtagattgctttggggagaatgggcattttaacaatattgagtyttccaacccatgaatatggaatgtctttccagttttttgtgtccttttcaatttcttgctccagtgttttagttttcattgtagggacttttcacttatttggttagttcctaggtatttaattttatttgtagttattgtaaatgggattactttmttgatttcttttttagattgtttgctattggcctatagaaatgctagatttttgtaggttgattttgtatcctgcagctttactgattttgtatgagttctaatagttttttggtggagtctttaggtttttccaaatacgagatcatatcatctgcaaacaaggataacttgactccttcctttccaatttggataccctttatatctttctcttgtctgattgctctagctaggacttctagtaccgtgttgaataacagtggtgaaagtggatatccttgttgtattccagatctcagaggaaaggtttttttttttcctcatcrgtatgatactagctgagagtctgtcatatatggtgtaattatattaagatatgtttcttctataccaagtttttttaaggtttttattatgaagggatgttgaatgttatcaagtgctttttaagcatccattgaaatgatcatatggtttttgttcttcattttgttgatatgatgatatatcagattgattgatttgcayatgttgaacyatccttgcrtccctgggataaatcctatttagtcatgatgaatgatctttttaatgtgttgttgaatttggtttgctagtattttgttgaggatttttgcatcaattttcatcagtgatattggtctgtaattttttttcttttaatatgtaatatgtctttgattttggtatacaggcctcatagagtgagtttggaattattccctcctcctctagttttcagaatagtttgagtaggattggtattcgttctttaaatgtttggtagacttctgtagtgaagccatcaggtcccaggcttttctttactgggagattttttattatggctttgatgttgttgcttgttattggtttgttcaggttttggatttcttcatggttcaatcatggtaggttgtagtatctaggaatttatccattttctctagattttctcatttattggcatatagttgatcatagcagccactaatgatcctttgaatttctgtggtatcagttgaatgtktccttctttatctctggttttacttagttgtgtcttctctttttcttagtctgtctagcagtttgtcaattttttttttcaaaaaaaaaaaaaccttttgtttcattgaagttttgtattttttttgtttcagtttcacttatttctgctctgatctttattttttgttttgttttgtattttgagatgaaatctcactctgttgcccaccctggagtgcagtggcacaatctcggctcactacaacctccacctcccaggttcaagctatcctcctgcctcagcctcccgagtaactgagattacaggtgcacaccaccatgcccggctaatttttttgtatttttagtagagatggggtttcaccaagttgtccaggcttgtcttgaactcctgacatcaagtgatccacctgtctcagcctcccaaagtactgggattacaggcgtgagccactgcgcctggcctgatttttattatttcttctactaatttggggtttggtttgctcttgcttttctagttctttaatatacatcattaaatagttgtttrtttgaggtttttttcttttttgatgtaggcacttatagctataaacttgcctctcagtactgcttttgttgtatcccatagcttttcgtatgttgtgtttcctttatcatttatttcaagaaaattttcaataattccacttattattgatctctagttttattctattgtggtcagagaagatgctttatattatttcagttttttwaaatgttttaagacttgttttgtgacataacatatggtccatccttgagaatgatccatgtgctgaggaaaaagaatgtgtactctgcagctttgggatgaaatgttatgtatgtatctattaggtccatttggtctgattagktccatttggtacagattaagtctgatgttcattgattttctctctggaagatctgtccaacgctgaaaatgggatgttgaagttaccagctattattatattgggrtctgtctctctttttagctgtaacaatatttgctttatgtatctgggtgctccaacactggtatatggatccagtgttgggtccatatacaattacaattgttacatcttcttgctgaattgccccctttatcattatatagtgaccttctttgtctcttcttatagtttttgtcttgaaatctatttcgtctgatatacgtatagctactcctagtcttttttgatttccattgtcatggaatgtgtttttccatccttttattttcagtctatgtgtgtctttgtaggtgaaatgtgcttcttgtrggcaacagatcactgagtcttgtttttttgttttttgtttttttaatcccttcagccactctgtctttttattggagaatgtagtccatttacattcagtgttgttattgatgagcaagggcttattccttccattttgttacttattttctggttgttttatgggtcttgtcttccatccttcctccctgtcttccttttagtgaaggtaatcttctctggtggtatgattttaatttcttattttttattttcagcgtatctgttgtatgttttttgattagaggttaccatgatgcttgcaaatactatcttataacctattattttacactgatagcctaacactgtttkcataaacacacaagcaaaaagaaaactaataaaaactctacaccttaacttcatccccctgctttctaactttttgttgkttttatttatatcttattgtactgtctgtgtcttgaaaagttgttgtagttatttttgatttatcttttagtctacttaaaataagagtaatttacacaccacagttacagtgttattctgtgtttctctatataattactgttaccagtgagttttgtaccttgagataatttcttaatgctcattagtgtccttttctttctgattgaagtacacctgttagcatttcttctaggctagatctggtgttgatgaaatccctcagtgtttgtttgtctgggaaagtctttatttctctatgtttgaagtatattttagccagataaattattctggggtaaaagtttttttccttcagcactttaaatatgttatgcaactctcttctggcctgtaaggattccactgaaaatctgctgccaaatgtattggagttcagttgtatattgtttcttttctgttgctgcttttaggattctttctttatccttgacctttgggaatttgattatgaaatggcttgagatagctttctttgggttaaatctgcttggtgttctgtaatcttcttatatttggatattgataacctttcctaggtttctgctattatttctttgaataaacttttttttttaaatacatcttctattcctatctctttttctgcctcctcctgaagaccagtaactcttaggtttgcccttttgaggctattttctagatcttgtaggtgtacttcattcttactcttttttcttgtgtctcctctgactgtattttcaaatagtctgtcttcaggctcactaaatctttcttctgcttgatccttctgctattaaaaaactctgatgcattcttcaatatgtcagttgcatatttcaactccagaatttctgcgtagttcttttttaattatttaaatctctttgttaaatttttctgatagaattctgaactccttctccntgttatcttgaattttgttgagttttctcaaaacagctatttgaattctctgtctgaaaggtcactgtattagtccattctcgcattgctataaatatctgagactgggaaatttataaataaaagaggtttaattggcctatgtttccacaggctgtacaggtaacgtgattctgacatctgctcgacttctgggggtgcctcaggaaacttagaatcatggtggaagtcaaagtgggagcaagacgtctcacatgattagaagcaggaggaagaggggcggagagctgctacacacttctaaacaaccagatcttgcgataactcactatcrggaggaacagtaccgaggggatggctctaaaccattcrtcaaggaccaccctcatgatccagtcgcctcccaccaggccccacctccaacattggagattataatttgacatgatatttggtggggatacagattcaaaccatatcagtcacatatctctgtttctccaagattggtccttgctaccttgtttagttcatttggtgaggtcatgttttcctggatggtcttgatacttgcggatgtttgttggtgtctgggcattgaagagtcaggtatttactgtagtctttgcagtctagactttttttttacccactcttcttaggaaggctttccaggtatttgaacttgggtattgagatctaagccgtgtctgccttagggggcaycccaagcccagtaacctgtggttcttgcggatttgtagagttaccaccttggtagtttcggataagacctggatgaattctctggattaccaggcagagactctggttctcttcgcttactttctcccagacaaactgagtcagagtgtgtgtgtgtgtgtatgtgtatatatgtgtgtgtgtgtgtgtgtctctctctctctctttctctgtgctaattcacctggaggtggggtggggtgacagagtcacccctgtggctaccaccactgggactgtgctgggtcagactggaagccatgagtatatctttatccctagtgttcattaagtagcctgcagtggacacttaggtccctgagctgatagcacaagaggcagatgttcatgcagtgatggcggatggctggacacccctgcacagtacttgcaagtggtaccagagtggcttctttcttacctcagtgtgatgcagatatcaatgcccaaacaaaagcctttttttttttttttttttttttttgagacagagtcttgctctgtcrcccaggcttgggtgcagtggtgcaatctgcgctcactgcaacctccacctcccaggttcaagctatcttcctgcctcagcctcccaagtagctgggactacaggcacacgccgccacacccagttaatcaaaccaaagcctcttgacccctttgcatcttgctgctgggaaaggagacagcaaagataacctagaactcctcctgatgaaccattacatcaaaccagggctgaaaaacaacttcaaagaaacggcatttgatattgccaggaggacaagtatctatcactccttctttgtaatggtggaaggctatacaaattcttcacctcagtcttaatggttctagtaattttaggtgtctaagtaccagtggctccttcgtgcaagatataaaatattcccataagacaaagttgatttaaaacgtcttactacaaaaattcagtggtaaggtagttactattatgttctttaaagtgaaatgcctgacctgatatcagaatgtatttgaaagatgtttggatatatctttaattatttttgtggagctcgtgatttttatcagagataattttaacttgcctagacctaaaaacttgacatgactttgggaggccgaggcaggcagatcacttgaggtcaggagttcgagaccagcctggccaacatggtgaaaccctgtctctactaaaaatacaaaataaaagtaaaaataaaaataaaaagctgagtatcgtggcacatgtctgtaatcccagctacttgggaggctgaggcatgagaatcgcttgaacctggaaggcagaggttgcagtaagccgagatcgcaccactgcactccagcctgggccacaaagtgagactcagcctcaaaaaaccgacaaaaaaaaaacttgacacaagttgaacagaaactgattatttttggtgctgatccaagagaaatgtatttttaaatactgtacatcctggatctttgttgagtatttartatattgatatatatttttataaggtgaggtaactcaaaatttaagtcttaaatattgatgcagtcatctgtcttctctacattaccatagccagttactttcattttaaaccagaagaactaacatattagtgacttgaatcttcataagttaaaggaaaaaaaaaaaacactaaaaagcctagatgtttgtcttttagacaatagataatttttaggaaagcagttagctaggtgtttcatccatgaatgttgtatactgcctcccctaccacagttcacacaattctgtggatagtcctccctggtcaacctacatgtgatctttattctaatggtgaatcagtatgaccttttagacatgcatacaactacattgtggtcaaagagatcatagtgtatctgccatccaactgcttttacctgcctaatcctgctgatttgggcactgcttacataatctcttgagttcacaggaaatgttgattttccaaggtctttgttttatagaaaccttacaaagcaaagtgataagggaaaaggaattctaaaagtgaggggatgattattatattgaggctgaaaccacacagtggctcaggcttaaaaacagtatggatagtgacaaaaagcataatataaacattcaagaaaataaagtataagttttaacaacaaaaatgatttctagattacttacaatagctaatacaatgtaaatgccatgtaaatagcatgtactgtattttttatttgttgtactgtattttttgttgttgtattggctttttaaattgtttttttttcttcaaatattttcaatccacagttggtcatatcttcagatgcagaactgtggatttggagagcctgctgtaataggagggcaaatttaagcattcatattttaacaatatttaatagctcacaatatttaatgtgagcttatttacatgtagtttctttaatcagatcaaaaggatgattatccaatgacttgtgcaagctcttagtctccaaagcttaggaaagaactgcaggtgatgtagtccaagtcaatgaaataagcctcagaaaaccgatgcctacaaattgtgacttgttaaaatcagagtcctgtttataatgtctgaacccagaacttgatcctaggtcttctggtcccacgggaaccttttctctcattgtacaaaataattcagccagtgaaataatcatcaacatatctgagatggaacatgctttcatttcaaaccagatcctcttccagccttccgtttttgaacaagttggtaccacaatctaactagttgccaaagccagaaacttagaagttctgaatactttatttttcccaattcccccatatctaattttatcctcaataacttatcaggtaccatcaattttatctcctgtataggtctcaaatctacctgcttctctctatcattctcccacctccctatttcactactatataactcactaattttctcacaggtctatcctgaccattctcccatctgtgttctccatagtgaagccagaatgatctttttagaatgagaatttttccccctccctgcctggtctcttctacaccacttaaagccacctcagtgatttttccattgctgttatattgaggtctatgagcctaaatatgttagcaagccctgcccaccctcttktcttaaacctcccctctcttcctgtatctttgccctccagacacattgggcttattttgattttggaatgcttcttacctactccccctatcccccagtctttgcctaattaatgactaattattctttaagtcctaggtcaggcatctgtcactcagggaagtctctgacatcccagagtactccatgccacccctttattttaatcaacattaagtaaactgtgcttctttcttcagagaattatctcagtttatagccatgtagtcataattgcattcctttgattaatgtcagtcttctccccaaactggaaattccatgagagcaggcatttgttattttttgtcccctggtgtatttttttattttctattwtatttccagtacacagcacagtgaaatggctccataaacgttacctgagtaagtgaagtaattctctgtaaggtctggctgaagaccttcatgtctccarataagtagcctacaagtatctctctattctgattttacttytaggccagttccagcttttctgttgtagtgagtagaatggagatataagctcagtttctgctgggcggatcaaggaagttgcagggtccgtcagtatttaagtgaattttgaacttaatgagattcttcaattcattctggaaggaatgtaattctgggttgactatagccacaatagcatgatgccaggaatcaggacttaaaagacttttcttatggaagtaacttctgactcaaaccctaaagtaaacctatagtgcttactgtcagtccaaggagttcatctcagaaaaaaaaatcattttaccatagtatatgtgaattaaatgagttaatacaagttagagctggctgggcacggtggctcacgcctgtaatcccagcactttgggaggctgaggcagatcccttgaggtcaggagttcgagaccagcctggccaacatggcraaacactgtctctactgaaagtacgaaacttagcgggacgtagtggcatgcgcctgtaatcccagctacttgggaggctgaggcaggagaatggcttgaacccaggaggcggagattgcagtgagccgagactgcrccattgcactccagcctgggtgacagagcgagactccgtctcaaagtaaaaaggaaaaaaaaaaaaagttagttctaagaacagttattaactcgtagtaggatataaaagtgttaggtaatgtgtgtagagccaaagagactttgagtcaacattatgcctaatattaaatgtattaagaacattttaattcaggaaagcatgcatttctttgaacactgcataatgaactgtgttgaaaataattacttagcctgtttctgcttcccttttgtgtttcggacctttctcaattttacctattcttattataatttaaaagcccttttgagatccctagagtaaaataggagatgaatcttggctgattactagaaatagaaagattttagctgattacctcactggcaactttgatagcagcaacttaaacttgagatcccaggcttgggttcctctaaggcttaaagctttcagaagtaaatgtacttattttgttaaggaaattctttggagactcttttcattaaataattttcattatgtctgaacatggctttaacttgccaaatttcccttctttgtttagtataattatttttaaagagcgtgaaaatgtgtattctatttttaaaatttaatattttttcagtgctgacatattcaactrtgatttattttgattttcaggtctttagcaatgttaattcaaacctgagagttttaaactatgttggaataatggataccattgagaatatagtaaaatgttttgaaccttctttctagaaaaatgtttgcatattcaaaatattgtatacagtgtttcacttttcacaaataatcctgaaactgattmatatattgtttttatttttatttttttcgagatggagtcttgctctgtcacccaggctggagtgcaatggcacgatcttggctcactgcaacctccacctcctgggttcaagccattctcctgcgtcagcctcccaagtagctgggactacagtcatgggccaccacgcccagctaatttttgtatttttagtagagacagggtttcaccatgttggccaggctggtctcgaactcctgacctcaagtgatctgcccgccgctgcctcccaaagtgctgggattacaggcatgagccaccgcgcccggctgcatgtattttttttaaatgttgctcctctttagatatgtgactagtatattttcatttagttaacatgtccagttgtattcagtttcattaaaattgatttatagtgctatggtgtttaatttgtataacacaaagtttctagatccttcttctggaagcagtaataaaataaaaaagtgcagttgtgctaagtgcatttttgggagaatgcagcattttaagccatggctattcatatggcaattatagcagtttttatcactctgtgttttaaaaatgtaagagattcttaataaaaactgatgtgattttgtgttgggcattttttaaaggatgttttyttttttaaaaaaaattatttttaaatttttatttatttatttattttgagactgggttatgagactggccaatttttgtatttttggtagagatggggtttcaccatgttgcccgggctggtttcgaactccagggctcaagcgatccccccaccttggtctcccaaagtgaggtgtgagccaccgtgcccagcctaaaggatgttttcttgagtgatggctgttgaattattttggtaggacttggaatgcttttgtggaatgtttaagtggaatattggttctaagtttcctatctcagggatcctggacctgccatttgattagctgcatacatttttaaattgaggggaaccagaaaatcttccaagatctttgagtgctgtggactcctttggatgcagttttcttagagaactgctgggtccatccaatcttaggatgactgaggttataagattttctctagtttttttctgccctgtcaggcatcttgtgatttcatagattgctgtcatcatcttctcccttggttatctcatccaatacctcatgccttttttcttttctttttttttttttttttgagacagagtttcgctctgttgcgcaggctggagtttagtggcgctatcttggctcactgcaacctccgcctcccgagttcaagcaattcaccctaccttagcttcctgagtagctgggattacaggcacccgccaccagacccagctaatttttgtgttttttagtagagacggggtttcaccatgttggccaggctgctcttggactcctgacctcaggtggtcgcctgcctcggcctcccaaagtgctgggattacaggcatgagccaccgtgcctgaccctcatgactttaatatgatccaatatcagctctttacaaatgagtcctaaatctacctctctagctcagacctccctcctgaaatccagacttaaatttatctgactgctgtcttaacatctccagttagaattggcatctcaaaatcagtatgttcaaaactggattcctattgtttcctcagaaatgtaatcttccctttgtcagttgacagtgcagtctctcaaaagccttgcacgctttctttattactctctttgtatcatactccgtgtttggtctgttcgtattattgcctcacccttcaaaatatatccagaattcaaatacatctcactatctccgctgctacaccttggtcagagatacttttacctcttaggtagattaaatgtcaggtcgtaatacctggaacctgaatgttacattatttggaaaaaaaatatctttacagatgtgattcaggatcttgagatgcggagattatcctggttggctctaaatgctatcacatgcacccttctagagagaggcaaagggaagtttgacacacgcwggaggaagtgatgtgaagacaggcagagtttggagtgatgcagctgtaagccaaagaatgcgcatagcaaccagaacttggaagaaacaagaaatgaattttcccctagaccgtctggagggagttcggccttgctgacaccttgatttcagaccagtaatactgatttctgacttctggcctccagaactgtgaaagaataagtttcaagccatatcgtttgaggtcatttgttacagcagccattggaaattaatacattctcctgtttaggatttcagtcaaggttgttcattatgttcggttgttatggccttgttaatctaaaataatctccctcaccttttttgtttttcatgacactgactgtttttaatttaaagagtctaggcatattgtcttgcagactatcccacgttgtggaattacctgattgtttcctcataattagattcacattaaacattttttccaagaataccatataggtgatgttgcataaagcctattattaatacaactgtcagagtgatttttttttttccccaaatggagtcttgctctgtcacgcaggctagagtgtagtggcatgatctcagctcactgcaacctccacctcccgggttcaagcagttctcctgcctcagcctcccgagtagctgggrttacaggtgygggccaccatgcctagctaatttttgtatttttagtagagacagggtttcaccatgttggccaggctggtctcgaactcctgacctcatgatccgcccgcctcggcctcccaaagtgctgggattataggcatgagccaccaygcccagcctggagtgattctttcaaagcgcagcattcctctgtttgaaagtctccagtgacttcccatttgttcagaggaaaagccagatccctcatatgatctggccgcccgtaacctctggagctttctctcctcttcactcattatattgcttttgtcttgctcttttccagacaatctgagcatgytcctgtcttatgatctttgctttagctgttctggttgcctggaaagctcttccccccaaggatcttttggctcactgtctcacctccttcatgtctgcctaaatgccctgtgtcagtgagtcctttccagatgactatttttaaaattgtgattctccacctgcttcccagtgctgatccctcaatgctctttactgtcatgtttttccatatcaccctctctcataccgtgtaacttatttattatgtttattgtttattgcctgttttccctactgaactataagcaccatggtggcaggaatctttgttttgttcccagagtcatcccagaatgttatgttcatagcaggcacaaaatagtttgttgaatggatgaatatgaaaatactttagattaatatatccttctttgccttaattcacagtagagtcacaacagtattttgaaataactttggatttgcggaagagttccaaagacagtgtagaattcctgtttacccttcacccagtttctccaaatgttaacgtttcacataaccatggtacattcatcaaaactaagaaattaacattggaataatactrttaactaaactccaggcttcatttggatttcgtgaatttttccactaataccctttttstgttccactgtccaatccaggataccacattgcatttagttatgtctctttagtctcccctaatctctgcagagactacttcttaaaggattcttgtggattatttgctcaagtgaatatttcttttatttatttatgcctcagcattcacatcgtgaatatttctaaaggaaggaaaggttgtaaaayttaggagcactagaatatatagctacagggcattgttgaactttagacaagatcataggatttgacatgttttctgggtcaaatgcagagtttatctagygtcttctcttctgccatcagagcttcccaatcctttcatgttgtcatttgaagaggtgaatcctagcctaaccattaactgtttgtgacattttaatgggtaaatgtaaatatttctgtagtaaagacgtgttaggtacctaccctgtgtaatgaactgtatcgaattcctccttgtgaagggggatgtaaagaaatttgagtaagttttttactagcctgggttctaatataggtaatatataactaacagactgtaataacaactggtttgayagcacagaggaaattattaatgttaactgggtgaggtgagaaatagggagaagatcacatttaaacttgcccttaaagtattaatagaattttttaaaaaatttattcgagacagggtttcacttccactgctcagattggagtgcaatggtgcaatctcagctcactgcagcctctgcctcctgggcttaagcaattctcccacctcagcctctggagtagctgggaccacaggcacttgctaccacacctggccaatttttatatttttctgtagagaaggggtttctccatgctgcccaggctggtcatgagctcctcagctcaagccaatccacccatctcagcctcccaaagtgctgggattatagtgtgagccaccgtgcctgacctcatagaatttttttaaatggctttattgagatattattaacgtatacatatcaaatgcaccatttaaagcaaacaattcaattgctatgcatatattcacagagttgtgcaaccattccacaataaatgttagaacatcttcatcagccacaaaagaaaccccatacctgtgttcactccccattctccccttcactcagctcctggcaacacatattctttatatgtctgtaaatttgcctattctggtatttcatataaatagaattgtacagtatgtgtctgacatctttcactttgcatattttcaagattcatccacattgtagcactcatcagtactacattcctatttatggccagatattctattttatagaagtatattttagtttttcattcatcagttgatggaaatttaggttgtttctacttttgggctattatgaataatgctgctatgaacattcagatttttgcatggacagacatgtttttattaatgttgggtatatactatgtttaaccacttgaagaattagcagactttttcaaagcagttattattttacatttccaccagcaatggatgagggttccaatttctttacatctaagccaacatgtgttaatgtctgtcttttctattttggtcatgcaagtgggtgtgaagtggtatctcattgtggtttcgatttgtatttccctaatgactaatgatgttgcatcttttcatgtgcctattggtcatttgtgtatgttctcatgaggtgtatcattttagtagatgaagaaaggggaatggaagggagcaagagaacagggacaaaggcctgagaaatggtgagagaatcagtaaaagagagtagggctctcagatgataggagttaagagaggactatagaaaactgggtctctaagctgatgtgtcaagtcacactgtcctctgcttatcctaagcttaccttgctcaaatttctttttttttctttttctttgtttttggtttttattttttcttaaatttcaaggatattccttcttttgtaaatgtcacagagtatcatggctctgtcgccgaggctggagtgcaatggtgcagtctcaggtcactgcaacccctgccttccaggttcaagcgattctcctccctcagcctcccaagtagctgggattacaggcacatgccatcatgcccggctaatttttgtatttttggtagagatggggtttcaccatgttggccaggctggtctggaactcctgacctcaggtgatttgcccacctcagcctcccaaagtgctgggattacaggtgtgagccaccgtgcccgtcccaaccaggcttcttaaatgaattctaagatagaaacaacaggagctkccaggactctcttaagggctgaacctaggactgtcacagtgacatttctgccatattctgctggtcacaaggcaagcccaaattcaaaaggagagaaatagacctcttagagtttcctaataaaaggtaatttcattaaaaatacaattcataaattagccctatgtttactactgtcttttcagctctttttttattccatgcattaattgattcgtcaccacttggattgtgccaccaatgtttctatgacatgatctaaaaaaaaaaaaaaaaaaaaaagggctcagtagttttcacttaaaagacaaagaggcccactgagctattacagatgttaattaggattcatttactttaatatggtagaaagratgctatgataccactttagtgatgaacaaaataagcttaatcacatcctaggagctaagtattctgacattataatctcttctctcagagtcccatcacagcagtcttaggattcargatctattcttgggaaacattatagaaccagtgtgtcatgtacatacaaatgagggaaaatataatggctttggtaatcctgtagttatctttcttgtcatatactctttttttcatttttaaaaattggggcaaaatttatataacataaagttaaccattctgaagtgtacaatttaatggcatttaatacattcacagtgttgtacgacttttttttttttgaggaaaagcatatttttaggataatgtcaaaacagattaataagatgctaataagatggccagacattcactcagaagtgttttttgttttgttttggtgaaatggtatgagagatatgttgccttacacttaggccactgcattcccgcttaagtgccaggattgtgtcagcaacaggatggcctaaacaatctcagtcttgtctcctgccagccccctaaatcttccagaattgcaagaataggccaggtgtggtggctcacacctgtaatcccaacactttggaaggccaaggcaggcggatcacttgaggccaggagtttgagaccagcctggccaacatggcaaacccccatctctactaaaaatacaaaaattagccaggcaggtgtggtggtgcatkccggtaatctcagtttcttgggaggttcgggtgggatgatcgcttgaacctgggaggcggaggctgcagtgagccgagatcacgccactgcactccagcctgggcgacagaatgaggctttttctttaaaaaaaaaaaaaaaggaaaaaaaaaggcacatttatctcaccttccctcctattctgggaatgctaacatcctcagggaatctcccatattggtcccctataacccaagacttgggagtttcacagccccactctaggtctgaaaacaacacaaaagttgttctaagggatgaagccaccctcaataaaactggaagtcaaagcctgcatataagccccactccctcctgcctaaaaaaggaaaggtatttagatgtttttgtcatggatactttactgggatcaggtaagaactgaacaaatgcagtaagttattggagagttaaaggttaaaaaaggccgtgtgcagtcgctcacctgtagtcccagggtgaggccagggcaggtgtgtcgcttgagctcacaagtaacgagaccagccrgggtaacgtggtgaaacctcatctcgacaaaaaatacaaaattagccgggcatgrtggtgtgtgcctgtagtcccaactacttgggagcctgaactggggaggatggcttgagcccaggaggcagaggttgcagtgagctagatcgtgccactgctcttcagccagggtaatagagccagaccttgtctcaaaataataatagcaattttaatagttttaaaattttgaactagttagaacctctttgatatttacctcacctaggaaattgggatcagcccagctttcaaagggaggtacatgaatttaggactgcagagtacagcaaattttagttcctgatatggccatgctttyctaagaagtttccaaaggttattgactctcagcttagccttttytactgcacaatgtgatagatgctgtaaatcagcgtttagaggtgtttatctaactctccctagtgggagatggggaaattttcactgagaatgtaactctgcacyatgagcagatgtttgctaagtgggcaaggattgagtgggggatgtcttaaactgagggaaaacatttgtaaaagcagaaaggggtgaggatatgacagcaaatttactatagctaacatgagagagaagaggaagggtagtaaatagaattgaagagggtagccaagggccaaatataaatttgtattacaagctaaggaatttttatccagtcataaagagccactgaaagattttatgcagggrattataatgatcagattagcatattaagaagatgattttggcaatagtatggagtctggttgatagggaggccaggtaggaggctactgaagtrgtctggacaagagatgaagtgtacctaaactaaggcatggggatggaacggaacttagcattacaggcagttacttaaatggctaggggaagcaagaggaagcaagaatcattccttggtttaatggtttggatggatggtggtggtctttgttgacgctagatatacaggagtagaaaagccactaaaaaaacccacacacatttctgttttatgtaggcatcttgtataggacagactaacaaaaatgaaactgtttcttaaatttaattgaaatacaatcagcaattttctcattataattttacttaaccctgtacagttcagtctacaaaaataagtattggtagaatagccaggtgcagtggtgtgtgcctgtattcccaagctgctctggaggctgaggcaggtggatcacttgaacccgggagttcgagtgcagccagagcagcatagtgagacgctgtctctaaatattaaaaaaaaaaaaaagtttttttgtactaaagtgaatgtctgatatctgcacaccccacagaatgtacagtggaattctaatgccttatctctgaacttactatatataacattgatataaccttttctattgtttttgacgcctattttattcagttagcattatttcccttggcatccttatagccaggcaatcccttatgatgaaattaaaaaaaaaaaaaagaccaactttaatgatctaaggctgtgctgcttgatatgggagccacttagccacatgtgacttgagtatttgaaacttgactagttcaaaatgaaatgagctgtagatgtaaaatactcactggatttcaaagatttaatatctcactaacatttttgtatrtttattacatgttggagcaatattttggatacaagaagtaaaatttattgtcatgatgaatttttcctgtttttgttgttgttgttgttgttgttgttaactatttttaaaatgtagctacccctgtaatcccagcactttgggaggccgaggtgtgtggatcatgaggtcaggagatcgagaccatcctggctaacacagtgaaaccctgtctctattaaaaataccaaaaattagccgggcatggtggcacacacctgtagtcccagctagtcgggaggctgaggcaggagaatcgcttgaacccaggaggtggaggttgcagtgagctgagatcacaccactgtactccagcctggatgacagagtgagactctttctcaaaaagaaaaaaaagtagctactagaaaaatttaaattatatatatggttcacattatctttctattaactttctttgcttactaagtttatttcagttccattatctgcctagtttctatgctaggtgtgcctaacttctatactagctagagatttgctgcatatgattaacagctgtttcattttnnnnnnnnnnnnnnnnnnnncaagctgtactgaggaattaagatgatcagaaatttacttaatttacattatcacttctacattgatgttttctcaaactataggataatttcctgtttaaataaatgacagagtatgttgtactagaaaagaggaagagaagggaggggcaagaaatatagtctacaagcaaaaacctggattctccaggcctggacaggaaaaaattaagcaaaattaagtggattttcatcagaagggctcttgggaatctataaaaaaggagttaaccttaaaaatatttaaacttaaaaatatctttaaggccgggcacgggggttaaccccctgtaatcccagcactttgggaggccgaggtgtgtggatcatgaggtcaggagatcgagaccatcctggctaacacagtgaaaccctgtctctattaaaaataccaaaaattagccrggcatggtggcacacacctgtagtcccagctagtcgggaggctgaggcaggagaatcgcttgaacccaggaggtggaggttgcagtgagctgagatcacaccactgtactccagcctggatgacagagtgagactctttctcaaaaagaaaaaaaagtagctactagaaaaatttaaattatatatatggttcacattatctttctattaactttctttgcttactaagtttatttcagttccattatctgcctagtttctatgctaggtgtgcctaacttctatactagctagagatttgctgcatatgattaacagctgtttcattttaattcattataagtgcctggaaactgcaataatgcaaaattgtcttcccatattttggaaacaaggttaaaaagttctatagcaccctatagttgattagtaagaacttcaacgcagaatatctgcaggaaactgatttttgtagatgttatcacaattcattttgatatctgtaagttggatagtgtttattaactcttctgcaaataaattatttcttagaatgaaagtctccaagctggtacatggataggattggactagagaaaaagcttatttgaaacacattttatgagggttttcatttattgcctaaacactataaaatttttttgccatgttccagttgacacaggccaagaaatgcctgaacaggtagcaaacacacctagcaaacagggatggctaccatatcaaaaagtctctctgctaaggtgaggtgcagggtttctttttggggtgatgaaaatgttctaaaattagatagtagtgatgctcacacaactctataaatatactaaaatcactgaattgtatactttaaaagggtgagtgtaagggtatgtgcaatatagctcaataaagctgttataaaaaaattctgaagcatgcttatctgttgcagttactgatttactagtcatttaatgagaattaagtgagcagacacagaaagcaaccatatgttcaagaactacagtgatcagacaaaaatggactgtccttttttgacttctgtgtgagccccacagatctggtggcatttagggaagcctaatggccttcttttgtgagtacttgtgaaagttactaacaatgtattagattgctaatacattcaaattctaatgtaaaatgaatgtgatacactgaaaggtacagactgaatccagcagatgagtagaaagaaaaccactccaatatttaatcatttgttgttaaggaatttatccattaacaaagtttttagacagagttgtttatatctactcaaggtgtcattatgcacatctgtttcttgtacctcaggttcatcctatagaaaatcatgctaactcacaagtcatgcagtgttttcaaaaagacaagtcatgcagtgttttcaagttcagagagtagcaaaggatgcaaatctaatttctttaccatttgctaccatctgaagttagtaacattttttggctaatcaccaagcacccagaaagaaagaaatagagcaaatttggtgcatcgtttgtcttccgtatctcctttcgaagtcatttccacaggataagtgccaaagcacagaaaagaagctaggccccacttttactctcatgaacaaaagtcttcccatagatttttacatagctgctgcatttgtcatccctttcctgaagagctttgttgctgtggtcttgctctagggctgctttcagcaacatttctgacgcaggtttaatgctgattagccctaaaacaattctagggcagggctccctgccaggataaagaatgaacaaaattggtttgcatataggccagctgcagttgctgcagctagagtctgtcaaactaggaccattttcttgtttaccaagatgaggttaaattagcacagcatgaggcaaaaaaaaaagatttaaaaaacccagaaaattagctatgcttttgagtatgatgcagtgagtgtggaattaaggtgattttaagttagtttgagaagggaaggtaatatacagtactaaaagcttgattaaaagctgcttgaagatatttgcttgctaactatcttagtaaaaaaaaaaaaaggtatatttgaatagtgcctcaaagctcacagattacatgtagaaaagtctgttggcccatttttattgagtatgtgcctcatgcttacatgcttagccctggtcctggcacaagggtacagaggtggacatttaatagaggaagacactgtctttgagactgggtttctggagactcttaattcaagcctcagctctgtctttaattctcaccttaggcaaaccatgttagctgagcatctgtgttctcctaatgtaaacaatgagagagrgagagggactgctcaggctcttaaagataattcaagtctaacattttttgaattatttgtttgtgtagtgttatttcctaaaatatttgaatcaagttttatgtgttcatagtctctgatagtgggacatccagtctggttgaggaggaaagatgagctgtgtaatcagagaagctgaatgtgagaggtttctgacttccagagcttcagtttataaagctctttccctgcctctccactttgcactgctcccattgcagagactgcccgcagatctacctttgggaactcaggctttttattccagcaatgcaaggctgagttgagggaaggagcccccactttctcatccacctgcaaaggcaagagtacatagctgcaggtaacaagttataggaagggttagtgtgaggcagaaaggcacagtaaaggataaacttcatagtgtttgatgatccccaaagtgtcatttgacttcttagactcccagaacccctgtgcttcacttcccagcccttcatcaactctggattcaaggacttctgaacttgatctctgtcactttctcctccctgaccttcccagatcccagtcttggatcattaaaagcacccctactagtttagggctgggaaatgaggagacttaatcatcttataacattgttcctatgggaggtgaattcttttacagactaacgtccaaatacaatcgttagtaaaactaaggctacagctgttaatttaactgaagcttgtgtagttatggagagattgtttcttttatcagttcatatttctatgcacttctcattcagtactgtgctatacttttcactgcccttcacctcagctaagatggytttcaccttaagtctcaagacaaaggcagcaaacagccaatacagaattagggcatagagctgggtgtgatacagggtgctaactactcatagtccgctttaagcgcaggatagaggacattctcacagaaaaacaaaacaaaacaaacatttgcctatattagataatcaagtgggtagggcttagagaaaaaaggaatcaccgtgggttgtagtggggtagtttatacatgtaggaaacagtcctgaaagatatggatgtgcagaatggaggctgatgttctgagctccagctgagggaattttcatttatctaaagtttttatttctgtttttttttccccagccgaatttaagattcatatttytgttttaaaaagttgtgmaatgaatatagcaaagtgttaacatttgtkgaattcaggagggaaggtatctacacacagtgttaattatttctgttttacttctctatatgctctaatttcttctttttaatttttttgagatagggtctcactctgttgcccaggctggagtgcagtggcaygatcagggctcactgcagcctcaacatcctggactcaagcagccctcccacttcagtctcccaaagtgctgggattagaaggtgtgagccacagggcccagcctgaaattttttaaaattacagacaggaaaataaattgcattaaagttgagcagcccaagaaacaaaggaaagaacttaaataatatatagatcagatggtcagctcttgaaaaggtaggtgttaatggcagtcagatattatatcagtcttgaaggagcmcataaatcgtatattgttttgcaaccaaagaacagaaaaatgactgctatcatcaatgatgaaagctcaaatgtgatgaagaaatggaaaaaatagataatgggccaaggtttcttcatggcttggggttaacttttttttttttttttttttgagacagggtctcactcttattgtccaggctagagaggagtggcgtgatcacagctcactgcaacctcaccatccctagactcaggtgatccagttcaacctcccaagtagctgtctgggactataggtgtgcaccaccacasctgtctaatttttatattttttgtggagacaaggttttgccatgttgcccaggctggtctcaaactygtgggctcaagtgatctgcccaccttagcctcccaaagagctaacagacgcgagccaccgtgcccacccatgcttaatttgtttaggtgcgagatatactaacacagagaatatgctgtacatcattagagaaaatgaatataaataaatgacatactttagtaattatcaaaaggagcaagttcagcccaataaacaaggggcaacctagttttcatacccatacatctacgtgcaagataagtgtaatcacttttttcggaaagagtagcttttaatgcatatatttaaattattttaagayatgctctaaagcctctccattgtgctataattgtctctaacagttgaatttttgccttttcaagaatttcttctataaatgctgagggaagaaccattactgataaattttctatattcctaatatgcttggctaagcttgtagcaaggctcaatatatttgttggttggcagtacagaattttgagtagtctatttataccagtaatattgtgttactagtgaatagatgagtttaatcttagtgtaaaaagcatatctatgtaacagtttttctactgattaattgtatataattgaacagagttcaagttcattcctttttttgttcattccttcatacaaaatgggaagttgtttagaactcatcctgaaaggaattgacatactgtagtctctcacagaagtacaacttaataaacatttatggcaataaaatttacccaccatgtaagtatatctgcaaaactataagtatgtggaatggtcttacagaagtacaaaattaataatgtagtttccctggttatttctcatctatttctatatcatactgtgaaagaatccaatactgttacaataataataataatgataatttaaacataatttcagtataattataatcgcaattttaaaaaatgtatgtgtatrtatttagagatggggtctcactctgtcacccaagctgaagtgcagtggcacaatcatagctccctgcagccttgaacttatgggctcatgtgatccttccacctcagcatcccaaatagctcggactgcagacatgcaccaccacactcggcttataatcgcaagtcttacgttctgttttctttttagagacagggtctcactctgttgcccaggctgcagtacagtggcactatcagagctgactgcagccttgaacttctgtgctcaartaatcctttcacttcagtcccttgagtagctaggactgcaggtgtgcaccaccatgcctaattaaaaaaaaatttttttttttgtagagaaaaaggtcttgatatgttgcccaggctggtccaaagtgattctcctgcttcagcctcccaaagtgttgggattacaggcgtgagccactgcacccagtgtcacaaatcttawtttttttttttttttgagacggagtctcactttgtcacccagatggagtgcagtggtgcagtctcagctcactgcaacctctgcctccctgaatcagattcaagtgattctcctgccctagcctcccragtagctgggattacaggcacgcgccaccacacytggcaaattttttgtatttttagtagagatgggtttttaccatgttggccaggctggtctcaaactcctaatgtcaagtgatccacccaccttggcctcccacagtgttgtgattacaggcgtgagccactatgcccagccttaaatttttattaaataaccttcatagtcctacaaaaccattattgtagaatttgtacaaacaaggtaaaaatctttacacaaagtcagtagtattcctgtgttctttcaactagcccatgttcataattattcgtttattctcatatgcctaacgatgaggatacattctgagaaaatcactattaagaggttttgttattgtgcaaacatcatagagtgtgcttatataaaactaggtagcatagcctactacaaaccttgactatatgatacagcctgttgctcttattgttataaaagatttaaacattttatttataaamtggtattaccaacyttcccctatttctgaatatttaggtaagaagcaaaaataagttatcctggctttgtgtagtggctcatacctgtaatcacagcactttgtgaggctgaggtgggaggattgcttgagctcaggagtttgagaccagcttgggcaacatagtgacaccctgtctctctctacaaaaaattttaaagaagattagccaggtgtggtggcacattcctataatcctagctacttgggagactgaggcaggaggattgattgagcccaggagttcaaggttaccatgaacaatgattgtgctactgcattccagcctgggtgacagagtgagaccctgtctcttaaaaaaaaaaaaaaaatgttatctgagggacttacaagcaatgacaccccagaggtcttcatttctaataccattttccaattaaaggagcagggggtccttggagaaatgtctgatttctagaaatggggcaagaaatatgagccttatactgctggcaattaaggaagtgctcaaaaacccaaaacagaacaaagaagccacacaacacatagatgggggtgcatcaaatgggcataggagccaaataaaagagttgtaaatggcccaaactggaacacactgagcagaaaaataaaagtctgtcatgacttaaaatataaaataaatatgcatgagtccatactgatgtaaataaatgatcagataaattagtaaatggagaagagacaaatctcccttacagaagaattccaaatgatagaggtagatacgtactttaccctcaagaggtgaagtataactctctatttctaaaatgtgggttgggtagagtgatttccatctgaagattgcaatatagaaaaggagagaaaaaagaacttttctgtggagaagcctgaagaacactatcttagccaagtgatcaaggttaacatcaactgtgatgtcatattgacagtatgaatcattgatattaagtgatgaaaatggcactttacctgtgtggtcttccccaaacctataaactcagtataatcatgagaaaaacatcagacaaatcccagttgagggaccttctacaaaatacctgaccaatactactcaaaactattaaggtcatctaaaacaaggaaaatgtgagaaaccgtcacagccaagaggaacttagggaggcttgactgctctaatgtggtattttgggtgagattcttgaacacaaaaaggatcttaggtaaaaactcagaaaatctagataaagtttagactttcgctaataatgtaccaaatactggtcgttaattttaataaatgtactaatgtaagatgttactattaggagaaactggttttagggtatgtggaaactttactattttccctatttttctgtaaatctaaaaccattctaaaaattaaatttactttttaaaaagtttcttaaaacaatgaaatgagtttgaccaatgcaaagctgaagaaagaagataaccatgaaatctaggattcaaagcaaaggttaataaaattttgattatgtgacaccatgacggatatacagtacaataataatatccctatgtttgaaataaggtaggtatcaaattttaatttacaaaccaacacaaattattaaaggaataaaatattctaaagaaaataggctgagtgcagtggctcatgcctctaatcccagcactttgagaggccatggtgggaggatcccttgagcccaggagtttgagaccagcctgagcaacatagcaagaccttatctctactaaaaattaaaaaaaaaaaaaaaaattagccaggggtgtggtggtgtgtacgtgtagtcccagctactctggaggctgaggtgggagggtcgcttgacaagcccatgaggtccaagctacagtgaaccgtagttgtaccaccacatgccaacccgggtcacagagcaagactctatgtcaaagaaaagtgcagtggaggctggtgcggtgactcacgcctgtaatcccaacactttaggaggccgaggcgggcagatcacaagatcaggagttcgagaccagcctgattaacatggtgaaaccccgtctctactaaaaatacaaaaattagccaggcatggtggcacgtgcctgtaatcccagctactcaggaggctgaggtaggagaatcgcttgaacccaggaggcagaggttgcagtgagctgagcactgcactccaacctaggcaatagagcgagactccgtcamaaaaaaaaaaaaaaaaaaaaaagggcagtggaggggatgtttttatttcttaaattatattttagtttatatatagtcaaggctttgaaatgaatcattttcaaagctaccaatattttaaataagtgwcttaaaaattttrgagtatataattcagacctaagagtacagtttttattcatctatccatttactcaacgaacatttttattgccaggcacaatattaagtaggtgttgaggatgtaagggtgaataatgtgttgaagagcttaatttataaaggggaagatataatttaacagtgttaatgtaatatggtaagcagacaacaatatgccatagcaattatgagaacaaagttccaagaacttcacagtgctatctctgttaaaaaaaaaaaaaagacatcatattcacgtattattaagataaccaagaaaggaagataaatgctttatcttgaaccttactgttgagaaaaaattttattttaacacatcaattaatatttgtttagtacagtgtttgtacgatagtggttcatttaaaaattaagctatggaatttttaaaatattggaccataaaaatctgttctaatttgtagattttgtagygttatggaagaaactcctctcttctggacaggtcaagaaaggtttccccaggaggtctcttctgaatagaatctttgtttttttttgagacagggtctccctctgacacccaggctggagtacagtggtgcagtcacagctcattgcagtctggaactccagggctcaagagatcctcctgcctcagcctcctgagtagctgggactacaggckcatgccaccatgcctggctaattttttaaaaaaaatttttttgcagagatggggtctcactgtgttggccaggctggtctcaaactcctgggctcaagttatttcccccgccttgacctcccaaaatgttaggattacaggcatgagccaccacacccagccctgagtagaattcttaaagatgtgtaggagcctaataggcagacatggaaggaggggtgtggtaggcagaatttttaaaatattcccaaacattgtcttctgggtattcagttaaagagcagtctaggttctgctgttaaggaattttacagatttaattaaggtgactaattagctgaccctaaaatagggagagttgcttgaattatccaggtgtgtcctgtataatcacgagtccttaaaagcagaaaatctcagctgctgcagaagagagaagaaattagagagatttcaagtgcaagatggtttgatttgagatgttgggtgccatatacaaggaccaaagagagatcttaggtgctaagggcagctggctgacagcttgcaaggaaacggggaccttagctctacaaccataaggaactgaattccagcaataaccgcagtgtgcttgaaaatggattctttagccaggtgtggtggcgggcgcctgtggtcctagctacccgggaggctgaggcaggagaattgcttgaaccccggaggcaaaggttgcagtgaactaagattgtgccattgcactccagcctgggtgacagagggagactccatctcaaagaataagaataaagaaagtggattcttcttcagagcctccagaaaggaatgcagccctgtcaacaggatggtttcagtattgtcagacttggagtaaaggaatcagctgagccatgctgtgccagacttctggctcatggaaaatgtgaaataataaatgtgggtgtgttaagctgctaaatttatcataataacttggggcaatagaaaattattacaggggaaaagttgtttcagacacacgaagtctagcaaggacccataagatatcgtacttaaaagggaactgcacgtcatttggcgtggctcaagtgcaggagcctcagaaactaaagtaggtccagctagatcatggtggtcctcaaatgccatctaaggaatctggacttagttggcagggactgaatttgtgacactggtatcttagttcacgttgattttcccaaggaggtaagattaattctctgtctccttcaagtttgctcaaacatcacctcaatgagggccaacttgatcatcctacttaatactgcaacttgtgtactgctggctttcctcactttattcttttttaactttccattgcacctttcatcttccaacatactatataatttattatacttattatctccctcctcttagaatgtaaactgtgagagcaaggattattttggatattttgttcactattttttccagttatttattgttgcataataaactatctcaaaatttagccacttaaaacaaccaaacttttttaaaaattatttttatgtatttattttgagaaagagtcttggctctgcaattcagtggcacaatcatagctcattgtaacctcttaactcctgggctcaagcagtcctcctgctgtagcctcccaagtagctaggcctgtaggcatacaaaactatgggtctctccccttagaatgcctcagcctcccaaagtgttgggattataggcgtgagctgccacacttggccaaattaactcctctttagggatgaataagtggataataatacttagatggctacatgaattgtggcactgtcgacagaggaaaagctttgaggggaaaaatgagcttggttgtgtaaacgttgatgttgaggctgctgagtctgagacagcaagtggagattcttggtggatagtaaaagtcatgaattgaaactcagggctggggatcatcttgaggattttctttttatgtttttctgatggagggaggaaggaagactttgtttttcccatggagaaggggaaaattctgctcccttcacctcactttttttggttttggttgctttgttttatgttaattttgcagacttcaaaaagtggttaaaatggctccacctcgcccctcccccaaaggtgacttgacttttttctatttcaaaaaagtacgttaggtagtagctttgagaatcacagtctctgatagaactgggagggtcttagtcatcttataggtcattgttctcctcctgatatatgtgatgtgtgattttcagtctgtgcagaaccttaatactattttaaaatctgggtcttctaacaccaaacatagtaggggagggccttgaaggcctttagatgaaaggccacacactaacgcagagagactcagataactgcttttgtttagcacaaatcacatcaactgaaccattttaagcttccaacaacttcatttaattgttagaataatgagacttctgtttgattcttacaggaagattctctttcccagtgagtctcgtttctaacatatttagcccagtttgctcatgttaggataatttcatagaccatgaaacaggatagtctatttactaatagactgcattgactaatgtgatattttacattagtagaacaaatgtacccccttctctaccttgtaatttatatctttcttttagagaastttgttgatttctaatgtaggaggaagaaagtggtatttttgtgtaagcttaactgagttccttgtgtttttgacttcttataaaaatttttttggtgatagtatgtattggcagcaaaagtagttaatggaaatggagggaaaggtctactttacctctgaccaaatgactgcttctttgagtcatgcagcaggaaagtttgtttgaatcagcttagcagtgttgctccatagtgttacttgtcagccctaagttttttaatgttgagttactttcttttgttctggaaggcaaagcgtggctctcttggtgtctctttagcaaagaatatgttctttagtaatggggaaagatttgttttatattgaataataaaatgtgacatggataacaatatgctttcccagaaatacattggataaataatttccatagaaggtaaatacttaagaataattaataatgtgtttctaatttagtaataaaataatgtgttttctataagagaaaactcttgctcaaagacattgtgatttgcactaggctactagaccagcatattcagccagaaccagaaccttgttttcgtggctgtatttattatttgaaaatcacttagatgttcttcagaataataaaaattatttactaagcactggcaagcgcatgacatttattaatctaaaaattatggactctttcctcttagagtttcataatagcagttacaatacttaaattacttaaaaaatttttttttctcacttcaaattttattattagtatgacaaacatgggctaggatcaaaaactttgtttattccttattatcagagaactctagatcttgaattcattgctaaggttatttttgcaagtaaataatctgctgttgtgttctttgattggtggtaagctgcacagcacctaaaactgtcgtataataatttggccaggtgcagtggcaaatgattttaatgccagtgctttgggaggcccaggcaggatcacttgaggccaagagtttgaggccaagaaacatttttatttttttgtttccatgaaaaatagaaataaaaactcatctgggcatggtggcgtgcacctgtagtcctagctacaaggaaggctgaggcgggagtttgaggctgctgagctatgatcgcactactgctctgcagcctgtctctaaaaaaaaaaaaggaatttgtctggtctttgtctgtgtttcctgaacttctcaaacccttggaatttcctgagtgacgacgggaatgttatgctaatcaggtaactaatgatgggcctctggatagcttcaggataggcgctgtctctggaaggaccaactatgtggttgggactctgaaccaacctggcctctggagagggaaaggagttggagattcagcttagtcttgtagccaatgatttaatcagttgtgcatatgtagtaaagccagtaaaaactctggacactgagatttagtggaacttcctggttggtgaaaacactgatgtatgcgcaggggaaagtaggtgacatgccctttttccacaagaagaaggcatggaaactctgcattctctccttgatcttaccctatatatctcttcatttgattggtcatcctgatttgtgtcctttgtaagaaaactgtaattgtaaatacatcactttcctgagtcctgcaagctctagtgaatttagtgtacctgagggacttgtggaaactctcaaatttatagccagtctgttagaagtgcaggtagcctgggacttccaaagtgtggctggtgtctgaaataagggcacgcctatttgggagcgtacccttttacttgtggggtctgtgctaactttgggtggctgatgagagaatcggattgcagtacactcagttgagattgaaacagaataactgtgttgtgaaattttggttttcagtgaataaattttagtaattgcaagtgtatttaggcaggwccgagtgcagtggtgttgataactaattcattacaatcagttacagatttctttgttccttctccactcccactgcttcacttgactggcctttaaaaaaataaataaataataaattaaaaagagaaactatatttagtgttaggtaaatataacatggctctttaattttgatrtaatcaagaggaaagatattgtgaatctcttaaaaactcaaagcttactggattgatgttgatgtactcttactaaaatcttaactaagtctaggcaaggtggctcatgcctgtaattccagyactttgggaggctgaggcgggcagatcacttgagcccaggggttcaagaccatgggcagtgtggcgaaaccctgcctctacaaaaatgttttaaaaattagccaggcatgagagtatatgcctgtagtcttagccatgtgggaggctgaggtgagaggatcacttgagcctgggaggtccaggcagcagtaagccatgatcgtgccactgaactccagcctggacaacaacagagtgagactctgtctcaaaaaaacaattaattaattaattaattaaaataaactttaatattacctggatttaagtttctgtgttgttgaatattccttaatggagtcgatgaatttgcagagacccctccaagattcttttgtttgattcctttcatgaccatcaccctagaccttcaagtttgctgactagatttgggggttgtgtgtttagaaaggataacaagcttgtcatgggctagaacctgtggtcttcataaatagcttagtaggatatatggctttttctatgaaaggtggagaacatgcattaaaaatgggcaaattctggcctgggcatggtggcttatgcctgtaatcccagcacttgggaggctgaagcgggcagrtcrtctgaggtcaggagtttgagaccagcctggccaaaataatgaaatcctgtctctactaaaactacaaaaattagctgggcatggtagcacacctgtagtcccagctacttgggaggctgaggcaggagaattgcttgaacccaggaggcagaggttgcagtgagccaagatctcaacgtcacactctagcctgggtgacagagtaagactctgtctcaaaaaaaaaaaaaaaaaggcaaattctgtcttatacttggagaactgtactcgtgtatttaaacatgtaacaagcaatgtagacagttaccaatagaaggtacgatatagtcaggggttagtattatagtcagaaagtcaaaacgaacacaaataaaaactcaggctagtaaacacatgaatagctaactgctgtaataacaaccccataatacttcagtggcatgagacaataaaagtttttctcattcacgtttagtgtaatgtaggccaaggtgggaggcactctacttcacaaagatatttagtgactcaactttcttccactttgagaactgtccatcttttaaggcctcctttgcatttagctgatagatggcagaggaaagatagattgtgtgccttgacccggaaatgacgtcattgctgcccacatatcattggcaagaactaatcgtttgacccccacccagaagcagattttctttaaaacttctaggctcctggggttatctgtcagggcaggaagagagggaaatagtgtgagacttagctttgttttgtggagaaagtctctggtcacaaacaggctatgatggaagtggatagtgcaggaggtaacttactggggccctcctagtgggaaggtttagggaggagagtgagtgaagaaatatttaaccatgatgatcaggctgaaaaacagcccccaaggttcataaatctcaaatattcctcttcatttgcaaccccacaagcatgctatagaaatctctaccagtaactttgagctggggatggggtccctatttccactgccaactgagaggaagcgtgaagcaaccagaaggccagatctcatattcctttggtgaagagagatgtgttcttggcattctaacatcatctacattcatagtagcagaacttttgtgctatatttcatgtattttatggagattgagaaattttaggagttcagtatttccagagctgcccatgtacattctagtatgttaagttaaaaaattagtcacacttctttttaaattatacattatctgtttaaatatatgtcctataaagtagactttaaagtccaaactttatataaatggtgatttacgttatagcgcacttgaatcagatgtacttatttcactggaaattctctgaattatttaaactgaagttaattggactttggtaatctagaggcaaggatgaaatatttgaatatgtaaatctattaaaatgatttttgcttatgtgtagttctctatataactggttaaattgacctggaatagctttcatgtctcattttattaatgattttgtttaaaactaggcttctggggttacctgtcaggacaggaagagagggaaatagtgtgagacttagctttgttttctggagaaagtctctggtcagaaacagactatgattttatcagtgagacatgaaatcaaacatgataaacctctctgataaaaccggaaacgaggactatgtgaagtaattggaactattggtaaatattcctagtgataacctgaacatagccaagagtttctgccttaatcaggggaaaatacaggcttaagataggagctgggcaaaattgttagaccagttaatggatttgtttccctactttgcatctcattttgtggaagtgattttcagtgtcaattgtttgtttagacacagagtttggccctgttgcccaggctggaatggatcacagctcrttgcaacctccacctcctgggttcaagccatcctcccacctcagcctcctgagtagctgggactacaagcacctgccaccacgcccagctaatttttatattttttgtagagacagggttttaccatgttgcctaggctggtctcaagctcctgaactcaagcgatctgcccacctccacctcccaaagtgctaggattacaggcatgagccactgcacccagccttcattgtcaattgtaaagctcatgcttgcttttcctaacggggagatttttgtgtcatagtgtaattcccctctctcctcctctcatgagtagctgttatccctgtaaactaaagggaagagaaatacctgtagtatatatttaattattgaggtctccttcttgaattctttcatgctagtcccatatgtaacaattgtttccctcccagaagtgtgtttctggaggagggtgctgacttctgtgccctctgtggcacccttaaccaaggacttggatgtttgctcagaggtctttcagctatctatccatgaccatggatgtcagttcacagccctggctgttcctcagagatctaagtaaccactttgatgatttcagggttctcttagatatttgtaataaaccgattcctttattacyctagttcagttctgtaggcagctttctcagccctttgttgtttttgttgaggagagagtatgaaaggtttctgtaaaccttgtttgggatattcagttctcacagtatctgtgggtaagtagccccccagcgtagaagcttaatatttgttgctgtccttggatcatcaaacgttgggggtgtggatagcaagctctcttggccattggtaccctacattatcattattgactatttaaaagaaagactctgacatctctttaaagatatctgagttttagacatctgagtaaccaataaaagacattcagaagtttttacactcttcaaagctgctaagttatagcctgtgtcgttacagtagtaaactttcctccaagagttgacactttataattatgcttaggaatattattgacgaaatgggatatcagtataaagcaaatttcagcttatgtttgcattgataaacatgatttataaaaggtagattacttataagattgaatataatgttttttttgtttttgtttttgtttttgagacagctttgctctgtcacccaggctggagtgcagtggcgtgatcttggctcactgcaacctccacctcccgggtttgagggattcttctgcctcagcctcccaagtagctgggactacaggtgtgtgccaccacacccggctaatttttgtatttttagtagagatggggtttcaccatattggccaggctggtctcgaactcctgacctcgtgatccgcccacctccgcctcccaaagtgctaggattacaggcgtgagccactgcgcccggcaagattgaatataatgttgctggtgtttttaccttaaatactggaatgtaatttctaaaataaagttgtttttatatttgcagaaaaattgagaatggagttcccatatacttgcctcaccccacacacacaatttcccctatcattaacctctcgtagtatggtacattagttataattaatgaataaatattgatacattattgctaactaaagtctacactctatttagatttcttttttctttcttttttttttttttgagatggagttttgctcttgttgcccaggctggagtgcartggcgcgttctcagctcactgcagcctccacctcccgggttcaggcaattcttctgcctcagcctcccaagtagctgggactacaggcatgcaccaccatgcctggttaattttgtatttttagtggagacagggttttgccatgttggccaggctggtctcaaactcctgacctcaggtgatccgccttccttggcctcccaaagtattgggattacgggcatgagccactgcgcccggcctctatttagatttctttagtttttacttaatattcttgtattmgtctgttttcatgctgctaataaagatagacttgagaccgggcaatttataaaggaaagaggttgaattgactcacagttccatagggctggggaggcctcaggaaacttacaattgtggcggaaggggaagtaaacacatccttcttcatatggcagcagcaaggagaagtgcagagtgaagtgggggaaagccccttataaaaccatcagattttgtgagaactcactatcccaaggacagcatggaggtaaccaaccccataattcaattacttctcactgggtccctcccacggtgtgtggggattatgggaactacaattcaaggtgagatttgggtgaggacatagccaaaccatatcagtcttttttctgttgaggtatcccatccccataagttgtcatgtctacttaggctccttttggctatgacagaatctcagactttcattgtttttgttgtccttgatagttttgatgagtacttatcagatatactataggttactcctcctggaatttgatgtttttcttatgattagactggagttatggggttctgtgataagactgtttaaccttgtaaggaattgccaaactctcttccaaagtggccgtacaattttgcattctcatcagcagtgaatgagaattactgtcacttcctatccttgtcaatatttggtatagtcagcttttgggacttaagccattctaatcaatatgcagtggttgggatgtaatttttttttttttttttttttttttgtgacagtctcactttgtcatccaggctgaagtgcagtggcatgatctcagatcactacaacctccacctyttgggttcmagtaattctcctgcctggccttcctgagtaactgggattatgggcacccaccaccatgcccagctaatttttgtatttttagtagagatgaggtttcaccatgttgatcaggctggtctcgaactcctgacctcaagcaattcacctgcctcggcctcccgaagtgctgagattacagttgtgagccaacatgcccagccaggatgtaattttttaaagttggtcatttagtcttactgtcatactttttaggttgagcattcctaatccaaaaatctgagatccagaatactccaaaatttgaaactttttgaggccagtattctaattttctaattagggatgctctttaatttttaaagttggtcatttagtcttactgtcatactttttaggttgagcattcctaatccaaaaatccgagatctaaaatgctccaaaatttgaactttttgagtgccagtattccaattttctaattaaggatgctcaacctgtaaatataatgcaaatatttcaaaatctgaaacagtcagaaatccaaaacccttcttggtcctaagcattttggataagggatactcaacttgtatgatatctgactatagaagcattagctttctcctaatattcctctttaagtaagcattaagaagagaatatgtgtgctatttcccatacaaaacctgttagagatatttaatagcatttcacttattttgttaaaattacctattctctttgctttcattactaatcccttatcagctacattccattggtgttaagctacattctaatgttaatgtctcctgtgtgattgcttttggttaattattctcattttccattcttcaaagtcatttttgctttttgtttgtttttatttgttcataaagcttttttgtttctgttacattatgtagttttgtaccaatggctagaagcagatcgtcatggcaagagccaaggtgctgcaaatacgacttcaggtaaaaataaaattaagaacaaggatgggctattataaatcattattttaattgactgcaagcccattataaatgtttctttattcagttttgcttggtcagacttgtagatgttattttatgtttctcttctctcatctgcatcttaattttcataaagacttcatttgcttcaagccttgaaaacatgtattcagtagtctttaagctctcttggcagatatttcctactttcttaggaggaaaggattaattgcagcttcaatttagtaggaggttatttggcagtgttacttggagttaagttgatatgtagttgtagcagtcgtacaaatttatagtccttgtttgtttcaagataatatttaaaaggtaaattttaagtacaggatgcttatgtaatttttcatttcctgggaatccaaattcttagacttggttattttcctgttttttttycccagcagtaaattytaagttagaggtaaaacttgtgtttaaaatgagaagtataggttgttcccccatctctcatccccaaaagtcatcaccaagattctcttcttttggccagtgctagtaggaatagctgcatccagtcatttctaaattctyttttttttttttttttttgagacggagccttactctgtcacccaggctagagtgcggtggtgtgatcttggctcactgcaacccccacctcccgggttcaactgattctcctgcctcagtctcctgagtagctgggattacacgtgcatgccaccatgcttggctaagttttgtatttttagtagagacaggatttcagcacgttcgccaggctggtctcgaactcctgacctcaagtgatccacctgcctcagcctcccaaagtgctaggattacaggcatgagccacagtgcccggcccatttctgaattcttaacagtgatatcagaatttctacatagttagttcttcccctaatatccttccaaatcatatttgccaagacagctgtgtatatatagcaatgatctttcctgttaccccttttttaagcagtctaataagcagtggtggtggtggttttgcttttcttttgttagatttgttactgttttgtggctttttttgtttttgtaaaattatttctttctggaggtggtttccttcttgttgattctttgtgtgtcaagaaggtgcaatgttccttagttaacagaacaattatattgagaatggcactttcatgacctttctgatatatctcctgtcccattaataacttgatacatgaatgaagataatgttattttaactatacacaggcaggactgaattaaaaggtaagtgttgcaaggagttttatgataggttatgtcttgtttcttctgcttctgcagtgtttcatattttatttacatttgtggataataaaagcaagtatttctggtgttagagggtaggtgaaggagagggtttcttgatggctatcatgaagttacgctgttgctgtgtcagtacactatcagcagcttagactataactgggaggaattttgttttttctctaaagtgaaatgaaaagtaacctaaaaaatcaatctatctttcttttcttttcctttctttcctctctttctttcccttccctcccctcccctctcctccccgccccctccccctgcccttgcccctgcccctgcccctacccctccccttgcccctccctgccccctccactgcccctccccctccccttgccccccctgccccctccgctgcccctccccatgcccctccccctccaccctccccatgccgctcccccttactttcctttctttcgagatgaggtttcactatgttgctggtctcaagtgatctgcccacctcagcctcccaaagtgctgggattacaggcatgagccaccacattctggccaagtaacttttttttaaatgaagaagtgaataatttacaattcttagtgttcacaggaaaatctagcatcagcttaaaaacatcatggactcttcctgaaatcagttctgagccctgaatctgttcttcagccacattgactctcatggacagtttcacattcctctgctgactttttgatgcttacatactctagaagcttggtgcaaaaattgataaactctccttaaggatgtctgacaatttctcttctagaaatgaatgctctcaactcttagaagatggaagtatggagtagaaaaatacagagatgamatgtttgcctaaataagtcagaggaatctaaagaaaataatgatcattagccaaggacttcagttagaaatagtagtttagttgcctaagcaaatrtatttaaattatgtgtccttgttcaaaaaaattcctatgtattttatattgttgtctccagcaagatttttgagtgtgactttttcgtccttctgcgatctgttttgcattccaaggtggtttttttttttcatatttttacccaaaatagaaactgagtctaactagaagtcaaatacaattcataaatcaaattgctttgtgatatttttaatagtataaatactggtaaagtgacatttatcttttgctgtaacagctagtattttgcacttaattagaactctaaaagtaggaaaacacacaacacaataaaattgttgcaagatcttctagttccttgatcccaaatttttgacattgggaatttaagatccgtctaccttaaaatatttcatgaaactaaaacatttagggataataggtcttaagggaattactctggttgaggaggttaaaaaaactaatctgatagctattattgaattttcaatgttttactttttaaaaaatttattwaaaaaaaaataggaagaaaagaaacggggtctcaccatgttgcccaggctggtttcaaattcctgggctcaagcaatcctcctacctcagcctcccaaagttctgggattacaggcatgagctactgtgcctggcctgaattttcttagtaattaaaatgtagcctacttttatgtttccagaattttgccagataatgaatttaacttaggatagctcatttattttaaaaggttagtatgtttaatgtgttctgtctactaaacaggatgactcagcaatgatgtttctaattctgttaattttgttactggagaacctggatatgcaatcacatttctcagagatttttgtggaaactcaagcaaaattgcttcctttgagcactgtagcatgggggtctaagtgtgtataaaattttaggatcataagacatatgattagcttaatgtaagacttttcttttctgaagtaaatgttttcatatagtttattattaccacacactgaawtgtggaccataattaggttacarcaatgattatattaccatattttgatttttagtatcagttgagtagccaggattttaaaattcagattctgaagttttaaatgctgctctgttgttaacagttttttagttgtccrtcgggattttacaatacagatggttagaggcagaaattgaatcagatctcaayattatcagtcagtagtaggactataaaataaatagaaaactatgacatgcttttggaaaagttcwagatattaactatgtattatttgttgtaggcgaaaattttgaccagagtcctttgaraagaacattcaaatccaaagttctcgcccactatcctcagaatatagaatggaacccttttgatcaagatgcggtgaacatggtatgtgttttttttcccctcatttactctttagccttgttttcactttattaatatgaaggtagtgactgtattttgaatgtctaccttatttcatttcatttattctttaagtgattttataagaaatgtgaggccgggtgtggtggctcacacctgtaatcccagcactttgggaggccgaggcaggtggatcacctgaggtcagtttaagaccagcctgaccaacatagtgaaaccccgtctctactaaaaatacaaaaattggccaggtgtggtggcacatgcctgtaatcccagctactcrggaggctgaggcaggagaatcacttgaacccaggaggcggaggttgtggtgagccgtgatcacgccactgcactccagcctgggcaacagagcgagactctgtctcaaaaaaagaaaaaaaaagaaatgtgatactctcctcattttaaagatctggaagcagaagctcagagaagcaagttacttgcccagggtttccatagttaataagtttatacaatagatcctaaaagcccattttagtttcctactattaaactgtgttgtgcatttgtattaatatgtagaagctttgataaacagtgatattactttattggcctgagaggagcctgatggaaagagcctgattacagttctcatgtttcaaggaatattgtatggtaggcctataatytgtcatttttacagacartgtaaagatgaaaagcaacttaattgcgttatttaggtacagtagaaatctgaatttgtattattgttaccggtggatggagtccagcttcttggtgtctggaacaaaaaattggacaaaacatacaaacaaagcaaggaaagaatgaagcgacaaaagcagagatttattaaaaatgaaggtacaatccacagggtgggagcaggcccgagcaagcagctcaagagcccattatagaattttctgaggtttaaataccctctagaggttttccattggttacttagtgtacactctatgtaaatgaagtaatggcccacgatcagtctgtttggttgtgggaggatatcaatcagaagctgaagcaaagttacaccctacacaaacatacaaccaatcagaggctgaagtgaagttacaaagttacactcctatgcaaatgaagacttggcccacgaccatcctgattggttgtgggaaggaaacaatcagaggtactttcagtttttagtctgtcatgcagaaaaagggtagggggaaggtacaaagggagtagccactggtccttttgctacttgggcatggaaagttggggttttccttttgatttagttctagaaagtcagcatgaatcggccttaggttccctgcctccagaccctgttctcctgcctcataatgagttaccagtgctgattaaatgtctcttttatccctgcatgatgttgtgcatctataagcccagctactcaggaggttgaggcagtgtgactgcttgagcccaggagtttgagaccagaatgggcaccatagcaagaccctgtctcaaaataggtaggtaggtaggtaggtaggtaggtaggtagaggtaggtaggtrggtrggtggatggatggatggatrgatagatagatagatagatagatagatagatagatagatagatagaagatagagagatagtcaaccttgagagggtcttagaaataaagtaggtcatagttttcagattatttaggaagggctcttcttagaagcctgaataatatttgagatgttcataaactctatgattatataattcagggggccccaaagtaaggaggtagcaggcatgatagatatagaaatgaattgggtatatacgtaagaatgggaaaaaaataaaaaagatacagaaatgattaaaggtgaactgagacacagtgatagccattgctatttttgagttgttttgtttggtttttgtttttgtttttgagatagtctcgctctgtcacccaggctggagtgcagtggcacaatcttggctcactgcaacctccacctcctgggttcaggcaatcctcctgcctcagcctcccgagtagctgagattayaggcgcacaccactatgcccagctaatcttttgtatttttagtagagacagggtttcaccatattggccaggctggtgttgaactcctgacctcaagtgatctgccctccttcagcctcccagaatgctggtattatgagcacatcccaccacacctggctcatttttgcatttttagtagagatggggttttgctatgttggccaggctggtcttgtactcctgacctctagtgatccacccgcctcagcctcccaaagtgctgggattacaggcgttagccactgcacccggcctcttttttagtattttaaagatattgttaaaagactccattataacctgataatctaacagaaggaaattaatattcactagatgcctgctagagtactttatgtatgttattttcacatacatgtttacatgtacccagtgagaattcttatattttcaaaggttaagtaatttgcccaaagttaggcagtaagactcagaaattaaatccagatcatttttactctctagctcactttttttctcawctgccttgctgccttcccaaaagaaaaactgtgtaactgagttttgatctacactggaaatgttatgggtcacactggaccctttgtgatatttttgtatcacagtaaactctttccagcctgggctcgctctagggaggggatagcatggtgctatttgtaaggacaaatgcctaaagcacttggcactttgactttgattccttacagagtacaatgtggttattttcctaaactgttatacaatactaaaataatcagagatgccattttgctggaagttaatattgtagatgcctagcgtcatctttggtgaagactctactatagatattatgtagaacacaactgttagttatctttataagacttggaagagtccagacaagcatctgactaaaatagttgaacagcagtgacaaaaaaataacttatgagctgcttatgcagcaaattaatagaaaggcatttaggaaaagagtgtttaaatcaagcagtggaaaactggataagaatatgaatagatcacaatacttaatcttcttaaattagtaagatatttcaaaatataacttattctgtgagaaatcagaatggtattcaaagtgaggttctagcctaagcaacatagggaggccctgtctctacaaattaaaaaagaaatagctgggtgtggtggcaccatgcctgtggtcccagctactctggaggctgaggtgggaggatcactggggcctgggtacaagtacgttcttactatatgaatccacagtcatttggaacaaaatgccacccttcatgtgttttctttcttttaatcatttgaatgaattaatagtgagatatccatgatagcttttgcctctatctgcaaaacattaatctttaaagtaattatcagcttccttgatctttgatattttctttactccttgcccctgaggttattttatgtaagcagcaaaagtttccccctgaagaataatcgcaaaggctgtgttttgatggttaagcaccacatagcattttttttattgctgcaaatctaaaaggatttgcttgtactcctggaaaatctctgaaaagcatcccattaaagtagtttgcattcgggtcacagatttactgcctttaatttcctctttgatttactagtaagtgcgtttgtatgaagctgtaatttattcccacctaaagatataaagctttgtcttgcctttagcaaaattccaccgcagtgagtcatcaccttctgtaatattagtcattcctctaacaacagtagtgctttgaataaaaggtcattaatttcatacataaattaagtacccaaagcagtgaactttgttaaataaaatgtttaatgtgtatgagtacagtgcaaataaaatagaaaataaatacaagtgacaggtgaaataattcctgaattagttttttttcctcagttgctgatcagagatttttatgaaaaaaagtaaatatcacagaacagaaagaacaatacaataaacagtcaatgtatgtattaatcacctagaactaacatatgtcaacattgacatgtttgcttcagagctctacatttcctttcctttccctttcccttcctccctttctttgctttcttttctttctttcccttgtttccacagtctcactctgtctcccagattggagtgcagtacatttaattaaattaattaatttatttgagacagtctcactctgtcaccctggcagttcagtggtgcaatcttggcttacttacaacctctgcctccggtgttcaagtgattctcatgcttcagcctcttgagtagctgggattatagtcgcgcaccatcacgcctggctaatttttgtatttatggtagagacggggtctccctatgttggccaggctggtctcaaactcctggcctcaagtgatctgcccgcctcgacctctgtgagccactgtgcctggtctgcatttcattttaaatgaaataaagcattgcaaacagagctgaaggtcccccaccccactttcacatctctttgaggtaatctgcttattggcatccatgactatgtaatattctagttgatagatcttatctttaagcctgtgttgtacctaagaattcataggaagaaaacrtggtcaataacttttaagcaaactgtatgaaaatataaggattctattttttatgtctgtcctaatgaaacatcataaatatattttaggtaacaaaagagtaataactattataaagctcttactttataatttgctgttaactttgattacaaagaaggatatagtggaatgaagagcaaagagtaaacggtgaaaggttggctgaagaaacctattcagatgcttatcttgtaagagtaaaaggaaaaagggctatatatactttttgtagacttagcaattacttgaatttgaaatggataatcccaaattacattcataggtttgacattagaatgaagataagccctcattttgagccaagtttaggttcaagctcacaataaaattttttttttttcttgagacaggttctgactctgtcatccagactggagtgcactggtgcaatcttggctcactgcagccttgacctcccatgctctagcgatcctccacctcagccccccaagtagctgagactacaggtgtgcaccaccacgcctggctaatttttgtactttttgaggagacggggtttggctatgttgcttaggctactctcgaactcctggactcaagcaatctgcccacctcggcctctcagagtgctaggattacaggtgtgatccacgatgcctagccatatctcacagtaaaattataggaatggggctttcattgctggaggaccattgctggaagacccttttgcccccgccacccccatcctctcscccgtttccttaacattgcagctagaatatttcactggcatctcaaatgcaacatatccaaaactgaattcattattcrtcccaccagtcttttgtcagtgaatggtacaaccatccacctacttgccaagtccaacaatgtacacatcaccctgaaagttctcacttactcaccctctcccatatataatcagttatctgtctacttctctctgttccgtatactcaccttggtccaaaccatcaagatctcttacctggactcctgcagtaacctgtccatttcattcctcatactatagcttctgcttctgctgttccttctctctggaaggctcttccacctctccttcacctagtgaattcttactattccttcagacttcactgtaaacatttatatagagaagctgctcctgaccatcaccttccaccgtcttcccagcactcaggtcaccttaggttctcttagtaccttgtatacctttttgtagcacctatctcagttgcagttaaccaattacttagctagtagtcaactgtgtatctcgtgcttaatgtaagcaccatgagaacaggagcagtgtctcttattcattgttatatccctagctttgcgcatagtagatgttcaaattgttgaataaatgaagtgatacttgcttacaatacttctcttccctgtccttgactaggtgtgacctccactgcaaaaccatctcttaagcaggagtagttactctgtcttttcttatgatatctcgaacagagtccgtagcaacactgatcacatttttttggtaactgctggtttctgtgtctgtctttcctactagactgtgaactccctaaaggaaaggattatttttatctttgtcttttgagttaccaagatctaatgcaaaacatgggacaaaataagtgtttatggaaggagggagagaagaggggagggagggagggagacattctgagaaatgtgttgttaggtgattttattgtgcaaacatcatagagtgtatatacacatacacagacctaggtgatatagcctactatacttctaagttatatggtataacgtattgctccagccgttgtcctataggcagtccattgttgaccagagtgtggttatacagtatatgattgtatttgcataatgagggagaggccatggaagtcatagaactacaagatgtggaaaaaggaattttaaaattctagccaaactgcctgaaacggtctagagaaatataagaacatttgctgactcaaactgggaaagttacacacttgtcattataagcctgctttggctaaagtaatctggttactagtagtartctgatcatcagtgacacctctaatttttagttgttttattgtgggatggtgagggggtattgttagtagatagcaaagttaagggttaattagaaatgtttaataccgtgataaacaaatcttgatttatatttcaggttttctgagatttcttgtagttcctgacagtttaacaattctgatgaaactcaggttttctgagaaagtatcttgtagttcctgatataaaacartactgtatatcttttaaaaatggaaaaataatagcattttgcagttcatgtttcccgattagatatatagttcttactttttttgatttgttggaagagcatttaggaaaaattcttacatctgttgtctgtagcatagaaagccattcttcactttgagtacaacttttggcaagctttttctgtaaatgtttgaatgtgcgctcaagaaagctacaaacccttaagggaatatttggcagctgttcaacagcagttgagctatgattttgtgatttaggatgacaggaacgcctatcaattaaattaaatctttatgttgactttggtggtcactatgtttctgtattgcctacttgatggaaaaagaattacaagctgaagtccaggcactgtggctcacactgtaatcccagcactttgggargctgaggcgagtggatcacttgagaccagaagttcaagaccagcctggccaacatggtgaaacctcgtctctactaaaagtacaaaaaaaaaaaaaaaatagccgggtatgcacgcctataatcgcacacacttgtaatcccagctacttgggaggctgaggcaggagaattgcttgaactcaggaggtggaggttgcagtaagctgacatcacaccactgcataccagactgggcgacagagtgagattccgtctccaaaaagacaaaaaaagaattacagaccagatcaagaggtgaactaagcctggtgctttacccccagctgtttttgtttgttttcttgttcattcatttattcattcaaccaattgttatatgccatgcactgtgctaaacaagtttgagtttagcctggagcaagaataattcaaattatcccttctacaatctttattgactacaataaatgtgtcaaatgaagtttttgggtttttagggttttttgttgtttttgtttgtttgtttttttgagacagtctcactctgtcttctaggctggagtgcagtggtgcagtcttggctcactgcaacctctgcctcccggattcatgcgattctcgtgcctcagccttccaggtagctggggctacaggtgtgtcccaccacgcccggctaattttttgtatttttagtagaggcagggtttcgtcatgttgcccaggctggtggtcttgaactcctgagctcaggcaatccacccgtctcagcctcccgaagtactgggattatgggtgtgagccactacacccagccaaatgagtttttattcatgctatcagcagagcaactcattaacttgttatgatgaaatcagccttaatgtgaacgtagaattattaaaagattctgccatagcctttccttatacagttattcctaagactaggartaagtggcttttaccccctaccaaatccaggtattcataggttttacctaagtctatatctcattctatccaaatatacatagtaatttaatatgtaaaagaattgagtaaatctgccttagtcctttccacatctcatattcaatgatatgaaatatgaagacattttcactggtgcactaatgctgagcttcacagttttttctttttacccatgttatcagtcaccacctgttatggccccaaatggtatattattccattgcagttcccttgaatgtttaaagttattgaaatgaagtactagcccttgagtagctggcaatgtagagatcaaacagaattatacaatactagtaatgtgtatgtttatataatgtacatatgtttacagtggtgcaagactttaattgcttctccacaataaatactttttagaggagtaacattttatggcatgcaaaagatgaagagaacactattttttatggaaaggtaaaggaagacctctctaaggtagtatttatgtagagacttaagggaagtaaggaagtattttgattatctatcgctgcatgacaatccatccgcctaccagttaatggcttaaaatagggcttggcaatttttttcatgaagaaccaaataataagtagttgaggtattgtgggcatacagtttctgccacagtcacccagctctgctgttgtagtgtgaagrcatccatagacagtgcataagtggatggttgtgactgaatcccagtgaaactatttacagatcaggtggcagattgtatttgacctaagggtttttcttactccattcctcctgctaaaataaaatacttcagactgagtaacttacaaggaataagaatttatttctcacagttctagaggttgaaagtacaagatcaaggtgtctgtaggtttagggtctaatgatggcctagtctctgcttctaagatggtactttgttattgtgtactccagagaggacaaatgttgtatcctcacatggcagaaagcactagggtgctgctcccttcaaccttttataagaaggacgaatcctttcatgagggcagagcctgcatgacttaatcacttcccaaaagtccccaccttttaataccgtcaccctgaagtgatgttccagcatatgaattttggaggcacacatatatttaaacccatagcagggctgttgtttgctgacccttgatttaaagcaacaaaatcattacttagcctacatatctgcaatgtaggtagcttttggttggctgcgcctgtattctacttggtgttagtttggaaggtttgaagtctgaggactgaaatcatctgaaagctcacccactcacaggcctgtctcctggaccaggcatatagctagggctccttctgtctctgtgtggtctttcatttggtctcaccagtcaggcagcttcaggctagctaaactttttatatgttgcctcagggctcccagagtgtgttaccaggttaccagagagagagagagagagagagagaggagatggaagctgtattgccttttttagcctctgctcaaaagtcactctgtcacttgtcactgctgttgcattttacttgactaggccaggggtgggcatacatggcccccaggccaaatctgtccagctgactgtttttataaataaaattgtgttggaacaaarccatacttacgtgtttaaaggttggtacaaaagtaattgtggttttggacagaattttaaatcataactaggctcaagcacatccttattaatcaaaatargaaccattacaatcaacacatttttgccaatgagaaataagtttgtttattcctgtaacgtaaaatatccgtgctttgggatttgatgaactcttggaaagcattttctgcatcctgctggttgtggaagcgttttccctgcaaaaaattgtcsagatgcttgaagaagtggtcagttggcaagaggtcaggtgaacatggtggatgaggcatgactgcatrgcccaattcgttaaacttttgaagtatttgttgtgtgatgtgcggtcaggcattgttgtggaaaakaattgggccctttctgttgaccagtgcccgctgcaggctttgcagtttttgatgcatctcatcgatttgctgagcatacttcttggatgtaatgatttcgccaggattcaggaagctgtagtggatcaaaccagcagcaggccaccaaacagtgaccgtgacctttttttggtgcaagtttggctttgggaagtactttagagcttcttcttrgttcagccactaagctggtcatcgccggttgtctaatgaaatccactttttgttgcacatgacaatttgattgagaaatggttcgttgttgctgtgtagaataagagaagacgacacttgaaaatgatgcttttattttattttgttttgttttgttttgttttgtttgagatggagtctcactctgttgcctaggctggagttcagtggcacaatctcggctcactgcaacctccgcctcccaggttcaagcaattctcctgccccagcctcctgagtagctgggtctacaggtgcatgccaccacgccctgctaattttttgtattttagtagagacaggatttcaccatgttgcccaggctggtttcaaactgagctcaggcaatccgcctgcttcagccttccaaagtgctaggataacaggcatgagccaccgcacctggctccaagatgacgattttttaaaatttccactcagctcatgaggcacccasttaccgagtttttccacctttccaatttgcttcacatgtcaaacggccatagaatggtcgacgttgagttcttcagcaacttttcatgttgctgaagagggtcagcttcagtgattactctcaattgatcattgtcaacttctgatggccagccactatgctyctcatctccaaggctgccatctccttttcaaaacttcttgaaccaccactgcactgtgcgttagttagcagtccctgggccaaatgcattgtcgatgttgtggttgtctccactgctttacgacccattttgaacttgaataagaaaattgctcgaggccgggtcgggtagcttacacctgtaatcccagcactttgggaggccaaggcgggcagatcacttgaggtcaggagtttgagaccagcctggccaaaaatggtgaaaccccgtctctactaaaaacacaaaattagctgggcatggtggtgcaggcctgtagtcccagctactcgggaggctgaggcttgaacctgggaggcggaggttgcagtgagccaagattgcgccaccgcactccagcctgagtgacagagtgagactctatctcaaaaaaaaaaaaaaaaagaaaagaaaagaaaactgctctaatttgcttttttgtctaacattttcagtctaaaatctaaaataaacagcaagtaataagtcattagcaaaaaaacataaagcgagaaatgcccmttaaaatgatggtccaggctcagtggctcaagcctgtaatcccagcactttgagaggacgaagcaggcggatcatgaggtcaggagtttgagaccakcctggccaacatagtgaaacccatctctactaaaaatacagaaattagccaggtgcagtggcagacgcctgtaatcccagctacttgggaggctgaggcaggagaattgcttgaacttgcgaggcagaggttgcagggagccgagatcgcgccactgcactccagcctgggtgacagagcaagactccgtcttggaaaaaaaaaaaaaagatgtatactataaccacatttatttaaaaagtgtattccaatgtcaaatggcaaattccaacaatgcaaaaaccacagttacttttgcactcacctaatacaatgtggagtggagcagttgtgacaaagactgtaatggcctccagagcctaaaatacttatctgtctctttatagaaaaagtttcccagatcctggtataggcactctcagcagcccacccaggttcaaggagagtgagctccacttcttaatggggaagtgtcaaggtttggaagagtgtgtgaaagtagaaatattattggagctatatctgccacaaggaatgagtcatgtggataccaaggggaagaaagctgctggaaaagggaagagcagattttgatgggagcacgcggggtgtgttcatagaacagtaacgtgccattgttgctggagcagagtgggtgagttagagagtataagatgagggcagagaggttgttgggggctgagtcatgcagggcttccctgcaggccattataaggacatcagcttttagtgagataagagtccattggagaatkttggcaagagtgacaagatctaacatattttttaaggattgctttggctcttataagggaaatagattatgggggacaagggcagaaacaggctgttacatccagacaagaaaagagggtgacttagattagagtggtaagcgtaaagatcaaaacaattactttctgactcaggaggctgaggcgggaggattgcttttacycaggagtttgaggctgcagtaaactgtgattgtaccactgcacttcatcctgagtgatagagcaagacctcacctctaaaaaagaaaaaaaaaaagaagcaacagcaattagtttctgcatgtatttttgaagatagaattgataatatttgctgatggattggataatggggtaagtgagaaagagaggaagaagttaaagatgactccaaggtttttgtcctgggcaaattagatggatggaattacagaaaagactgatataagaagaaactgatttggaggaagaaatcagaacttcagtttgggacatggtaagtttgagttgcctattagacatcttgatgggattgtcaagtagttactcagttaagagtcaggttcatgagattgtagatttgggagttgaaagagtatatttaaaatcatggaagaagttgctctggaaatgaacttggatagaaaagaaacccaaaatgtggcacaatcatgacatgagcttcaaagccaatagtttttagggtaaaggaaaggaccacaatctgaaatggctgtgaggagcagtttggacacccacccgccttcatgcttaatgacaattgtgttgcattaatcctatcccaccatcaagattttgtttttaagcagtgggaacccagaaatcttaacactgaaagaattccactctacagaataaatgaaagtggaatgtgcataggggaagaagggacactggccctctcaacttcttcctctagcctctcactcccttccaaggccctgagacattcctgctgcctctttggaacccctttgaaaaccactccccttagtgttccaagatggatgtgctaagaggcacrtctaattctgtccctctyctaaaaacccttcagaggtttcccattgtcctccccacagttctaacatggcctaccaaggcccttcatgggctagcccctgattatttctcttgctttctctcacgtcctcccaccttgcattctctgccccacccacactgacctgttcagttcctcaaactcttctgggcttttgcacatgtcctctctgcctggaatcttctttatccactaagacctatactcgtcctgaggtttcagttgggcttcattttttcctggtagctcctycttttctaatgtgtgtcttcctactattatatgtttttcccatagcaacccttatttaccctatcatagcacttcccttactttatagtttatgatttttaaaacttacctgttaaccttactcgactggaaataccataggaccatgggccatgtctgtccttcccaccattgtatcatagggcccctctcataaaaggcacttaataaatgttttttgacggtttgaatgaagaaataaaggaattgtattttcttggtaatgtggggatgtgggagacagtctaaattttgtaccacatcagttattaaatatagaaaaatagtaataatatatggttaaattatttctatgtaaaaagcatattgcaatacaaaaatagaaatatctaaatatgaataatgagtattaggatggttgaattacaagttctgttttccttagtatatttcaacttttctgtaatttcacttcttttatttaaaatgttttaaagaatcaattctaattttctgtgcattttaagtgtcttaaatatagcatctttagctcctctgggtaattttgttctcaagtttcctcaatcctgggtagttcccaagaactagagcataatctctactagaagtaatctaaaatgccttgtttctgtgcttctgctttagtagatcaaaaagctttcaatttccaaagtttctttttcttggataaaataccatactattcaaaatagcaaagatgacactgttgtttttattattctttgtttaacttttttccacttcctaaatgagccttttcctatttccctgtattaaatacttgagtactatttttgtgaagtgctttttaatatttgtgaaatgcttttgcctactctgtcttcaagtcgttgatacagcaactattgtagataaaggaactgaggctcacagaagttatatggcttgctaaaggccacaagcttggttagaggtttactctgggactaaatcagtgattctcttgttcttagtaaagccccttgcatgtaacatcacacagtaaaagtttttcccttgtatatactccttttaagaataattttatatacatgtgtatgaggaatttataatatatttctaatttaaggctattgcgaatattaaatctggataaaacctgtctttttgaatcctgttatgttaaaaaaacaacatttatttctggcttgaagttatttgtgtactgcattctgatttttttttttctttctttcacagttgtgcatgcctaaagggctatctttcaggacacaaacggacaataaagacccccagtttcactcatttatmattaccagggaagatggttctcgcacctatggttttgttctcactttttatgaagaagttacaagtaagcaaatctgcacagcaatgcagacactttaccagatgcacaacgctgagcattacagcagtgtgtatgcttcatcttcctgcagtatggactcattggcaagtagtcttgatgaaggagatacaacttcccttttgaaactccagcgatacaactcctatgatattagcagagacaccctgtatgtttcaaaaagtatatgcttgatcacaccgttaccattcatgcaggcctgcaagaaattccttatccagctttacaaggctgttacctcacagcagccaccacccttgccacttgaaagctatatccacaatattctttatgaagtaccccttccacctccagggaggtcactgaaattttatggtgtttatgaacctgtcatctgccagaggcctgggcccagtgaactccccctctctgattacccccttcgggaggcatttgagctcctgggattagagaacctggtgcaggtgtttacctgtgttcttttagagatgcaaatccttctctactcacaaggtaggttttccttggattttacattttccaaaaacaagtacttttgctcccaactactgtgtttccatggggtrtattattagaaccgaataatgatcacagtcttttctgttttgtgtaaagggagcaggtatggtgggaccagyggctgagatgagactgctgtttctctttgaggtggcagtcagtgactgcagagagaaataggaaggaacacaagtgttaacttggctgatttgggtrtatttatttattaatggaaatagcccttttttcctgataatatataatcgtcattaagaaaacattttttcttcatcataatgagagtgagagaactctgttactaccagaaacgtgtagacttcccattctttatggattagtaaaggttcacatcaaaactcagcgaacattgaaaagggataaatgaaattgttgactctgcagcttcctgaggcaatcaactttggatctttgcctgtgggagcatttcatctgagtgagagaaaaggtgagcaggcatgagacagatgactttcccaggtctaacagttctgccagagttgtgtgtgtgtgtgtgtggttttttgtttatgttttttaatctcagaaggaagttatctttgtggtatctttcattcaaagttcttccaacacatattaagaaaataacaaactatggattttattttaccagtacrtttgtgaagactaatgctgagcctagactaggatactagttgtcatctgaatatgaatgtgtagagaaaatagagatgctatgtcttaatggatagtgaattgaaggaaattataaaatagtacctgtacactgatagattcttcaaaaaaggttacacaaatatttggattcacttttttttttagacaagttctcactccgtcacccaggctggagtgcagtagtgcaatcatgggtcactgcaaccttgacatcccgtgctcaagctgtcttcccacctcaccctcctgagtagctggtactataggaatgtgccaccgcatcagctaattttttattttttgtagagacggactgtcactgtcttgccctggactctcaaaatcctaggctcaaatgatcctcctgccgtggcctcccaaagtgctggaattacaggcatgaagcattgcacccaactggggttagcattttgctaacttgtatttaagctggcagaattgtagtgcaatcccgactggtgccgtcaagcttattttaccactttcctttttttatttttctattttaaattataagtggggctgagccaagtagactatatttgtacttccccatcttgtgtgtatgttgacactatttgtgtgttgacagccgttcacaaggttgtattttcttcagtttatccaacataatgttctttgataatgtgtttcatgtctcaatttttgttgtcaggaagttattctctaatgaccaatctaaattctttcctttcttctttcacccactttctttttatatgtatatatttaaaatatattttagtgaaacactttctcatcatctttagataaaaaaaaaatccattttttaatctgaagctccttgggcattaggagttaattgctttctgctccacagatttcagatgccactgcactaattccccagtgctcttgaggcagagcttagacatgtcctcctcagttggaaatccttgtggcaacttcaggggcttgattcttactgactgttaaaccactttcagttttgcattcactgaagcaatatgcttgtgaacttgatggatatgtgtgttttctaatctgagcatctttattatgtctttttcccaatatggacacctttttgtacttttttattctggtaacaatatgcagtttctgaggattctgtggatctccgtcatatttttcatgatctgcaagtgaaggctgaaacsctttatatggaattcttgacctggtaaatttgtgatgaatccaatctatgtaaacgagagacttcacaccttttgtcccagtctgtagttcattttgcctcttgagctactgacagcaaagtccctgccataagtgtggtggctgttctctttagagagagcgcctgctaaatattcagcatgaaccttccsaccagcagaagctgaggactcactgcttccattattacttacagatcacctttttgtatctgaaaaattttaccttaagtaattctctcttcctttcttccttttatttccctgaatggagtagggattagagaatggctagaaggggcagaggcttggagcttaataccttatggtgttttagcccattagaaaaaaataacttttttttttttttaagacagagtctcgccctgttgcccaggctggagtgcagtggcatgatcttggctcactgcaaccaccgcctcccgggttcaaacaattctcctgcctcagcctcccgagtagctgggactatgggtgcgcaccaccacacccagctgatttttgtatttttagtagagacagggttttcaccatgttggtcaggctggtcttgaactcctgacctcatgatccactcgcctcagcctcccaaagtgctgggattaccggcgtgagccactgtgcctggccgaaaaaaagaactttgtattctagacttagaagaaatcttaaaggccattttcttgaatcttgaagttcaatttatttatgttctgcctagagaagcaatttgggttagaaagaatattgggggtgggtgggttcttttgttttgcctttaatttttagagatggggtctcactgtgttgcccagaatggagtacagtgtattcacaggcacagtcttagcacactgcagcctcaaactcctcagctcacaccatcctcccatctcagcgtcccgagtagttgagactgcaggcacataccaccatgcctggtttagagtattggtttttgaagtcataacaatcctgggttcaaatgtctactctgtcatttattaactatacccatgggcgagttaggtaatcctcctgtgtgacagttgccacatctctatagggataatagtttgggttttttttttttctcctttctcactgatctattatgacaattaaataagaaaacgtgtataaaatacttagggtataattgacactgactaaatgatagctgatgctattataataattactagttttattagtcccatataatcttctataaattacacttatctctaagttgtgaaggttcaacatattactacatttaacataaaacctttttaaatgatacagtcaagagtttattccagagttgagaacctaataaatgttcttttatattgtataccatgctttttttagaaggcaaaaaaaaamyccaaaagcttccattatcacacttcctcttttattttttatttttatttttttttattgagacggagtcttgctctgtcacccaggctggagtgcagtggcgcaatctcagcatattgcaacctccacctcctgggttcaagcgattctcrtgcctcagcctcccaagtccctgggactacaggcgcgcaccaccatgcctggctaatttctttgtatttttagtagagatgaggttttgccatgctggctaggctggtctcgaactcctgaccctaggtgatctgcctgccttggcctcccaaagtgctgrgattacaggtgtaagccaccgcrcccggcccacacctcctcttttaagtagcaggttatgtctcaccgtttgtggtctgtcctgagctctcctatttctgctctttttttgtttgtttgttttgagacagggtgtcactctggtgcccaggctggaatgcagtgacatgatcgtagctcactgcaacctcaaactccagggctcaagcaaccttcacccctcagcctcctgagtagctgggactacaggcatgcattaccatacctgactaatgttttttatttttagtggagatgaagtctcactacactgcccaggctggtttgaaactcctgggctcaagcgatcgtcctgcctcagcttcccaaagtgtagggtttacaggtgtgagccactgcttagcttgtcctgtttggtttgtggagtctgttcaggagttttagctcattaatatctaccaatttatttcagtttcaaatgaagaagaataagcatttatggatatggttttatactcdatttttttgtaatctgtatgccgagaacaacagagtgaatcctgagattatagagctagatttttaaaaaatttaaagtgacataccccaaaaaattgccatacagtaaatttataaccattcactaaaatcactctatgttaggaattgtgctacaaaaaggcattgtatattttggatcttttccctacatttaatcctctcaacagcagtgrgttagtgctgttgtgcattttttgttgaggaggagattgaggcttggggaaactaagtaatctgcccaagatgatacagctagtaagtaatgtagtactactaagaattgggtttcatcagtcttttttcagatgcttaaccactgtgttaactgtattgggcactgcacttaacctctccttatctgtctcaatatttatttttaaatgattaactcattctgtgggtctattgtaaaggtgtcatgcgaagtaattgtagagtataaaatgaaagcgctgtgtaaatctagattttaatattgacaatgtctcttctattagagaaaaatatttcagttaaatgaatgaaataggtgtccttatgttgatttgtacttgggtgccctcctttactcttcttaactgtgttaagggggttttaataacatgtgatacttcatttcttactcactgataaagctatgccataaatttaaaaacattgcrtgtgctgaagagttaccatgaaaacccaaagtgaatcaaagtaggtggatttcagtgatgaaaatgtccttctagactgatttgaaattctgatccacagcccatttaaaccaattcaatctgttatttaggaaatgcatatatcactgtcactttgcagtggtaactagctagaaattctaagtagagaaaatgtacccaggatgtgaaggctcttttctaggaccccagatcagaaatgggcactttgttctgcaactgggaaatacctggagcagcacagtatgaaaatcagagtatgattcttttttcaaagaactagtggaagaataaaaggggaatttaaacaccattgtctaacttttgataccaataattgaagtctaagaaacatttttgggccttgcttacctcctttggttcttcatagtggaaataaaccactacccacaccacactgcatgcctgtgtgcctttgcagtgcttgtctgccatccctctgttcgtttcattcctctttgagttgtatgtgaattaaccttgtcagaaggtggaagctacttaaagttttcttgaaaaagttgggagctttctcatcacaaattgctaggcatgctcaagtggacatcatagttctccttggaactgccatccataaaccaaacagtactttgctggtcaactgagaggtatttatagggcattgtccaagtgacaattaaatgcagaaggttctcctacagttccaaagtcagtccaagggaaaaagaggctccctatatgtgagaatctcttccttgcattcctctggtaacaagatccagtataaaccatttctttttcaatagggawctcttttgggcactgtcctctcccattagagtgtttttccaaaatcgccttagataccgtggatatttcaagtttcagcattgttttatgtccttcagtcataggggcactttaaatcaatatccaatagcaaacttagtagttgcctctgaaatggaaagtctgtagtccagcaccctgatagttgtcactgggaggcactcgcaggctttcgacataagccctagcccacactccacatacagagaatttgtctgtaccagtgctccagcttctcggttctacactgcgtgagctcaggcaatctaattcattcccatttagcatgtccaattaataatgcttgaagggtagattgacactgtgccctctgttttactgtactaggtaggagaaatggggtgaaacagtcaaacctaagatccactcccataaaacatttagataaagtgtgtttaaacattccaatttcattcaaacttcctccttaatcctatcaaccttaacactttaatatattatcattctaattgtagcctgcgttaaggctgtaagccactgtgttgaggcaatggctcctgcctgtaatcccaacactttgggaggttgaggcaggaggatcacttgagcccaggagtttgagaccagcctgggcaacatagcaaaaccccatctctactaaaatacaaaaattagctaggcatggtagtgtgcacctgtagtctcatctactacaggggctgaggtgggagatcgcttgagcctgggaggtggaggttgcagtaacctgagattgtgccactgcactccagcctgtgtgacacagtgagaccctatctttttttttttaaaaagacttcactagaagattttggtgcaacagcatataaggctctcaaatgagtcccagaaacttctccatcccttgattatttgacccactcctgtgcattaggttttgggtgttcagcaaggtatcttggcccttttgtgagtctttattttgattaatttaccttactatatatccccaagcaattccagatcatgtttctaattgtaatctttcccttcttacattttaaatttctctgtgctggggcaaatagagcagatttgtttgagccctttaattttgggaaaccatctgagggtccttatagtccatgcaacctttggtagtgctatattaagactttcatttcaggctgggtgccgtggctcatgtctgtaatcccaatgctttggaaggccgaggtgggcagatcacctgagttcaggagtttgagaccagcctggccaacatagggaaaccctgtctctactgaaaatacaaaaattaggcaggcatggtggtgtgcccctgtaatcccagctacttgggaggctgaggcaggagaatcgcttgaacccaagaggtggaagttgcaatgagccgaggtcgtgccactgtactgcagcctgggagacagggcaagactccatctcaaaaaagacttttgtttcagtcccatcaaggtctgttttattcaccctatttcttaatagacacttaaaaatttccaccctgctgggttgagtcctttgactcattattaatgtttttattagcatctgtaagatgagagtaagctgagatagcaaattcaataaggcttctcgtaatgttagattttgaagcagtaaagttacatggagtgcccacataaaaggagcctccctaaccgcagcatttgccctgggtaacggatgtattcagcgggtgaatatcccgattatcataaagccagtcctgcgtggcttttgtgcagagcatatcagcttcttcatctggggtgttccacttggaatttatagggggaattgggcagtctcccttctcaaggtaaacagacttcgagtagcttttatccagtccttgagactggctgktccctcaaggattggataaaacagttcaattcatttctgactgaatcatcacctttgtgtctggatcacatatagccatctgtgattgttccatagtgagctgtgggccctgtgtcaacccaagcatgttcttccacgctgcagcatttaaaaataaagatactgcctcgaaattagttcctgtagcagagattcatcaggaagtggatgatacttatctataaaatgagacttcatactatcccctggtttctgttgagggcaggagttcaagaccagcctggccaacatggtgaaactccatctctacctcccttgtggcagattgcttgaggtcaggagtgtgagaccagcctggccaacatcacgaaaccctgtctctacaaaaaaaaaaaaaaaaaaaatacaggcatggtggtgtgcgattgtaatctcagctacttgggaggctgaggcccgagaattgcaggttgcagtgagctgagatcatgccactgcattccagcctaggtgacagagcgagactccttctcaaacacaacaaaattatgtggaaacaacaaagagtgtctctaagatctctggtcaccagaaaggtactccacatgggggaaccacaaaaccaagaaactacagaatacctaagggtgttggtgaggaaatgcccaggcggtttccacataatttttcccgttgggagtggctttgaggctagttgtcacgccctgaccagcagaaatctgagcttggtccagcatcaaggttgacctagcactcttttaaatttcattttagcttttacatagaacaataaccaagggattttatatttaacttttttctgttggtttgcatttccttatatatccagtgaatcccactccctgggaggtggattcatctctaaattccattagttacttttaccttcagtaaatggtctcagcacagstactgctccatcccatgagtggccacccaggaattaaaggttcctaattccccaccctctcattgtccctcttcccaaaccacaggtttccatgagcctgggctgttataacaaatctcagtttttctgacaccaagtgagagagtctttcctccccaacacctgtcaatttgtgataccarctggatgcccaacagttcaattcattcctaactgaatgtcagactccacaggtttaagagttcattctcacaagactgtcctcacttctgatgccagccacaaatgaggtatcaggtgtcttggtttatttgtgttactrtaaaatacctgaggctggttaatttataaagaaaagaagtttggcctggtgcagtggcttacacctgtaatcccagcactctgggaagctgagacaggcagatctcttgagcccaagagttcaagaccagcctgggtaacatggtgaaaccccgtctctacaaaaaaattaaaaataaggccgggcacagtgtatcacgcctgtaatcccagcactttgggaggccgaggtgggyggatcacctgaggttgtgagttcgagaccagcctgaccaacatggagaaacctcatctctactaaaaatacagagttacccaggcgtggtggtgcatgcctgtaatcccagctactcgggaggctgaggcaggagaatcgcttgaaccctggaggcagagactgcagtgagccgagatcgcaccattgcactccagcctgggtaacaagggaaactccatctccaaaraaaaaaaaaaaaaaaaagccagacatggtagtgtatgcctgtagtcccagctacttgggaggctgaggtcgaggatcacctgagcccaggagttagaggctgcagtgagccattattatgtcactgcactacagcctcgtgacagagcgagaccctgtctcaaagaaaaataaaagaggtttatttggctcacagttctgtgcatgtgctagcacctgcttctgatgagggccttgggaagcatctactcatggcaggaggtgaaggggagccagaatcacatggcaagaggaaggaagcaagagagaggagggagatgccagactcttttcaataaccaattttcatggaaagtaagagtgaaaaactactcactcacaaccatgagaatggcacaaagccattcatgagagatccacccccaggacccaaacacctcaccnccaacattggggccaacaaaccatgtccaaaccgtagcaccaggccacatacattttttcttggatgactacaaaatcaggggttccccaacaccatcccccaacccctcaagttctataaattcccagaatgattcacagaactcaagaaagcactttacttattgctaactggtttattataaaggatacaactcagaaacagccaaatggaagagaggtgcaaaaggtgtaggggtgggtgcagaactgctatgctttccttggacttacccagcaccttaatgtatttgccagtccagaagctcctctatatttcttcttcttcttcttcttcttttttttttttttttgagatggagtctgtctctgtcacccaggctggagtgcagtggcgtgatcttggctcactgcaacctttgcctccaggttcaggtgattctcctgcctcagcctcccgagtagctgggattacaggcacatgccaccacagctagctaatttttgtatttttagtagagacaagttacaccrcgttggccaggctggtcttgaactcctgacctccagtgatccacctgcctcggcctcccaagtgctgggattacagacctgaggcaatgcacctggccacctctatttttttcttgaataaatttttgttccttgctattttctctaagaaaatttttattaagctttcaatatattagcaaaaagtcttaatatttycttgttttcttgacccctgttatatctgtagttttgtcctccttttcattcctaatactgtttgtgcattctctttttcccccaattatttttacctgaagtttgtcaattatattacttcyttttgtttgtttggttttttgagacagggcctcaccctgtcgctcatcctggagtgcagtagcacgatctaggctcactgcagtcttgacctccctgggctcaggcaatcctcctgccttagcctcccacgtagctggagctacaggtgtgtgccaccatgcctggctaatttttttttttattttttgaaatgacagggtctcactgtgttgcctagactagtcccaaactcctgggtccaagcgatcctcctgcattggcctcccaaagtgctgggatcacaggtatgagccattgtgcccagccctattactctttaaagaaccagattttactttcattggtatcttctgttgtacctttgttttctgttttattaatttatggttttgtttttattattcacttctttctactactttttttgggcttattaaacctttctttctccccacctgcccaccaaaaccagtatcttaagcacttgagtcctgtgttagctacatcccacaagtcttagtatctgatactttcattatcattgaattctaaaaataaataaataaataaataatttgagacagggtcttgctctgttgcccagactggaatgcagtggtgtgatcacagcttatggcagcctcaacttctcagggtcaggccatcttcccacctcaacctcccttgtagctgggactacaggtgcatgccaccacacctggccaatttttaaattttttttagaggtggggtctctgtatgttgcccaggctggtcttgaactcctgggctcaagcaattctttcacctcggcctctcaaagtgctgggattagaggtgtgagccatcatacctggctagttctaagaatttttaaaatttcatttattttggccatttgtcttgcttttctctctctctctgtttttgatgttttgaattgatttaaatttttttctcattgcagttttttctgtttagatgttatatgctmtttttctkaatgataaattttgagatttcaacatgaacagttactcttatgttatagaatcttcacagataactataaaatgctttaactccatgcccattgtggcttacttgttatgattgttcagttttaataatccctcaaattagacatttttattctatacacttggttttgtttaaatttactcatagtgaccttattttgtttttctttgaaataaggtctcactctrttgcctaggctggagtgcagtgatgcgactgaactcctgggctcaagcaatcctactgcctcagcctcctgatagctgggactacaggcacangccaccatgmtgggmtaatttttttcttactttttttttttctttttgtagagatgggggwctcactgtcttgtccaggctggtcgtgaagtcctgggctcaagcagtcctctgcctcagcctcccaaagtgctgggattataggtgtgagccactgcacccagcctcagttattattttttgaaaattcacattttatttcatatcttagagatttcttttgagatcagtcttcttcctaacatgtgttcttagaagttcctttcctgagatagctttctctattagatcttattttgtccttgtttttgaaaaatagttcattggatgttaaattctatgttaaaagttttttttttttncttagtactctgaggataatattctatcatcttaaatagttcattggatgttaaattatatgttaaaagtttttttctcttagaactctgaggataatattctatcatcttctggtttcctgtattgctgttgagaagtcagccatcacctctaatgtcattctaatgaatgactctcattgttactcattagccagaaatctgtcttttcaactctggttatatttaagattttctgtctttggtgtgtgatattttgactgatttatctgaatgaggctttatttgttctgcttgtggttcattatgtttcctgaaatttaagaattaatgtcctttacccattttggaaaattctcaactatctttgtaaatattgcattcrtgtatctttttttaatcctcctgaaattctagtgaaacttttttttgttgttgttgttgttttgtttttgagacagagtctcactttattgcccaggatggagtacagtggtgcaaactctgctcactgtaacctycgcctcctgggttcaagcaattctcctgtctcagcctcctgagtagctgggactacaggcgcatgccaccatgcccagctaatttttgtatttttagtagagacggggtttcaccatgttggtcaggctggtctcgaactcctaacctcaagtgatccacgcgccgtggcctcccaragtgctgggattacaggcatgagccactgtgtccagccttaaacatgttaatctgtcttgctcaatcttccattatctctcaacccttttttttttggagatggagtctcactctgttgccaggctggagtgcagtgttgcaatcttgtctcactgcaaactctgcctcctgggttcaagtggttctcctacttcagcctcccgagtagctgggaccacaggtgtgcaccaccatgaccaactaatttttgtgtttttagtagagacggggtttcaccatgttggccaggatggtctcgatctcttgaccttgtgatccgcccgccttggcctcccaaagtgcttacaggcgtgagccaccacacccagcctcattccaattttctgtgtgtctctgtgctgcattctgggtaatttctccacatctgtctccwgctttatgaattctctctttacctgtgtttaatctacaattagccctttctttgacattttttggtcacagtgaagcttgttacagacaaacatgtttagrttgggtggcttaggtggtgtggtggctccacattgatgtcatactgaggacaggggtcaagtactccatgattagtctttgctcttacttcaggagctgcsagaggctgtgcctttcattttctagtgccgtaggtcattgttggcaatacctgagatgaatttctgtgaaactagggagataagccaaattatgcatgtgtctgagacctcaaagccaacataattcagataatgctcagtcacattgggccaggcgcatggctcacgcctgtaatccctgcatttagaaggctgagacaggtggattacttgaggtcgggagtttgagactagcctggccaacatagtgaaaccccgtctctacaaaaatacaaaaattagccaggcatggtggtgtgcacctgtaatcccagctgctggggaggctgaggcagragaaccacttgaactcaggaggcggaggttgcagtgagccaagttcatgccactgcactccagcctgggcaacagagcragattccatctcaaaaataaaaaataatcagtcacagcatccaggatcataggtgtataatcctccagctacatcaggaagtccaccagaggcrtgctggataccaccagcagcttcacatctccattggcagtgcttggcagggcataagccttgctagacacagctyctggtctgcaccaccatggctcctgtgccgccagccacaggtccagacctagacccctctgttgcccttgaggrgctgaccttattctccacagtgatgctggtggacagcrtggcaggggctgaggcagcagaggccattgccaccttgggatctgtgccagagccatcactaggcacatttttgacagtatgtttttattgtataatatagtcaagcataattttttaatgtctacttttatttcattttacatgccttagatgttaacatattaatttctcaaagcacgtttactggctactcatcatgtagtaggtcatatgttgaatgttaacaattctgagattagaaatacagatatgtccaggcacagtggctcatgcctgtaatctcagcactttgggaggcggaggcaggcaggcagatcacttgaggtcaggagttcaagaccagcctggccaacatggcraaacccctttctacaaaaaacacaaaaaattagccaggcgtggtggtgcacagctgtaatccaagctactcgggaggctgaggcatgagaatcacttgaacctgggaggcagaggctgcagtgaaccaagatcgcaccactgcactccagcctggacgagagagtgagaccctgtctccaaaaataaataaataaaaagaaaaatacatatattgctctctaggagatgatggggtattgrggaagagagaccatgaagagagaattatgatagaattgtaatgtttcagtgagatgaataattcctgggatggaaataaagatagggtactgttgaagcatgtagatagtactctggtgataataagaagtgttagggaaggctttccaaagaagcaattgcctgaggaaaaagtggaacctagtcaggcagtgcaagaggaagggacattctgggcagaggaaaacaatatacaaggggcacaaggcctgtgaaaacatggactgcaagcaagtggtcttactgcatatggagtgatgataaggaatgaggcagacaagggccaaatcatgaaragcctcatgtgccttgctgaggcctgtcttaaatattaaaataacttcttttatacattcatcactttgagtatcaattataaaaagactttcctaaaatatttaagtttaaaaaaaatgcttaaagaagaaaactctgccttttatttcttgattcagttaaaaagaattgtcttatttctgctgagtaattgcattattaaaaagygtgtgggctgggcacagtggctcacgcctgtaatcttagcactttgggaggcaaaggcgtgtggatcacctgaggtcaggagttcgagaccagcccggccaacrtggtgaaaccccatctctactaaaaatccaaaaaaattagccaggtgtggtggcgtgtgcctgtaatcccagctactcaggaggctgagtgaggcaggagaatcgcttgaacccaggaagtggaggttgcagtgatccaagattgagccattgcgctccagcytgggcagcaagagtgaaaactcgatctcaaaaaaaaaattaataatgtgtgtggtacttcaaccagtcttgaagagaatrcagaactggaaagaagaatagacatagaacactcacaacacatggatggaataaaatctaagcatgtctttttaagttatagatatctagcaaaattatatatattcttatcccatcatcatctattcgttcaaaaatattgttttagcctctattatatgtcagatactgtggtagatactgaggttacaagaatataaaaggccccaatccttggttgaaatgatggccacagagcagaatctaaggagatttctctggatttggtcttcatagtctataactgtaaattactgtctctgcctactcctggtgagtttttgttgttgttgttgggttttttgtttgtttgttttttgtttttttgagacagaatctcactctgtcacccaggcctggagtgcagtggtacgatcgcagctcactgcaacctctgcctcctgggttcaagtgattcttgtacctcagcctcccaagtagctgagattacaggcatgtgccactatgcctaatttttatatttttactagagacagggttttgccatgatgggcgggctagtcttgaactcctggcctcaggtgattctcctgccttggcctcccaaagtgctgggattgcaggtcttgagccactgtgcttggctttttgttttttgtttttttttctgagacggagtctcactgttgcccaggctggagtgcagtagtgcaatcccggctcactgcaacctccgcctcctgggttcaagcaattctcctgccttagcctcccaagtaactgggattacaggtgcctgccaccatgccctgctaatttttgtatttttagtagaaatggggtttcaccatgttggccagactggyctctaacttctgacctcaggtaatccacccacctcggtctcccaaagtactgggatcacaggcataagccactgtgcctgcccggcctttttttgtattttgttaggattctgttgaacttaagaggaaaaaaaacataacatttagtagttatcagtaaattttagtcagcactgggtgtgaagtgggccctatgctttatgggtaaaatcagagaaagtggatgccactctgtccttaggaaacccacagagaggagagacagtacgggggccaagtgccataatggagtcctgtgatagtgcagaacttcarttagttctgattagggcacagtttctacttctaggggccatccagccgacctcaggggtttcaggtcagcttttcatcctcaccccgcccccgcccctgggataaaagacccatattgcctacagttcaaacatctgcctgattatcctagcagagtggtaggaactgattttctgatctcctctactacccgcctcacctgcacagagagtaccagctgtctcagcctagcttcttcagtgggccttggctgtaaaatgtgtgtatccaccccaggtaattaggttagctctttgtgctcgtatgactgacccctaccttttaggccacctggtgtttgttctagaagttattcctataaacagattttcacctaaaatttgaatctttatgaatcaaataaggaaaattttaagtaaacttgggctgtggataactgatgattcattamyaaaaaggtagtcatttaaaattataaaatgacacaaaaaatttaaatggaaaacatcctgtttatgcttggtcaggtctttgagttgatgtgactcaagtaacatctgatcattttcttaacctttttaaaaagactcccctaaattcttcctcccaaagattttactgtgtttgttcacagtgggttctgtgaaaggattattayaagcccacaatccattatcctcaattctacaaatccaaaaaattctgaaaaccaaacattctttttgtaactcattcatcagcaaaaccagacctgaaccaaagtgaccctattcatattctttgattatctgtcctactgggacatatatggtttgctrcagaaatattaatgtatttaattataggatactgccctagatagttcatatatgtggtatatgcaccatactgcttttctaaattaaaaaatctgaattctaaagcatatctacttccaaacatttaaatcggacttgtggacatatgtaagtataaagcagcctttgcagagtggtttaaaaggctgctttactattgtggggagcttttaattttgataaactagtgagttcatgtaaataaaacataacaaaaacactaatccttaattttctgttaactcgagaatacccagatatgatagttttgtggctaggggttagacatagaaagtgtaactatgaatgcatgtatctgtttgacttcttgtacccccaaaataaaggctaaaataaatataatcagctaaccaaagctatagccacagtcatatatactgtgtaagaaaaaagcctctgatggaggttgcagtgagccgagatcatgccactgcactccagcctgggcgacggggccagactgtctcaaaacaaaagaaaaaagaaaaatgggaattgtgtaagcattcatgtataaaaaaatgatcaaaaatgttacactggcctggtgcggtggttcacgcctgtaatcccagcactttgggaggccgaggtaggcggattgcttgaggtcargagttcaagatcaccctggccaacatggagaatccccatctctacgaaaaatacaaaaattagcctggtgtggtggtgggcgcctgtaatctcagctacttgggaggytgaggcaggagaatcgcttgaatccgagatgtggaggttgcagtgygccaagatcgcaccattgcactccagcttgggcaacaaagcgagactccatctcaaaaataataacaatgttacactgtatcttgtacatttttagtgggataaatgccaagagcagttttattagttcttgattcctccacactttaagagaatataagttcgtctacccatgattttaagaagcaaagagtgtgatgtttcccacctacccacacccccttaaaactattcaaatgaaaccatttaattctttaattayagtggaatagaactgacctattttctgtatgatcataaagaaatatttacttttaacgcagaaatttttttcttaagatccacattttccagcttaatgaagtgattgtgtttttacttggactcttccctttcctttttccttgttctgtgcagattatcaacgcctgatgactgtggcagaaggcatcaccacacttttgttcccatttcaatggcaacatgtttatgtgcccattctacctgcttctctgctacattttcttgatgctcctgtcccttatctgatgggccttcagtcaaaagaaggaactgaccgttctaaactagaacttcctcaagaggtaaaactacaatgaatgatgaagcatttgctgtttgctgatttaggtcaaggcgactttcgttagattgcattgtctttgtcaaaattttatctgtctctttgactctcctaaatctccaagtatggctaggggagagcctgagctatagaatgcagactcttgatgatgactactacatagtcattaaacctggtttaaaacaagacagtggctgattttyacaactataaatttctgaagatggagcagtggtagcatgatctcattgctttattctagtaacatattttttttctttattcacgttataaattttgtttttaaacaatacagcccaggttttagcatccttaaatcattgtatcaattgaattttatttttgacctctatcaaatgaaaagtaacatgttgcagcaaactagggataatggaaatatcaaacacttcagtattctctgttttcagatacaaggccagttatttgttctaaatgtcarcttggcttggtggttgagataaaaattctaacacctagtttttatgccaccttaaagttatactttctgtgtgttgtactttcaaatgtttaaaaaaataggccaggmgtggtgggattacaagygcttgtaatcccagcactttgggaggccaaggtgggcggatcacaaggtcaagagatccagaccatcctggctaacatgatgaaacccatctctactaaaaataccaaaaattagccaggcatggtggcacacacctgtagtcccaggtacttggaaggctgaggcaggagaatcgcttgaaccctagaggtataggtttcagtaagccaagatcgtgccactgcactccagggtgacagagcgagattccgtctcaaaaataaataaataaacaagaattattgaaagcatatttctgatctataaagtaagaatartaacacctcctaggtgttgtttttacttttttttttcttttcttttgagatggagtttcgctcttgttgcccaggctggagtgcaatggcgggatcttggctcaccgcctcctgggtttaagtgattctcctgcctcrtcctcccgagtagctgggattacaggcatgcaccaccacgcccagctaattttgtatttttagtagagacgggttttcttcatgttggtcaggctggtstcaaactcccatcttcaggtgatctgcccgccccggcctcccaaaatgctgggattacaggcatgagccaccgtgcctggcctaattgttacttattgttaatggtactgaggattamcatgtaaggtctttgaaatgaaatatggataagagtgtgccacagccttttacaaaacataagatgattaattacattatatcactagctatttaattcacatctttcttaatagaatctcatgctgagattcacctttatttgttcttatttcccatagagattctcattttaataagtgaatttaacacactaagccacagccattatttcctgtaatgattctcataatcatccactgcttacttttattctaatgaatatttccccacaaaaattaaggtttttgctcaaaggaaaatagcatgattcagatcacataagagacatatacagactattgttctttttgggcttgtgcatgtttttcttctctgttttacctcttttctctattccttgaatgttcttgtttttgctttcattaaattagtcaagtatgttatttgctccaagaagttaatcctttaaattttcaaggaaaaagaaatagactagccaaatgcattttgttttgaagacttaatgatattttagtttcttgttgagtgactgatctattttgtatgttaatccatgtaataktttataagataatttatatgtatgttgtctttccatttttcataacaattgttgagagatttttaaatggcagcttgatatatctgtagttgggaaacctttccatctctatgcctgtttgtatccactaaagataaacaaatttaaggattctgaaagctcctacagtaatgtctgtgattttctaatttttcattaatgagatcaacactgcttaataaatacgtatactcatctgttcatagagtagaataatatgaaataacctgaattagctgtgaaaatagcagtgcttcrgctgggcgtggtggctcacgcctgtaatcccagcactttgggaggctgaggcgggcggatcacgaggtgaggagatcgagaccatcctggataacacggtgaaaccctgtctctactaaaaatacaaaaaaaatagccgggcgtggtggcaggcgcctgtagtcccagctactcgggaggctgaggcaggagaatggcatgaacccgggaggcggagtttgcagtgagccaagatcgcatcactgcactccagcctgggcgacagagcgagactccatctcaaaaaaaaaaaaagaaaagaaaatagcagtgcttctgtgtagaaactataaattaggacatcattgttttataagaaaaggctaacagcctctttgttctggtatcattttacaatgaggtgaaataatctgcttcacataattttggagaggaagtagatataaaaatagtcatttaaaaaaatgacttaaatgcactcactagtaatactttcctccacctttccctgaaaagtctaaaataaaataatggctaaaaatagtgacaagacttctaaacatagttacaaaaataacaaatttgcaaaatgattattttaagaaggtatgattttagttgctagctaactaatataactacatagatttataaattaatcaccaattagctatcctcatgatttaagagtgatacccacaagtagccatttgtaatactgttttttagggagtaggatagagagaatgagagtggaaggaaggcactgaagattaattgcatggaatgtacctcactttctactgttcttactcatcttcacagtaactggtagacaaaaagttaagagaaaaactgaaacagagctgcttttgcaactttgttcttgtcatatcttgccctgagattctgaggraataatttattttattttttagacagggtctcactctgtcacccaggcaggaatgtggtggcacagctcactgcagccttgacctcctgagctcaggagatcctcccacctcagcctcatgagtagctgggacgagaggcacacaccaccacacccagctaattttttaaaattattatttgtagagatggagtctcactacattgcccaggctggtcttgaactcttgggctcaagcgatcctctggctttggctttccaaagattaccagcatcatccacagcatctggcccagagggaatattttaaatgctctcctctctctggcttaccctcaagctggcttaacttcagacactgagaagtgagatcacttactaaacatgaagagagctgcattagtctctcatttgtggatacttcctgctccggcctacagttttagggttcccccaaatgaccatctcctcagagcttattctttcatttgccaaacagttgtctcatacactatttgtgtagaatacagtgggagacaccaagtcaaaaagaggtgatttctgcttttcaaaaaagtcatttacaaataccaataacacaagttaaaaagtaagtcagtaagaggaatgaatgaacagagaagatccagaggagatcagaatgcctttagggtaagggtataggaaggtttcatgacagaagagatgattaagctttaagcctttgttttcttacttttgagggaattttttttttttttttttttgagacggagtctcactctgttgcccaggctggagtgcagtggcgccgtctcagctgactgcaacctccacctgccaggttcaagtgattcttttgcctcaacttcccaaatagctgggattacaggtgcaygccaccacacttcgctaatttttgtatttgcactagagatggggtttcaccatgttggccaggctggtcttgaacttctgacctcaagtgatccacccacctcaggctcccaaagtgctgggattacaggcatgagccactgtgcccggccacttttgttgttgttgttgttttgtttttgagacggagtctcactctgtcgcctgggctggagtgcagtggcatgatcttggcacactgcaacctctgcctcctgggttcaagtgattctcctgcctcaacctctcaactagctgggattacaggcgcctgccactacgcccagcttattttttgtgtttagtagagrcgggctttcaccatgttggtcaggctgatctcaaactcctgaccttgtgatttgcccaccttggcctcccaaagtgctgggattacaggcatgagccaccatgcccagcccacttttgttgtttttaataggaagtagttacatatcatgaaggcttgtgagcagtgttgatcagtagaaatatttagtcctaaagcaatgtcagattgaggtgttgagtaaatttttatcatgtaatacttattgagctcttctgaattttttttaatttaatggtgttaaaagtgagaagcaacttatcagaatgccctattatagagttctcgtttgttttggagaaagggctttttggttttcttcaatacattttcataacacagtttgtatttcctgttctactttgagataatcaaagccccagcttgggcccttcttaagcagacataggagacttttgtgggatcatgaagacagaccagtagctatggtgttggaactcctactttgtagtacactcagctcagcagtgatttcatgaccataataagctttaaaatttcagaaaatgtatcattttcccttttcataggaggaggagagggatagaaaaaggtagtaggaaggcattagtgaaggtgatagtacaaaatctaagtggtgggaggttgctggttaacatttagattagcaaattagtaaattttttcttccattttaaagatactgaattggccgggcgcggtggctcacgcctgtaatcccagcactttgggacgccaaggtgggcggatcacaaggtcaggagatcgagaccatcctggctaacacggtgaaaccctgtctctgctaaaaatacaaaaaaaattagccgggcgtggtggcaggcacctgtagtcccagctacttgggaggctgaggcaggagaatggcgtgaacccaggaggcagaggttgcagtgagccaagatcgcaccactgcactccagcctgggcaacagagcaagactccatctcaaaaaaaaaaaaaaaaaaaaaaaagatactgaatcatccattcaaattatgtgaccttcatttaagcctttcagtgtaaagaatggtgtaggccggccaggcrcagtggctcacacctataatcccagcactgtgagaggctgaggcaggtggattacgaggtcaggagttcaagaccagcctggccaagatggtgaaaccccatctctactaagaatataaaaaaattacccaggcatggtggtggacacctgtaatcccagctacgcgggaggctgaggcagacaattgctcgaacccaggaggcagagkttgcagtgagctgagatcgcaccactacactccagcctgggtgacagagcaagactacatctcaaaaaaagaaaagaaaagaatggtgtaggcagtgctactgtcttcagcaagatgcgacatttcagctctttatttatttagagaaaactgctgacattggaggtgaggaaaaatagcagggaaaggccataagccaccaggctgtttgagggtgcacatttggaacaggtgccaggaagtcacctaatttcttgggcctcggtttcttcatctgcaaaattaaaagactggattcaaagattacatcaggctttaggaatcattgttgatcatctggctttgaaaggagggaaaccgaaatttttttttttttttttttggccaaagtctcgctgtgttttgcccaggctggagtgcagtggcacgatcttagctcactgcaacctctgcctcctgaggtcaagtgattatcctgccttagcctcccgagtagctgggattacaggtgcatgccaccatgcccagctaatttttatatttttagtagagacagagtttcaccatgttggccagactggtcttgaactcctgacctcaagtcatcctcccgcctcagcctcccaaagtgctggaattacaggcatgaggcaccatgctaggcctcattttgagtttttattgagcttaatttagagtttcactatgctgcttgctaattggtatctaacatgaagagcaaggatcaaaagagaaaaacaaagacccgactggttgctttcccctttccccttactttgccgtctaggatcagagagcagtgtgaattttccccttggtgcctgggggtgggggagccagggagaaacacatagtgaagcttcctrttttgtttattaacttccaccccatgtcttatgttcaaccattgatgtaatcaatattatttttatgtgatgggctacacttttggcactccaccccccaatctagaarcacaaccttctttttaactaacaaccttgtcstgattaagagagtatggacagtagaggttaaatactgtttgaagtctactacagatacctgagggataatcagaactttatacatatgcttggcctcttgaattttctatatctacttgaaaaatatttaaaatatttattcaaaataaattccaaatgtagagtgtaaacaaactcaaacatttcttctgatttctgtcacctcttctactcaactcaaaaatatcttgtgtgaactcttaattattcaaaggttaatcaagtgcrtagttacatatgcacttgcctctaccacctctctctgcctcctgcattaggtataatgacttctgaaatggttttgctctaggaggtttagtgaattttgagtaaagttaaaatttgtggattatctgtgaattggattgattttgccagtttcatcctattgggagatactacagctgctggtttttggtgattattgtcaattctgcattacagatgttagagcagtggagtggcaaagaaagttcaagtgcatacagtgagcattttacctaatatcatgtatttgtaaggtcttatgagtctgggcacgcttacccacataggaatgcctaaatggatgccaattgttagaaaatcatattcagattataatatattgctgagacccagagaaaattattcatatatattaagtatggtataaaaaactcacatagggaaaaatgatggaaaaagaggttatttttaaagaataagaaattctaaaccttgcaaagattaacataaaaggcaccataatctatgcttttgtttgtaatagttggcaagaatttttttttctttttgtagaaacagaatcttgccgtgtttcccagtcttgtctcgaacccctgggctcaagcgatccttttgctttggcctcccaaagtgctgggattatgtgtgagccactgtggctggctggcaagaatatgttagcacatacaattcctttattttaaacctttgtatttcatttttctctttcaggctaatttgtgttttgtggacattgacaaccattttattgagttgcctgaagaatttccacagttccccaataaagtggattttatccaagaactctctgaggttcttgttcaatttgggatccctcctgagggcagcctrcattgcagtgagagtaccagcaaactgaagaatatggttctgaaagacttggtcaatgacaaaaagaacggcaatgtctgtactaataacatcagcatgtatgagttactgaagggcaatgaaaccatagcccgcttgcaggctctggccaagcgtactggtgtggctgtggaaaraatggacctctctgcttctctgggtgaaaaagacaaggatttaaaactgmattgtgaagaggcagaactaagggactaccagctcaatgtacagctccgagaggtctttgctaaccgttttacacagatgtttgcagattacgaagcatttgtcattcagactgcscaggacatggaatcctggctgaccaaccgggaacagatgcagaactttgacaaagtaaaaagaaccatagttttccttttgtggttattagtggctttattattgattttaacatttttaaattttttattcttctgtgcctatgcttacccatatattattgattttgttaaccttttttaaatgcagactttttgtcttccagccccattaagaacttttctttaccaagtatttttacattagataaaataattttacaagcaaataaaccagctcattgaactggtcattaaattgtgcgttaaattgcctgtaatctcattttcaatttttctttaccttaaagatgcttaaattatagaaactcaggccgggcacggtggctcatgcctgtaatcccagaactttgggaggccgaggcggacggatcacaaggtcaggagtttgagaccagcctggccaatatggtgaaaccccgtctctacgaaaaatacaaaaaattagctgggcgtggtggcgcacacctgtagtcccagctactcaggaggctgaggcaggagaatcgcttgaacccgggaggcagaggttgcagtgagccaagatagcgccactgtactccggcctgggcaacagagagagactccatctcaaaaaaaataaataaataaataaaaaattatagaaactcttacattttgcaggttttccaaatctgttaatactgtttaaccttataacagttttatttactcttactttatgatcaagtatggttaaataagcctactcctttttgaagaaatctctttatttagtctagaaatcatttatttagtctttatcctatcaggaagtcacaacttgtccatgtaaagttaacagtttggtttcagaagccaaatttctctatctcattttaagataaaaggagaaaaagagtgactaaattaagttttatggctgtaagtgtaaaacaattccaaagattttggaaagagaagtcagaaaatataccagctttccttgtcctgtgatttctaaggggtactggattcttctgccagttttttttcacctatctcccagattttatttttcagacagatgcacttagggttgtatagtaactcttttaggtcaccagggtacagtttagttctttactgctgtgattgctgaggtataatactgctattagaatgtatcatgggtttcactaagtggcctctttgggtcatgaaaggccttctaaaggggctgatacattccaagaggctaatctacagtactggagaatttttggaaataatgaaaaattttcgtaaaggtacatagtggctgggcatggtggctcacacttgtaatcccaacactaggaggttgaggctggaggatcatttgaggccaggagtgtgagaccagcctaggcaacatagtgagaactcatctctacaaaaaattttaaaattagccgggcatggtggtgtgctcctctggtcccaatgactctggaggctgaggtgagatcacttgagcttcagaagttgaggctgcagtgagccaagatgatgccactgcactccagcttgggctagcgagtgagaccctgtctcaaaaaaacaaataaaagataatttttttacttcatcagatattttttctgttggaggatgatattgtatgttgaacagttacgttctggtgttctttgtttttccccacatcagacaggtaatgttctaacatggtaacaaagtttgaggaaggtacatctcacacatgagcatgaaaagccaattattacatttatgaactacaaaagcatcctgatgcacttacgtttgagaaaacttctttaatattaacaagacttcacttctttaagtgtatgcccttaggttcctttttcgttagtcttaaccattttccatactttttcctatctagcttagaactaatctgtgggctgggcacagtggctcacgcctgtaatcccaacactttgggaggctgaggcgggcgaatcacaaggtcaggagatcgagaccatcctggctaacatggtgaaacctcgtctctactaaaaatacaaaaaaattagccgggcgtggtggcaggcacctatagtcccagctacttgggaggctgaggcagaagaatggcatgaacccgggaggtggagcttggcagtgagctgagatcacgccactggacgccagcctgggcgacagcgagactctgtctcaaaaaaaaaaaaaaaaaaaaaaaaactaatctgtgtatatccatggtttatccttgggacaattcaaattcttacctaaatcaagccctgatacttccttccttcttaatctttatgtagcctcaaactatataaatggaattctttttacataacccctaaagaaatgaaaattttctgttggattccagaaggcttataagtacctttcactaggaaaatctgcaggacatactagtcgtacaagccaaatcgttgttgacctaaaattttatagtctatgagggtctgaatatcaaaagccagatctttggcccactttttttaaaaaaaggctatttgatgtatgaaaagtaagatgtttattggtgaaggtgaactgatttctagactactgtgaatctttctgtggttatttggatttatgtatatacacctgaactatggaactacttaaagtgaataagtggatttctataaggaaattttaagaagacctcctaaatttcagaatgaaagtaaatatgctagcaagaagctgatgagtatttttaaaagtcaccttatgtcagaacttatttctctttcctctttcccctttccccttctggcttctgccatgcaaaaataaaaaccaacccagcaaccaaaataggaatttacttccaaatttacttccagattttagtactgcattgaatgtagaatccctgtacacacatgagcatggaagaacaacagaaaaaaaaatgacacttttaattaggaactgattacgatgtactgaaccatcccatgcatcagacaggctagtaacaggaaaggtgtacagcttattgtactcgttctccaaaggcttgcttctgatggtttttcaggcaatgatttgttttttttttgtttgtttttttggaaatgcggtttcactatgtttctttaggctggcctcaaactcctgggctcacaggatcctccggcttcagcctccctagtggctgggactgtaggtggccaccaccatgcccagcttccaggcagtgccttttttagttgttaaggctgagactgttgtgtcagcacaggtgtggaaggaatttttccttggcttaacactcatctattgatttctcacagagttaaagagtctagaaaagcattcacttaaagaagaacaaaagaacttcacccataagcataaattccatgtcttttttaagattaatgctgatgtgtttattgtatcagttaatcatctcactaccttgtggcttgaaagtatatttcataggctaggaatagagaacagaaggaattacaacttgtagccgggcgcggtggctcacgcctgtaatcccagcactttgggaggccgaggcgggcggagcatgaggtcaggagatcgagaccatcttggctaacatggtgaaaccccgtctctactaaaaattcaaaaaaattagccgggcgtggtggcaggcgcctgtagtcccagctactcaggaggctgaggcaggagaatggcatgaacccgggaggcgggagcttgcagtgagccgagatcgtgccactgcactccagcctgggcgacagagcgagactccatctcaaagaaaaaaaaaaaacgaaattacaactcattggggaaagggataaaaatttttaactgcaagtgaagtggatgattgacaattgtatagcaacttatctgccatctttcgttactgatgccctctttgctacataatggtcataaggatcagaatgtaaattttgtaaggtaagatcagtgctaaagacctaagtgacgtacattctctaaatttaggaaaatggaaagaaaagtggatttttaaggatttttgaatttcaagtgtcagttttataagatttaaaaaaggaatgtcctgagttaacataattttcaggcttatcatgtagtgttgagatggtctctttgcactaataatttcctaattatctcattacaggcttcctttctgtctgaccagcctgagccttacctgccatttctttcacgcttcattgaaacacagatgtttgccacctttattgataataaaattatgtctcagtgggaagagaaagatcctttgcttcgggtctttgacactcggattgataagataaggctgtataatgtaagggcacccaccttgcggacatctatatatcagaaatgcagcactttaaaagaagcaggtacatttgccatgccttttaaattaaattaaaatccattatcgcttttttcccacaaattgctggccttacgtacaacaaaattaattttcagttttagacttcatggctaatcctggtactatatcacgaaatgctttgtaaatttttctttctgagtcctactcctacttgacgttcctcttctcttagaagaggaaaaacaataataaattgaatcaagtatgtctggaaggttgctatgatttttgtttttgtttttgtttttgagatggttctcactctgtcacccaggctagagtgcagtggcgcaatcttgactcactgcaacctccgcctcctgggttcaaatgtttctcctgcctctgcctcccaattagctgggattacaggcacgcaccatcacgcctgactaatttttgtatttttatagagttgggatttcaccatgttggccaggctggtcttgaactgctgacctcaggtgatctgccctcctcagcctcccaaagtgctgggattacaggtgtgagccaccacgtccagcctgacttttgttttattctctttattgcctaaatggaaaaaatgttaatttctgtcttgctacttatgtttctttttctttttctttttcttttttttttttttgaggcggagtctcactctgtcgcccaggctggagtgcagtggcgccatcttggctcactgcaagcgccacctcccgggttcacgccattctcctgccccgagtagctgggactataggcgcccaccaccacacccggctaattttttgaattttcagtagagacggggtttcactgtgttagccaggatggtgtcgatctcccgacctcgtgatcgcccacctcggcctcccaaagtgctgggattacaggcgtgagccactgtgcccggccttatgtttcatttttacttctcacctcttctctatatccaagaaaggatatttatttaaaacagtaaatcttagattctgcttaatttacatactaaaacagtatctttgctttagtagtgccattaattataatagcttcacttattgaaattaaatctgactcaggctgggcgtgatggttcacacttttaatcccagcactttggaaggccaaggccagcggatcacttgaggtcaggagttcaagaccagcctggccgacatggcgaaaccccatctctactaaaaatacaaaaattagccaggtgtggtgtcatgcgcctgtaatcccagctactagggaggctgacatagaagaatcacttgaacccgggaggcggaggttgcagtgagccaatgtggcaccactgcactcccgcctgggcaacagagcaagactccgtctcaaaaaataaaaagaaagcagttaattctgagtcttagcccagcctgtctaggagtggtatatagtccataaataaataatcatattattagccacatgagtatttactatggcaggcatcatgccaggtggtcccgaattttttttttttttttgaacagggtctcatttgtggcctagcctggaagcaggggggccctagtggtcattgggccctaatttttgggcttagggggatgtcttacccaacctccgtgggaacggtcctttatggcttggccccccctccgggaatttttnnnnnnnnnnnnnnnnnnnntgagccaagatggcaccactgcactcccgcctgggcaacagagcaagactccgtctcaaaaaaataaaaagaaagcagttaaatctgagtcttagccagtcttgtctaggagtgtaatatagtccattaaataaataatcatattaatagccaacatgagtatttactatgtcagtcatcatg

SEQ ID NO: 6943 - DNA, 145806 bp, Homo sapiens
atgcgatcctcttgcctcaatatcctgagttgctgggattacaggtgtcagccaccacacctagctctaaattgttgtatgccacagtaataacaaaatttgcttgctcaaaagtagatagctacagtctaaaatttgcttcttcttcaagaaaagtcatggaaaagattctgataagtactcttcaatacaggtttctcataactttagagatcataccattagactaggcttaaaaaaaaaaaaaaacagctggacatagtggctcacgctaagttttgtattttttgtagagatggggtttcatcatattggtcaggctagtctcgaactcctgacctcaggcgatccgcccgcctcagcctcccaaagtgctgggattacaggcgtgagccacagcatctggcccaaccatcaatttttaaaatgtcacaaaaggacaagccaggtgcagttatgcctgcctgttaattccaactatttgggaggctgagccagaatgcttgcttgagcccaggagttcagaccaacctgggtaacataacaaaactcagtctctaaagtgaaaacaatttttttaaaaatttaaattatgaaaggaaaagtgtaaatataaaatccatcattttcttttcctgtctatcttttttttatctttatcaagctagatatgcagtttcatacatcattgtaattatggtatgcaattgtgtatctctactttttattattattttgtaaaacatctccatatttctgcattctgtcattttaattgtattcataatgtttcatcgatatacctagtttttcctacggtttcatattattgattatttaggtgatttctagtttttaactcttaaactttttgctatcagcattttttttttttttttgagacggagtctctctctgtcgccaggctggagtgcagtggcgcgatctcggctcaccgcaacctccacctcctgggttcaatcgattttcctgcctcagcctcccgagtagctgggtctacaggcatgcaccagcacgcccagctatttttctgtattttcagtagagatgggggtttcaccacgttggccaggatggtcttgatctcttgaccttgtgatccacctgccttggcctcccaaagtgctgggatttcaggcatgagccaccgcatccggccgcatcagtgtgcatttttaaccattcatctgtctcttggtttgtggcagtcccactatggcttaccaaacagcagctgcctcgtgatcttactatcattcatttcccacacatatctcaccctgctgagttaatctgcagtaggcatcctttcagtacttgttatctaactataatctgcaaccttagtctagtcaccctctcttaccagctggggttttaccaggcacgcatggaatttaaactatttacagaagttgaagatttcagtagcaaaccaattcgcatagtcttataaaaattgtacattccactgctttacaaaacagaatgtactaaatgccattgaattgtacactttaaaatggttaattttatattatgcaaatttcacctcgtgtaaaaaaacaatatacgagatgtctggacataaggattgtaatacgatggtaaaaatgagggtagctgcaggagtctaatctcaatcttttatcttttcaacctttgtcgtttgcctaaagaatttatcttgcaattttctttctgctgtcaaacatttcctaacttattcatgatctcagctcactgcagcctccacctcccaggttcaagtggttcttgtgcctctcagcctcctgagtagctgggattacaggaacgtgccaccttgtccagctagtatcaaaatatgtgtacataaaaataaaaattgtccagacatcttctatattgcttttttacacttgaggtgaaatttgcctaatataaaattaacgattttaaagtgtacaattcaatggcatttagtacattcacagagttgaacaactatcacctctatctagtttcaaaatacgtgcctgttcacctcattttcattcaattcattttatactcccaaaaacctttatatccattagatagtcactctctatttgtcttttccctcagtcattgataatcaccaatctgctttctgtctctatggatttatctattctggatatttcataggaatggaattatatgttatctatttttttttaagagatggggtcttgccatgttgcccagattggaatgcagcagctattcacaggcataatcatagttcactatgatcttgaacttctcggatcaagagatcctcccacctcagcctcccgagtagctgggactatccaggtacacaccaccacagtgcttttcacattcatccaccttgtagcatgaatcagtatttcttttctttttcacgtctgagtaatatttggttgcatggatataccatattttgtttatcagttcccctgatgatggacatttgggttgtttccaccttttggttattattggtaatgctgctgtgaacattcatgtaaaacattttttttttttttgagacgcagtcttgctctgtcgcccaggctggcgtgcagtggtgtgatctcagctcactgcaagctccacctcccaggttcaagcgattctccctgcctcagcctcccaagtagctgggattaaaggcacgggcaccactgagccaggctattttttttttttcctcgagacggagtcttgctctgtcacccaggctggagtgcagtagtgcgatctcggctcactgcaagctctgcctccccagttcacgccattctcctgcctcagcctcctgagtagctgggactacaggtgcccgccacgacacccggctaattttttgtatttttagtagagatggggtttcaccgtgttagccaggatggtctcgatctcctgacctcgtgatccaccctcctcggcctcccaaagtgctgggattacaggcgtgagacactacgcccggcctttgtatttttttagtagagatcgggtttcaccatgttggccacgatggtgttgaactcctgatctcaggtgatccacctgcctcggccttccaaagtgctgggattacaggcatgagccactgtgcccaacccacgtaaaacatttttgtttgaacacctgttttcaattcttttgggtatacacctaggagtaaaattgctggcttataagtaattccatgtttaacttattgaggaactaccaaactgtttttcatggaagctgcaccattttacatttctaccagaaatgtatgaaggttctagtttttccacattcttttcaacatttgttttctatttttttgattatagacatcctggtgagtgtgaagtgctatctcattgtagttttgatttgcatttccttaatgactaatgatgttgagcatcacttcatatgcttattaatattccattaacatatgtttcttaggagaaatgtatattcaagtcccttgcccatttttttagttgggttgtttttcagttgttgatttatacaagttctttatttattctggatactgcactcttaccagatatacaatttgcaaatattttctctctttttatattttttccactcgtgtcctgaaagtcattttttccttctgaaataccttgataataaatgcattgctgactatgcctttgccacttagtcctttcctagggccttcaataacgcttattttcgaagacacttgatgtttttattttgttgagacagagtctccctctgtcgcccaggctggagtgcagtggtgcgatcctggctcactgcaaacttcgcctcctgggttcaagcgattctcctgcctcagcctcctgagtagctgggattacaggcgcccaccaccacgcccggctaattttattttattttatgcttttatttttagtagagatgggatttcactatattggccaggctggtcttgaactcctgacctcaagtgatctgcctgcctctggctcccaaagtgctgggattacagatgtgagccaccacgcctggcctcttgatgtttttttaaattgagtgttaggtacatgcatgcccattttattgacattttattatataaaggttatattccctcttatatctgtatgtataggtatttttatatgaaataaattttaaatgcttgacaataatgtctcctctacgacttctattttctgttcttgcattcactaacatacttttagaatgaatgagtggtctatattctatatacttttatagaatgagtggtctatattttctgcttcgttttatccacaactgatgcctcttcaatttcttgcaatacaacttttttgtcctgaaataatgaaacatttgggtctgtgcccgacccttatcattattctttcttcctaggtaatgttactcatgattcatccacctacttgcattatacagatgacgcctaatctgtgtctctgaacctaaaccctaacccaagttttattatttatttatttgaaacagtttccctcttgttgcccaggctggagtgcagtggtacgatctgggctcattgcaacttcagcctctcgggttcaagcgattctcctgcctcagcctcccaagtagctgggattacaggtgcccaccaccatgcccagctaatttttcgtatttttagtagggactgggtttcaccatgttggccaggctggtctcgaactcctgacctcaggtgatccacctgcctcggcctcccaacgtgttgggattataggcgtgagccactgcgcccagccaactcaagttttagaactctatatgctggatattttcagtcgtttactttaccagatgtatttcccctattaatcgtttttttcctatccacttttctatttcttcaaaccatatcagtttcagtctcatatctttgtagtaatcattggttactctctcttctgtcacttctgatcagttatcaagtctttcgtcttttactttaaatatacttcatttccactcaatggtcaatcatcccattttaatccactatcgcagagtgctggaattatttcaatagctcctctctgcctgaccacttcctctccctccttaggtgataatctttttttcttgtttgagacggagtctcgctctgtcgcccaggctggagtgcagtggcgcgatctcggttcactgcaagctccgcctcccgggttcacgccattctcctgcctcagcctcccgagtagctgggactacaagcgcccgccaccatgcccagctaatttttttgtatttttagtagagacagggtttcaccgtgttagccaggatggtctccatctcctgaccttgtgatccacccgcctcggcctcccaaagtgctgggattacaggcgtgagccaccgcgcccggccggtgataatcttttaaacagaggactgtgatgaaacatggtgctaggtgagcaagataacttaggatatctttcttttgtgttagatgaagtgaagaagggagggtgttgaccctcctggatgaagtgatgaagccctgaactgtggcaatgatgccggagaaggatgtaaaaatcgtaaagtcgactggtgaccaattagagctggaaggacttacccacgctaacacctcccaaatatgggagtattttactaccataaatgaaatacatcaagtgaatttttgctaagcgagcaatacccgcgcttcggtaagaactgtcacgcttagagcgggccaaccagcttccaccatccagatggcggatcctagattggcagcctgcgtctctctagctaccgtctctatggttcggggaatctccaggtcggggcttgaccggtccgacttttgcgcgtgcgcgagtcctggcgcgtgcccgccctcaagcaactgtccgacccagcgggtgggaggggtgggtctgggaacgttgcggcggctgtcgccgcggccccagcacccagagctgttctctggccaagcctgcgcctgtagtccttctttgcctcctggggcggccgccacccacccccagatggtgggtccggaggatgccggagcctgctcgggaagaaaccccaagttgctcccggtgcctgcgccggaccccgtgggccaggacaggaaggtaatccgggccacgggcggctttggcggaggcgtcggcgctgtggagccgccggaggaggctgacgaggaggaggaggctgacgaggaggaggagacgccgcctcggcagctccttcagcgttacctcgcggcggccggggagcagctggagccggggctctgctactgtccgctccccgctggccaggccggcgccccgccgccctcggcagccccacgatcggacgcctgcctgctgggctcgggctccaaacaccgcggcgcggaggtggctgatggccgcgcgccgcggcacgaaggcatgaccaacggcgactcgggttttctgccgggccgggactgtcgcgatctggaagaggctcgcgggctggcgcgcgccggcggccgggagtcgcgccgccgccgcccctacggccgccttcgcctggaggggcctggcgacgaggacgcggacsgcgcgggaagcccgtccgattgggcctctccgcttgaggacccgctgcggagctgctgcctggtggccgcggacgcccaggagcccgagggcgcgggcagcgactcgggggacagcccsgccagcagctgcagcagtagcgaggactcagagcagcggggagtcggcgccgggggtcccgaggagggcgcgccccctgccacctcggccgagaggactaatgggggtgcggagccgcgcctgggcttttctgacattcacttcaactctcgcaacacgttccaggtgagccgcggtcagagcgcccgcgatcacctgcccccggcggggccgccggtgcccttgcccgccgcggagcagggtcctgcgggggcttcggcccgggctcgacggagtggcggcttcgcggacttcttcaccaggtacagcgcaggctgcatgggactcggggcgggtccggggccggggccggagccggggtcttggtgggagtcggagccggagccggagccggagcggagagcttggtcggccgcttccgtgccagccccacacgcgtcaggacttagctttgatttgtcactggaggaagaggaactgggtcggctttgtgtttctataggagaagttgtgagctctgtggacagcgagtctttctgttgccttgtccgcgggaggctgtacctgccattcatacctggcttctgagcagtcaggttgggccagctgtctagtgccacatatgcagttgccttttctggaaaagcagataaccatctccgtctccaatttttaaaaattttactacaaacatttaggttgttgggggggtggtgaggggaggcggtatgtgtgtacgggtgtggttgtgaaagagaraaggaagtcattttgtagagctgtttatttgctgtgcttgcatagcgtctaaatccattcaagtggtttgggaattcttgaaattagaagtggttgtgcttcatagtgtttaatcgtttgtttcagtggtctttattaaaatgcagtttggtgtttagaattttatcccaactttttaagccaaagtagsgcttttactaaggaaagccttttttctaatctcccagataagcctctcctttttttccccaataactttagtttttttaaaaaatggtattgtatttgtgatttgacaggatattcttgaaattaaattatgggccgggcgcggtggctcacgcctgtaattccagcactttgggaggctgaggcgggcggactatttgaggtcaggggttcgagaccagcctggccaatgtggtgaaacccggtttctactaaaaatacaaaaattagccaggcgtggtggcaggtgcttgtaatcccagctactcgggatgctgaggcaggagaatcacttgaacctgggaggtagaggttgcagtgaacctagatcgtgccattgcactccagcctgggggacaagagcgaaactccgtctttcaaaaaaaaaaaaaaagaaaagaaagaaattaaattatggtgctggacttcgcagatttcaggatggaggtttgttgatttaatagggataaataagagtagtcagaaaatacttaatacaccttactgtaagagcagtcctgtaatcccagcactttgggaggccgaggtgggtggatcacctgaggtcagagttcgagaccagcctggccaacatggtgaaaccccgtctctactaaaatatacaaaaattagccgggcatgttggcaggcgacttaatcccagctacttgggaggcagaggcaagagaatcgtttgaacccagaaggcggaggttgctgtgagctgagatcgagccattgcactgaaacctggggaataagagctagacttctctcaaaaaaaaaaaaaaaaaggcagttttccttgagttagattttgacacgcctttttcttcttcttcttcttyttttttcttaagtccccaggcaaataggaaaatattcccaacttgtaaaactttcctttacagagttctccctactttgtttttctaccttttcggggatcttgactataaccagaagtgaaagaagcaaattcttagctcaagttttagcaggttatacaattagcgtacatattgtagacataaaggcacaattttctgattataattgatatttcttattcctctttctagtttatccttatttttttgcttgtataaatttacaaatataaagtttcttaaatcaaaagtggaaaatcctaattttttgttactcaggacaatatatgtagtaatgacatctgtatttgtaatatagttgcaaaaatatatttaaagcttgtactggcagtattctaaaagatctcaaggtgagttaggtttataaatttgtgacactgtgtggcctttgggtgtttgttggtcatatctatcttggtcatgttttgaggtcagatgtcaggcaattttagatctgggaggggctttggagataacaaattcaactagtatactcttgagttcttgctctctgccatgcattgtgaatagagatgatttagaaaactgtcccttacctgcaggtggggtgcaggctaatggggattaagtttgaagacagatgcatatatatacattgcaatttctgaacatttttttttttttttgagatggagtttccctcttttgcccaggctggagtgaagtggtgccatcttggctcactgcaacctctgcccccctgggttcaagtgattctcctgcctcagcctcccaagtagctgggattacaggcacccgccaccacgcctggctaatttttgtatttttggtagagaccaggtttcaccatgttggccaggctggtcttgaactcctgacctcaggtgatccacccgcctcagcctctcaaagtgctgggattacaggtgtgaaccactgccccagccaacaatgttatttataggaggctttcatattattaacagtaggcaggaattttattttttctttcatttcccatgtgttttaagtaggcaggaattttgatttaatttgtaaattttttttacttatagactaatagaacttaatatagctagatgacattcatatggccacattattcatatgtgtcagagcactggatttgaagtcagaaaacaggtgccctaaagttaatttctctaagcctcatttttcctgatagaggtctgaatgtcaagactctaggagtcagtgcttcctttatatgacattcttgggaaagaaagggcagagtcagagaggcacagtttttcttaaatgaattctgaacaccttaaaggcaggaactgtgacattcatctctgaatctataatacctagccactggtatgaagaacaccattcagattgggttgaataggtagctttcatggattcccttttactgtgctctagctaggtagtgtaattttgagcagaatctccatcctcagtgaaaataatcagaaattacccctgtctcacaacacaacccaagagatccaaccctacccctaaatgcatagttgctattctcaactctgaagctccaggtgagggctctctttggaagtggcttgtttgggatggaatcttgttcttgggtgcaacccttactcccacttcatttttttagatgaggaatctcattgtctaaagaaggtaatttagttagctagtggcatgctgggatttgaaaccaggattcctgatttcccaatccatgtttatgttcagtctacaacctttgttcactttatggctcttttctctcccacctatttatcctccatgctttccttcttcttcccttcccacttcgttcttctctttcccttaattaggcaaaaatctatacgagaaaccttaaaaaaaaaacagttttatgtttacttaagtaaagaggggggagcattttacacaatgtatctattactacatagtattatgttaagacacatcattttggtagatatataggaaawacaggaattcatttagaatatgactgctttcatttggagggccttagtggtcatctcccactttccttcccttccacatgaggtgagttctatttcagtccctactgggggcttgcttcagcttcacatggacacctttctgtgtttatggtgacttggctgtcagagccctaaaagtaacattccctcagatccttgaccctttcctgtctataaaaattgaaatgcagctgggcgcagtggctcacgcctgtaatcccaacactttgggaggctgaggcgggtggatcacctgaggtcaagagttcgagaccagcctggccaatgtggcgaaaccctgtctctactacaaatacaaaaaaattagctgggcgtggtggtgggtgcctgtaatcccagctactaaggaggctgaggtaggagaattgctagaaccctggggggaggttgcagtgagctgagatcgtggcactgcactccagcctgggtgacagattccgtctcaaaaaaaaaaaaaagttgaaatgctagatgggtaccactcagcagtaaggaggagtgaaagcttttttgaagtcttttgtgtttccaagcttgccttaattccccaaagatccatttgttactctttttaaaaaatagttctaagctgggcatggtagcgtatgcctgtagtcccagctactctggaggctgaaacaggaggattgcctgagtccaagagttcaaggctgcagtgagccatgattgagtcactgcactctagcctgggtgacagagtgagaccatgtctcttaaaaaaagttctaaaccgtttttgtgggttcttcaagtaaattcatgtcttgttttctaagtagaatggtttattttttacatagatagactctttcatagttttctgtttgtttgtttttaggccatttaatagttttgaagcttgttaggattgcattggcatagttactgtttttaaaaacatagacacttatctgtgtttcctggtagtgctgattttttttcccaagtctttatatgaatttggtgaataaagggcattgctaaggtagggaaggaataattggagatttttttccctttatctgaaaagaaaattgactttatagattttgaaacatacagatccatgtggctttctctgtagttgttgacttctgaaacttcctaaatattgtggcaaaagctattttcacagagctctttttacaatggttgggttgagtaggaaaaactaaaggctcttttagtgatttctttttacatctagatagtctccattctccctaatatgaaaaccaatgaagtttttttgtttttattaaatatgacatggaaaaatctaaattcctataggtatagttttttcttaatttaaggttctcagaaacaacaaagtcagccacgtccttttttccacctagaatttgtgctagttgacaaaatcataattcatccatctgactgagccatcataaacatctctgtcctataagtctcccttacttgttccatagtgcctccaccagtcaactaaaataaaaaacgacagtttcaaagtgagtttctcaaaaaaaattcctttctcaaatcactaaagaaaaggcaaaatatgaaacttctgatgttttaaaagattttaaaagctccccaaagtgggcagctttttaatactctgatataattatttacaaggagaatgaaggaagaatctattgaattcaaacctgttttgttcaggatcaactgtgctactataattaatgtttaaaattttaggaaaactgaaaataatacgtaattaattgctctagaataaacacaaaagtctattaggattttagaatgttgtgaagctaccattatgttaaattggggagctagctcaagagccttttatatcttttccctgtgtgtcactccttcccctacctcagatcccgtattttcttttaaaaaccccccaaaaaacaacactctagggacctacactaaagcaccggaaatccagcattggttcaggacttcaacttaggaatttgtggctttcattcagctggcagattagagatgtgataacctgaatacaaattaggtagaacgtattcagaaactctgatttttgtggaagtaagataatttaagcactcaaacatattactttgaagtgctaaattaaattaacttttttttttttttttttttgagacaggatctcattctgtcatccaggcttggaatgcggtggcacggctcactgcagcctcagactcctgggctcaattgatcctttcagctcagcctcccaagtagctgagactacaggcatgcaccactacgacctgctaattttgttttgtattttttatagagacagggttttgccatgtttctcagattggtctcaaactcctgggctcaagtgatctgcccgctttggccttttaaagtgctaggattataggcatgagctacgcatctggccaaattaacattttttactacacacttgtaagcaaagcagactattattataatactaacttggagttacttgtttgatagaaatctctacattatccaaaatggccatagagattaatttttaatttttaaaatcttttatttttaaatagttttagatttgtagaaaagttgcaaaggtaataccaagagtttccacacccctcccccagttcccctttggttaacatcaccttatatttatggtacatttgtcacaactaaggaactaacatttgtacaatgttattaattaaacttcacattttattcattatagagattttgactaaaaggtttttatttggggagtggttgtgttacttttaagtgaaagtttttacttttaagtttttagatcttttaagtggaaggaacttctatgatcaccttattcatgccttaatactccatggaaagccaatgatgctgttgacagataaataatcttttatttgctagatatgatctaacaagatggtattaatttaatattggaaatgagttatgcatggtaactcattgtttaacctagaacaatgatattcaaagcttttcactgcacactatttaggggcagtatttacaagatttaaaaaccagtacctgtttgcctctgggaaaaaatatgaaagtgtatcttagttctacataatttcacagttttctaaaattattttcatatgtgttttttttcttttcttttgtttcagagatgaggtctcaccatgttgcccaggctggtgtcgaactcctgagctcaggtgatctgctcacctctgcctcccaaagtgctgggattgcaggtgtgagccatcgtgcccagccacagtttttttttggttgttgttcttgacatattactgtgacctaggaagggtagggtttatttttattttacagttatttgtccaaagtcagatagctaattaatgtaagaattacaactagactgtagatctgttcctagggcttgaagctaatacactgatttctatgaattataaatttaagagcaaaaacttagcttttggtgtagtgaaaatacaatgcctgagagataagtaacttggtttttgtcctaggtaacaacttctgccattaaataattctgttaccttggrcaaatcactaaatttctggacttcggtttccttatctatgaaattgggagattcagagtcccttcagttctaatatcatggtattataatacacaattctgttgcacacacagtagtggaccacaaatatttactggttaaatactacaaatgtgaactgagttaaagagaaagctgaaaaaaaacagaatttttttttccctctgtaaaatgagaggcatgccagagataggactattcctttcaactctaaattccacctttaatgtttcttttagcaaaggtctaactctgccttagggtaatcatgatagaaatatcagtgatctttgtttagtttttcatgtgaagatggcacagtgcatcagctcttctttcttttctgtagcaaattctagatctattttttcttatttctttgaggtggggaggagtagtgagagagagaatggggtaataagtacattttagttaatcaattaactggaatttaagcctttaacttccagaccrtgagttatttcatgaaggttgccactgtagcactttgatgaactagtgcagttgtttgtagcttttggtatattcaaaatcacctgaaagcacccagatatagtggctcatgcctgcaatcccagcacgttgggaagctgaggcaggagatttgcttgaggccaggagttccagcctgggcagcatagcaagaccccatctcattttatttaaaaaaatttaaaaatcacctaaaaacacatttaaaaaattagattctctaattcacagcctccgcctagtcagattcaggagacctattatttggctggtgaatttgcatttttagaaagttgcgtggttgggcccagtggctcatgcctgcattcggagcccaaggtggggggactgcttcagccaaggagttcaaggctgcctaggcaacatagtgagaggctgtctcttcaaaaaataaaaaaactagctgggcatggttgtgtgcacctgtagccacagttactcgggaggctgaagtgggaggatcacttgagccagcgaggtcggggctgcagtgagctatggtcacaccactgccttcctgcctggatggcagagtgagactgtctccaaaaaaaaagagaaaattgctcacagttgattcagattgtcaactaggttttagtgaattgcttaatcctaggtggcatcttcaaattacaggatggtatggtgcttaaaaatgctggttctaaagttaggctgcttgggtttgaattagcttactagctctttaattctggacttctctggatcttaggcaactcatccataaaatggggataataataatgcctaattcatgggattgccatgagggttaaataatattttacattctttgttttaactatgtggcatatagtgaagattcaaatgttattattcagacagtagcaagactactataacaccttcctcagcttcaccactgaaatccactgatttgaagaaaggaagatactggatgaatttttgtgtcctgtctggggaaacgttacacaatttgtgcagaagaagatttttaaacataatttatacatgggattggatggatgttaaaatagattctgatgtagtgatatgacatttcccgaagtcttgaagctttgactaaaaagcaaatctgagaaggaaccgaaaggaatgctgagaaagattaaaatatttgtatcttttattgtcttaaggaacttttatagacaggcaaagccaattttttagtttaagtccatgaaatgtttaacttggcttactcatgcatttcatacttagtatgttgtggtaggaaggttttgggaaagagtggaaacatttggagattttgagacgatacatctgttatccatctctaaatgtatgcagaaaggcaaagtgtgtcctttttgagacagcttttttctccctaggaactctgttagctacactatgagttatcttcagatagttatggctgatagttgcttggaccctactacagtgattcttaaatttagtgtttaaaattacttggaagggggagggttgttaagaatgcagattccttgagacccaagtagatcctgggtggggtccaccaggaatccaactttttaaaaagacccccaggtgattctgatgcaggcgattccccgactataaccactgaaatactgggctggttaataggcaggtctcctcaggtagtgactgaaagtacaacacacctttatagctcacattgctttactgatttaaaattgggtcatattcaggtactatgtaattgatgagtataaacagaggtgtataatagagaacagattcaaaatacaaatctttaagtactttgctagcctttacttggatgagaaattatttcggacaaattcattcttggcttcctttttattaatgggaaaaatcttttattttcattttatgctgtttagatagccatgcttgcctgtcttgtgaaaagctttaacttgtaagattttcctcaggtctactcagtttgttggcatacctttacctttcttatagcctatgaaaaaagtgttatttttccttccttctgctgctatttgtaattcttttccgtgcctttaagaagaaatcctgcacactgcacatggttttctcccctccaacatttgctgcttcagcctttcttatgcttyttatttctgtggccaaaataagaaagagagggaaacccatgtgactgtctgggttttcagcatgctctttcctgcaattaagagaagtttaccttaggaaatcaagctacaagtcatgcttcttacttagagctagtttgagagtgaacttgataaggtgtttaactcatctttgaatttggcttttcaggttttttttttttaatttgaattttatgttagatactttttttgttaaaaaatatttccatctgcttgtctctaaccccacatagattaaaacattttaaatttggaactgaacataataattttgaaatcaaattatgtgctgttttctcatattttcccaagtactgtaatgtacaactacccatcatacgttaggcattatttagaatttccaaatctggttttcatctagactgttcgtagccatcttttagtcaagtagggcaaatacttcttttgttgttgtctcaggaaaaattcattcaaatactataatagtttactttttttttagaaaaacataaaatgttcacattatttgcttttgaaaagcaggagaaggaatataaaataaagctaaagataatacattgtttccacgttattcttgttaaggtggtaagaagatgataaagaagatttgagggtttggaagraagtatggtaaagataatacattgtttccacgttattcttgttaaggtggtaagaagatgataaagaaaatttgagagtttggaaggaagtatagtacgagaaactattagagaatgagtttgaagatattcgtagagagagaaattgctggagagaataaatgttaggtagaagttagccatgtagttagttcttaggcctgttggtttcagagtattaccacagattatttccatatttttctaatttttctacttggcatacctcagtgcctttgtggatgtttctagccacttgtgtctttaaagtatcttgtatatctctccttaacttccctaacgtccctgtctcccagtggcttctcaataggccatactgtgaaacttttttttttttttttttgagacggagtctcgctctgtctctcggtctggagtacagtggtgcgatctcggctctctgccacctccgcttcccaggttccagcgattctcccatctcagcctctggagtagctgggattacaggcgtgcacctcacgcccagctaattttttgtatttttagtagagatggggcttcaccatgttggccagggcggtctcgaactcctgacctgaagtgatccgcccactgcggcctcccaaagtgctgggattacaggcaaactgaactattttttaataacaggttgtacatataaagtttaatttaggctctaaaagtttaggttgttagtatgatagtttcaggtactaaaatgtacatttatcaaaaggtaaaataaatgcaatatacagttgtacacactgtattcttatttgagttccagtgctaaaaggaaaggaaaatttttcctacaagtaccagggtaaatctagcaaatggaattaaagtccctcttacccacatggaaaaaattcatggttcattaccaggaagatatagtacatagaaatttaagttctaaagtaagttattgaagttttaaataaggaaaacatcccaactgaataagtagtttctgtatttttgaagagtgataacatttaagttgcttttttgtacttacataagccttaactcccccaacccctcattgactttttaacgttattggtactacccagagttatagagattggtaatccttgaatgttatttagaaaacaaaggacttgtggttcagaattctgttttggtcaccaaaatttttgagttaaagactaataaaactagccaggcccggtggctcatgcctgcaatcccagcactttgggaggccgaggcaggcggatcacgaggtcaggagatcgagaccatcctggctaacacggtgaaaccccgtctctagtaaaaatacaaaaaaactagctgggcatggtggcgggtgcctgtagtcccagctactcgggaggctgaggcaggagaatggtgtgaacccaggaggtggagcttgcagtgagctgagatggcaccactgcactccagcctgggcactccagcctgggcgacagagcgagactgtctcaaaaaaaagactaataaaacttttgataggtaattatcatataaggtaactagcacactaattgaacaaataactggaggataatgcccatctttgtaatatactcccagaagcacagtaatactgtcaaaaatactagaataaggatttactttcaaaactgggtgtacaaataacacagctgagaactatactgcatgaagggaaaattttaggagataaccactataaaattttcttgagtaaaataataactagccacttattttaatgagtagataagattgtattgctcttccacaacaccactggaacataaacttttgatttagttgtccatttaatagaaacataacactatgtagggaaaaaaaatacaattaccttggtcaggatctgggtttcacctgtgctactggaagaaaggttctatcatgcatatcatcagttcaggatgtacttctacgtcagacatgagcaaaatgtcaacaaagcaaagcaccagcaactaccatacagctaagtgtgtgctttttattctcagaaggtttagacatctgatagatgttatttagtcttgcttgaattcttttactaatttggagcttggttttctcaacagagcctattgagggtattagttgttagaaggttctatgttgaagtacagtgtagttcattgtaatgttcatagtcccaatttcccccctagagccacaaaatacaattcaattcatttacatgattacccttcagacatttaagattgctacagaaccctttttagttcttattaattagtttggaattttcttactatttattcattcagcaaattattgtgagtcctctatgtatactaggcacataggatattaggtaaacagaacattttatttaaaaagtttcagataagggagtcctataatatcaatgtttacaatattacctgataagtgttataaaagaggatatgaggatgcatcagtactgaggaaggggtgattaactttgagacaggaagttaggaactttacagtagatgaaacatgaaagcttagtattttactaaagaagagggtttgggttagaatgagtgtgatgacaggacaagtaaaaataacatatatatagaattatatataaaatagctcagcactttttgggactgcagattctcatctggatgattgcctctagggtgcatgaggtatgtgtcaaaaactgaggcaaaaaggttgggtctaaattatgggggagctaaatttgtctgacagaactaagtaatttgaactgattcagtgagaggtggcagtacagggaacatttgtgggttttttaaacaatggagacatacttagaactacatttcggaacggtgacttgcatagcggtgtggcagatgatttgcaacttgagaaactggagcatggagatagttatggtagtttatgggtgtttgtcagtctccttttcacaatgtgatatacagatagttgatgtaaataacattttttaaaccagtaatattggattagagaaaaaaagtaaataactagataaatctttcaatctctgcaagaaggggtggttaataagttgagtgagacataccagtagcctttttgtgaagctttaaggaaaataaactttgaactggatttttgtttttgaaggaattgagatgatatgaaaatagagtcatgtgaaaaattatgcttaccatattttgtaaggaatttaatgaggatgggaaaagagccagaatagctatttggctacatgttttgatgttgcggatcagaaaggaaacaacctcaggaaaaaccctggaggtgtaaaattgttgcaaaatcaaggtttcacatctagtgtaaaagttctgtacattgctttataaaagtggactgggacagtatacttatcagccatttttgaggattgaaagagattaaaaaaaattgagacttccataattacctctatgtatatgtgtctcttcttcttttttttttttttttgctacggagtctcgctctgtcgcccaggctggagtgcagtggcgcartcttggctcactgcaagctccacctcccgggttcacgccattctcctgcctcacgcctcccgagtagctggactacaggcgcccgccaccacggctgcctaattatttttttttgagtttttagtagaggtggggtttcaccgtgttagccaggatggtcttgatctcctgacctcgtgatccgcccacctcggtctcccaaagtgcggagattacagacgtgagccaccgcgcccggcccatgtatgtctcttctactaaatggcaaagcctccagagacagagaccatgttcttgttcatttttttacctctgtgtagagatatagattaaattgaaggataataaaaccagaaacttgggccctgccacgcttgaatttggttatctccaagtaaatctagctctattaattctcacaaagcccaacaatctttagttacccatgtgctggcaaaacagtccatgtttaaaggagtaactacctaaacatatagattttggtaaaatacttgtggcagctgcgcagcttttaagaaaatccagattacagcatctgtaactgaaatgttgtaatataaagaaagtgctgaattttgttttataactattgccttaatgctattgctagttttgaagaaaataccttctttaggttttcttatcagcctaacagattattctcaatttctgtagaactagatatgtctgtttttcgccttcaatcttttatactttggtctattattattattattattattattatattatttttgagacagtctcactctgtcacccagactggaatgcactggtgcagtctcggctcactgcaacctctgcctcccgggttcaagtgattctcctgcctcagcctcccgagtagctgggattacagtcacatgccactgtgccaggctaacttttggtatttctagtagaggtgaggtttcgccatgttggtcaggctggtcttgaacgcctgacctcaagtgatccacccgcatcagcctcccaaagtgctgggattagaggctgagccactgtgcccagccttttttttttctttttttttcgaggcagagtctcgctctgttgcccagactggagtgcagtggcgcgatctcggctcactgcaacatccacctccttggttcaagtgattctcctgcctcagcctcccgagtagctgggactacaggtgcacgccaccacgcccagctattttttgtatttttagtagagatggggtttcaccatgttggcgagaatagtcttgatctcctgacctcgtgatccaccggcctcggcctcccgaagtgctgggattacaggcgtgagtcaccgcgcctggcctcccagccatttttttgatagcaaacacatacatcttttatttattcttaaggatttgtacatttactattaaatgtgttacatatacgggttatttaatgtatattaaagtatattaagtatataggttatttagtatgattccatactaaataacatttgtttatcatcgtgaagtttttaacattaacctgcattttagattcaataaaacttaaaaggccgggtgcggtggcttacgcctgtaatcttaccactttgggaagcccaggtgggtggatcatgaggtcaggagttccagaccagcctggccaacatggtgaaaccccgtctctactaaaaatagaaaaattagctggacgtggtggcgcctgtaatcccagcttctcgggagactgaggcaggagaattccatgaatccgggaggcagaagttgcagtgagccgagattgcgccactgcactctagcctgggcgacagagcaagactctgtctcagggaaaaaaaagacaaacttagaagcagctcatatagaataaacagcttttgataggaacagtcatttttgtattttgtttaaaaagccttaaccagtgtaatttagttttctatttaatacatttaataccaaacagagccacaaagaaaaaagtgaatctcctctaagtagtttttattttaccaaaatgtgtggtttagatatggcttttggtttgggatacttactcctactgaaagaagcaagcagttaatctgttgatgaatgctggcaaccatattttaagaactgataactagaagttcagttttataaatctgttaaatttttttatcgcagtggaatatattgctgtggaccgaatgtttgtgtccctccaaaattcatgtgctgaaggcctaatccccagtaatgatatttggaggtggtatctttgaggtaattaggtttaaatgagttcatcagggtgggactctaatgatgggattaacacccttataagaagaggccctggagagcttgcttccctttttctgccctgctgctatatgagcacacagcagaaaggtagctgtctgaaaacagaagagactcctcaccagacaccaaatttgctgggaccttgatcttagacttctccatctccagaacgttgagatacaaatgtctgttgttcaagctaccaagtcgatgatattttgttatagcaacgtgagctaagacatgcatatgacataaaatttaccattagtgacattcagtacattcaccatgttgtacagctagcaccactatctaattctagaacatttcattaccccaaaaagaagctctgtactcactaagcagtcacttccatcctgccttgtctccaacccagcaatctgtttttggtctctgtgcatttgctcagtctggatatttcatataaagggagtcatatagtttgtcaccgtttatgtctggcttctttcactttgcatgtttttaaggttcatttatattgtagcatgcctcagtacagcattactttttatggttgcgtaatagtccattgcttggatataccgttttgttcatccatttatccactggtggacatttgggtggtttccgtcttttggttgttatggatagtgctgctagtatcatttgtgtacaagtttttgtttgaacacttttttctttcaagttttatttttaattgacgaatgtatatttatggggcacaatgtgaagttttgatacatgtatgcattgtggaataatcaaatcagtctaattagcatatcataaactcaaacatgtatcattgatttgtcctgagaacattagaaaaccctcttttagctgttttgaaatatatattattattaactatagtcactgtgctatgcagtagaacaccaaaacttattcctcctatctaactgaaacccattttgtacccattgaccaatatttccccttttccctttcactctcctccacccacctccacctggttccccctgtgaccaccccctggcctctggtaaccactattctactctctactgctattagtctgacttttttagattccaaatataagtgagatcatgtggtatttgtctgtctgtgcatggctaatttcacttaacataatgttctctctgttcatccatgttgtcacaaatgacagaatttcctaatttaaaaatgctgaatatattccatcgtgtacatatgcattttaaaatgcattcatccattgatggacacttgggttgtttccatatcttgaccattgtgaataatgctgcatttgaacatgagagtgtagttccttttggcatattccctgagcactggtttttaattcttttggatattatgcccattagtgaaattgttgggttataggataattctgtgtttaactcattgaggaactgccaaactgttttctaaaagctgcagcattttacattcccactagcaatgaatgagggttccagtttctctatgttcttgttattttctttcagaaaaaaaaattacagccatcctaatgggtttgtaatagtatttctttgtgattttggtttgcattttctaacaactaatgatgctgagcatttattcatgttgttgttgcccatttgtataccatctttgcaaaaatgtttattcaaatcctttgcctaatattaattgggctgtgtgtgtttttgttgttaaattatttgagttctttacctattttggattctagacccttatcagataaatgatttgcaattattttctcctatgggtgtcattaaaccttcttggtagtaccatttgatgcacaaaagtagacaacgttttaaattttatgtatatacagttctaagtttgtgtaaccagtttagtttgtattttaataggggaaataagatgtgtatttagctatctgtagcacaggcaggaaagtatagaatgtattgaagagtacagagtttagctgatatcttagggttcatgtagtttttttttttttttttttttttgagtcagagtctcgctgtgtcaccaggctggaatgcagtgtcgcgatctcagctaactgcaacctccgcctcccgggttcaagcaattctcgtgcctcagcctcccaagtagctgagactacaggtgtgtgccaccacacccagccaatttttgtatttttagtagagacagggtttcaccatgttggccaggatggtctcaatctcctgacctcgtgatctgcctgcctcagcctcctaaagtgctggaattacaggcgtgagccaccacgcccggctgggttcatgtagttttaaggaacagaagcctacttaagctaccttatttattttttcttctttttctggactcctatcaggaaacagtttgtttattaatttttaagagatagagtcttgctccatagccaggctggagtgcagtggcgtgaccatagctcactgcaacctcaaactcctgcgctcaagcagtcttcttgccttagccttttgagtagtggggactacaggtaccgtgcttggctattttctttgctgttttttttagagatgggtgtttcagtatgttgtcctggctggttttgaactcctggcctcaagcaatcctcctgtctcagcctcccaagttgttgggattacaggtgtgagccaccacacctggctaagctaccttaaataaagtagaatttattgttagcatataataggcatcttgtgggcattttgaagataaaaaataaactaggctgggcactgtggctcaagcctgtagccccagctacacaggagtctgaggcaggaggatcatttgagctcagcagtttgatgctgcagtgagccatgatcacgccagtgcactctagcctgggtgacagaatgaggccctgtcttgaaagaaagaaagagaagcagagagaaaaagataaagcaaaaaaagaaaataagtaaaataagaaaataaactatacctggatcacagagtgccaggaacagtggtttttctgccttccaagagatgcttggtttttcagctcttttctgcctcctgattgttcaatgcatgctttctacctacaaaggctctgtgaagctgtaccagctctacacgaattatcagttcaagcattcaccatcttttttttttttttttttttttgagatggagtctcactcttgttgcccaggctggagtgcagtggcacgatcttggctcactgcaacctccgcctcccaggttcaagtgattctcctgcctcagcctcctgagtagctgggattacaggtgcccgctaccacgcccggctaatttttttacttttagtagagatggggtttcgccatgttggccaggctggtctcgaactcctgacctcaggtggtctgccygcctcagcctcccaaagtgctgggattacaggtgtgagccactgtgcctggcctcattcaccattttttaactttctcaatctctaaggcttctattaaaaaacttggggrgtctgcttgtcttagcctgtgtatgaatttttctctgttttatcagtggtacagttaaatcagctctgactgagggcccggatcataaactacaaaaatagccactctgggctactgtttcagagaaggaatggcagagtgggagtaggttgtaggcatgccaaaaccacatacagtcagatgaccctttctgtctgtgggttccacatctatggattcaaccaacctaggatcataaatgtccagaaaaaatatttagtctgtactgaacatgaacagacttttttcttgttattccctaaaaaatataactatttacatagcatttacattgcattaggtattataattaatctaagatgatttaaagtatacaagaagatgtgtataggttatatgcaaatagtgcaccagtttatataagggacttgaacatctgagaactttggtatctgagggaagtcctggaatcagtcccccacagataccaaaggacaactgtatatttttcctagttgtagaaagagagtagtaggaaataatattgtaaagataatttgtgtccccattgtggagagcttttaatgctagggtaaataattaaaactcttccataaatagtagggagttactgaggatttggggacaaggaagtgaaatattctgttattttctgcttatacttggtagtgttttctagttgtaatggcttatctgtcattttcttcctctctcctgtgtttgtctaaattctcccytcgttcattcagtaagcatatttgagcaccacctatattccaacgaaagaaggagctagaataaggcctttctgttgaaaccagtgatggaaacataaattgaaacactgtgctgtgatactagctcagggagcatgagatggagtgttttaaattctttgaaaataaagaatagcccttcagcaacagaaagagacacaaaatggaataaggatttcattacaggcyctgggagtacctggcatgtctgaaggccacatggagatgggtcagtgctgggaaggatagaggggacccatgggccaaagcttttattggcatccagggcatatcgaagcagatttcctgtgggggaattctaattaatgggtttaaagtaaactggtaagagttctagaaggtcactgtggcatgtctgcayaattcacgcagggtttggcagtcaatggggccaggtaagtaggttgtattcagctgtcccatagggaggtgatcaacaggaggtccaccttgaggaaatgggaaaaggtgtagaactggaaactgtcaaggatgactgagccctgcttctagtatgagaaagttaaacttatatttaaaaactgatgccaaggcaacataaaattatagggaatcactgcatggggcaagcaagaattactcctctggcactacctctggtttgcaagtccatcttcaagttcatttccggggttagtagagggtgtgactgtaaagagatagcatggggagttttttgtttgctttctctgtacttcagtggatgcaaaatgagggagtttttttggcgtgatggaagtgttctatacctgaattgggagtgttctatacttcaattgtgatagtagttacacaaatctatacatgtgataaaacttgtagaactatacaccaaaagaaaaatggtcaattttgttctatgtcagtttaaaaaagaaaatattcagtgagtgcagggcattgtgaaggttacatgtatcatgttcaattaatttctctgaaattagctgactttcatttgttgtgtgaagtcgcagcactgaagttacaataataaatttggagctcacactgtaatgcagtggagacatcatagaactcacgtttttttttgttctacaactcaaccaactagtaagagctcacattttaatgcagaagacagctaattaaatttgcaaaattgctttggctattttatttcctttggctttccatattgattttagaatcaacttgtttttatttacagataattcttgttaattaacttagggagcattgacatctttatgatgttgaatctttcagttcttcagcacagtatatctagccatttatttgggtcrttttttatttccttcatcaatgttttgacattttcagcatacacatcctgtaatattttgttaaatttataattaaatatttagttttttgtgttattataaatgatacttcttaaaaatttcactttctaactattcattactaattcagagaaatatgattgatttttgtgtgcttgccttttatcttgtaatcctgcttaacttactaggaacttttttgtagattctatgaggtgactgtagacagtcatgctgtctgcaaataagagaacattttattttttcctttctactctttgagacttttaacttaatttttcttgtcttattgcattggctagggctttcagtatgattttgaaagggaatggcaaaagtggacatcattatctggtttccattctcaggggaaacatttaatgtttcaccatcattaagtatgatgttagctgtagggtttttaaaattattttttatctttatgttttggtagatgcctttaattaagctaatgaacttcccttttattcatagttttctttggattttttattttattagtattgccaaatgacttttctgtgtccattgatgtaattgtgtgggtttttctcatttagactgtgaataaaattggattcatcaatgactttcaagtgttgaatgagccttgtattcccaggataaaccccacttggtcttgttgtttttccttttacatattgtcagattttatttttatttttgtatatttttttgagacacagtctcactttgtcacccaggctggagtgcagtggtaacgatctcggctcactgcaacctctgcctcccaggttcaagcaattctctgcctcagcctcccgagtagctgggattacaggcgctcgccaccacacccggctaattttttgtatttttagtagagacagagtttcaccatcttggccaggctgaccttgaactcctgacctcttgatccacccacttcggccttgcaaagtgctgggattacaggtgtgagccaccacaggtggcctgattttttttatttaaatattttaacagtgttattgagacataattaaaataccacacaacttgcccctttaaagtgtacaatttgatagttttcagcacattcacagagttgtgcaactatcaccctaatcaattttagaacatttctgtcatccccaaaagaaaccctgtacctattataaagatgaaatacatatgaaggtattttactcttactgtaaacaaaaacactgttagtttctgttgtatttatacaataggcataaatggaaaggtatttacacatatggttagtttcatttatcattcctcatcagtcatcttgcctgtctttcccacctttctcctatgttaaaaggtatcttaccttctggtgacaaatattttgcccatgttctgctgatgtttttccttattaccgcttgtgtgcttatcctaaaagttcttttctatatccttcctcttttcttctggtggtttctaacttccctttgaatatcttagatactaccattggtcctaaagcaacagagactttatttataaaacatgtcatgcatgatgtaataagtatgcagctcaaaagcaagactttttataattacttttttcttttatcattaaatgtattctattttgttctctcctgctgcaaaagaagaaaaagatctcagctgggcatggtgtctcacatctgtaatcccagcactttgggaggccgaggcaggtggatcacttaaggccaggagtttgagactagcctggccaacatggcgaaaccctgtctccaataaaaatacaaaaattagccgggtgtggtggtgcatgcctgtaattccagctacttaggaggctgaggcaggagaattgcttgtacctgggaggcggaggttgcagtgagtcaagattgtgccattgcactccagcctgggtgacaaagtgagaccctgtctcccaaaaaaaaaaaaaaaaaaaaaaaaggaaagaaaagaaagaagacctctatcagtaaggcattgcctgtaatttatttaccataagaaataagacataaggtgacttgctaacatgagtacacttggactgtattctggaaggataagaaaataaatttgtatatttgaattgtttaaaatgaaggcattttggcaatgtgtaggatggaaaagattagggattagttgtgaagctcttacatcttgattgttgtatggaggacatgaacaatatgaatgtgattaaaaagaaaagcaactatgcaagagagacctgtttcaaacacttagtagtgtgaccttggcaaagactctgtggggtcatcagtctgtcttggaagtggtaggttggtgtattgaatcctaggagaatttgatgaaagctggccaagagaaatgtttggaacttctttttttttttttttttttttttaagacagggtctcactgtgtttcccaggctggagtgcagtggcacaatcacagcttgctgcatcctcaacctcctgggctcaagtgagcctcccacctcaacctctcgagtaactgggactatagacgcatgccaccatgcctggctaatttttatactttttgtggaaatggggttttgccatgttasacagggtaatctccagttcctgaggtcaagtgatccacctgcttcattcagcctcccaaagtgctggaattacaggtgtaagccaccatgcctggcctgtaagtacatcatttacttaaaattgtgcagacaatatttttttcttacctgacctcattactggattgtgcacacaatttgagaatgcttgtagacaacctgtggcccatttgtgtaggttcattgacttttttttgagacaaaaatctcactgttgcccaggctggagtgcagtggtgccatcaggctcactacagccttgacttcgcaggcttacgtgatcctcccgcttcagccttctgagtagctgggactacagatgcatgccaccatgcctggctgatttttttttgtagagacggggtttcgctatgttgcccagactggtcttgaactcctagatgcaagtgatcctcccgccttggactctcaaagtgctggcattacagacgtgagtcatcatgctcagcaggttgattgactcttaataaagaactctgacctggatagtcttttttttttttaatttaatttttaattttctttttctctgaacactctccaatgttacggatattttctaaggtccctagaagctctaaaatattatttattacttgaaaaattgtagcctttcagccttgtaatttctcttgttttgacagagtgggtgatgttgaatttccctttttgatagctctgatctcagaaaatatctggttagttaagtaatgtttattgaataaaaattctctactttttttttaatttttaggatttgtaataacaaagacaagatccaaaaacagcttgaaaaagaaaattcttggaattaaaaaagcctaagttatctggcaaaaaaccctactttttttgcatatagtcagctgaaagttttttccaagtgaaaaatgattgaggcttgtaaagaatgttagtaatctttgtgccagatctttaatccagaatactcaagggtaaccaaagtactgagtttagagacagtagttatacttctttgaattaattatgtagtcagctgtggcattccatggtcactagataatgttttctttatggctttttattctttggggaaattaaagtccaggaagtttttatgttttcagccatccaacttcccctctgttatgatttctaatttttaaaactgattttactctttcaattgattctatcccctccacttttttttttgagacaggttcttgctctgtcactcaggctagagtgcagtggtacgatcttgtgttactgcagccttgacctcctgggctcaagtgatcctcccgcttcagcctgccaagtagctggggcttcaggtgcgtgccaccacgcctgcctaatttttgcattttgtttgtagagatggggttttgccatgttgcccaggccggtctcgaactcttggacgcaagatacccacctgccttggcctctcaaagtgctggtattacaggtgtgagtcaccgcacccagccgaaaagtattctatccccccaccccaatttctaaaaaaatagatggtgtcttgctatgttgtccagtctggcctcgaactccagggctcaagcagtcctccttcagccgcctgagtagccaagactacatgtgtgtgcccagtgttgaatccccttttaatatacaagtctattgaaatgattattagaatttatccaatgagtctaaaaggttaaaatagtcaaattgatgtaaatgttaagcaaaattaattactttttggagggctggagctcacattactgttggcagtaagaagattcaggattaggtagtcacaattttctatagtgtcaaattccacagtttgagaaactatgggatttacattcctttatctcagatacgtaagtgggtttgccaattcttaaagatccaagcactctacattctgttatttaaaaaagcattagtggagaatttgcatgatatcaataaattttgcccctttttagtgagctttagcctttgataaggtatggtaggcaaatggtctgactcttaggtcctatgtagctttttttgtgtgtgataaaagaaatgaagaaattttaggagaatacaagcacacagatatgtgaagcaaatgttaacatgtattaataagctagagtcatttacccaacctgtattataaaagccactaagggagaaggcagggaaatggttgtattagtaggccttttcccctcttttctcttctaatccccacattagccttttcttagtgtgcctcttttctttttcaactatatgttttcaacaatgaagaaaccattagactgctatttctcagttgatgctatttcctaactggggcaacttattgctcaactcctttttgctaaaaagattggacacaaattagtagagagaatggaagatggtgtgtttgtgtctgtgtgtgtatagatgggcgtgtacatgaacatggtatttatatagtgttgattggggtggaggatgaatttaaagggggaaagatggattaacactaccattccctgttatgtgctaacaagatgtatcacagaatgaagaaagaaaacaatttgaaggctgggtgtggcggctcactcctgtaatcccagcactttgggatgccgaggtggttggatctcttgaggtcaggagttcgagaccagcctggccaacatggagaaaccgtgtctctactaaaaatacaaaaattagctgagtgtggtggcacgcacctgtaatcccagctacttgggagactaaggcacragaatcgcttgaacccaggaggtggagtttgcagtgagccaagattgcaccattgcactccagcctgggtgatagagcaagactcttaaaaaaaaaaaaaaagaaaagaaagaaaataatttgaaaacacatagttgttcttaatatttctaccatacctgaagcaataaggtacttttcaatttataaatacttggggtttgggaaggcctaataggtaacacctttagcaacccattcaagtttgggctcaatagagaaaagataggaaaacaaatggtacttcaaaatatgtcttaatacagatacattgtggatcaaaagatgtgggtttgttgtgtgactacagttggcctccttaatatttcacttgtgttaaatttactcagcaaaacattaacacagcaggtctttcctgtggggatggggagcagagaggtacagaggtaacttggcctcctaacaggagagcagaacagactatcttcagcagcagtgtctgctgccaaaatttggtccctcaggtggggatgaataagggggcagagagaagctaggaatgttcctttctgcttcccctcccttcaacacgaacaacatagcacaagagtgaccccttccccaaaagtgccctacagatgtcattcatatagtcagacactacctctggaatcctgaaagaattgttctatcttttgtgtgggtgtgcttgaacacatctggtttgttttgctaagaagcctttagtgttgatttatatttaagaaattttaatattttggggggtgggagaaagggaagagagagagagtgagtgtgtgtgtctgtctgtcggtctgtctttcatttgaaaaggtgatacggaggaatgtggtctcacatttatctccattgagacatcagcttttcaggcttactaacagtagatcgcgagacaagggatggggcgtcaaaagatgacacatttttggcctatttatgtaccttttcactgggttttcccccttaagatttaataaagtagtgattattttcctaggctgaccagtgaagcctgttaaatctgtaatgttttaacacaattccatatacaatatttgtaatgatattttaaaattacttttcattgcaggtatatgccattttgctgtattatgttataaatagtgtttgtggcagggaataacctgaaaacccaatccaaaatttcctagtggcataagaaattaatgtggaacaatatctgatggcctttcttagcaactggatacctgtgggctcatatttcttttatggaaatttcttgtagtaaccaatgtttcctggatgcataaatttaagttatttggctttggcttgtttttttatgatttaacaagaatttaaacttcattctgaacttattgtattgtcaggactataatatataattagaaccaggcttttttattttggaggtttttttttttccttttcatctgtgctgatcatagcaagattctacaaaaaccacatccactgaaagacttactgttatttgatttaagaagttagtatttcttggagttaattttggaagtccaaaatatccttataagtagctgggtgtggtagctcatgcctgtaatcccagcactttgggaggctgagacgggtggatcacctgaggtcaggagttcaagaccagcctggccgacatggtaaaaccctgtctttactaaaaatacaaaaactagccatggatggtggtgtgcacccatagtcccagctacttgggaggctgaggcaggagaaccgcttgaacccgggaggtggaggttgcagtgagccaatattgtgccactccagcctgggcaagagagcaagacttcgtctcggaaaccctcctgggttcaagcgattctcctgccccagcctcccgaggagctgggattacaggtgcgtgccaccacaccaggctaatttttgtatttttagtagagacaggatttcgccatgttggccaggctgttctcgaactcctgactgcaggtgatccacccacctcagccttccaaagtgctgggattacaggcatgagtcactgcacctggctaatgcaagataatttttaacagtccctaatcaaagatttatgtatatttagcattttaggtgtgattttaaaaaattctgtaacttatagagatctgatagacaatattaatatgtgtagcctctagtttttcatgtgagaatatgtttggtaaggattacaatatctaattgtaggtaaagctatagagacataaatacccccaaggccctttatagaattctgcacatgaagaattttctgatctgtagttattactttcctttggtataacttcatcttatatttgtggttttctccgtctgctgctatgtctgttttctcagccaggtcrcattatttgaagctatgcttcactaagttaaaaaatatgcttaagcccttctattttatggtgtctctgctttaataatttatacatgtaactctgcatttctaatataaagaatggaatgcttttttttttctcctcatgagaactgcctacctgttcttgcagtctggtcagtgattagagttgataatagctgtaaaaaaaacaataaaatttgttcattgtaaatttttttccccaagggcttattgttagtatggtttctgacccagtaactacctcagtatgattgagacagatttgtatataaatgtgaattgaccctaagaagggtacttgaagtctgaaatgtttatccattttggttcaagtaagtgtacctaagctttgtggcagaagatgatgcccaatgcagtgtaggcagaggataaattgatagctcctcagctatggattaaaaatatgaaaattggccaggtacagtggctcacgcctgtaatcccagcactttgggaggccgaggcaggtggatcacttgaggtcaggagttcgagaccagcctgaccaacatggtgaaaccctgtctctactaaaaatacaaaaattagccaggcgtggtggtgtgcgcctgtaatcccagctactcagggggctgaggcaggagaattgcttgaacccgggagatggaggttgcagtgagccaagactgtgctgctgcactccagcctggacgacacagcaagactccatttaaaaaaaaaaaaaaaagaaaaagaaaatcttttaaccattttagttagggctctccagttactagggagtcctgactgggacattaggattacatgatgtaataaaaactagtattttggggctggatgcaatggttcacacctgtaatcccagcctttgggaggccgaggcgggaagattacttgagctcaggagttcgagaccagcctgggaaacatagtgagacctcgtctctacaaaacatttaaaatattagctgggtgttgtggtgtgtgcctgtggtcccagctactcaggaggctgaggcaagaggactgtttgagcctgagaggtcgagctctttttattttgtcattgatccattctgagagtggaacccttatgacctaaatacctcccattaggccccacctccaaatactgttgcattgaggattaagtttccaacagatgaattttggggaacacattcagatcataggactgaacattgttttttcaagtttcattcatggtgatgaattagcttttgttgcttttcacggaggaataatattacatttgcaaatataccacaattagaattttctattcttctgtcagtggatttttggattttgagtaggtttttgctcttttgaacagtgttgtcctgaatgttgttatatatgtattccaaatgtacatgtccaggactttgcttaggattcgtggctagaagtctaattgctagatggtagggtatgcagctgttcaactttatgagctagaaacaactgtatttatatcatgtaaatatcaaaacaaatttatatcatgtaaatttctaacagtgttcttccccttctaaacttggtattatcaggtttcttaggttttgctaagattttatatacagtggtcaatacattacaaatgttactctgtttttagtttgtgagctcccttattactaatgaggctaaatattgtgtgatagatctcatttgccatttgttttccctctttctgcaataccttttatctattttttattagattatcttttatgaaagtggttagtggagttctttgtattttctgtgtgctaattttttgtcatttatgtgtgttggaatttatcctctaaatttatgtctttttactttgtttatagtgctctttgaacagaactcattactttttatgctggtgattttatcaagttttaaaaattaatgcttttgggactgatttttagatttttccctgtgagattagaagaaaaattctcctgtgtttctttctaaagctttcaaaagtttgcctttcgtgtataactgtttgatacattgggaactgactgtggtatgtggtaggaatccaatttattttctttcacattgctagccggaggtcccgatactatttattacacaatctttcctcgttgatctgcagtgccacctgtgtttccatttatgcttgggtatgtttctgagttgtttattctttctccattgattaatttctttatccctgggtcaataccatatgttgttaaaaactgtaatgttatggtaaatttggatatctgttagggcaactcagccttgccttttttcttcttgaaaatatcttattttgggtcctttattccttttttttttttgagatggagtctcacttttttgctagctggagtgcagtgatgcaatctcagctcactgcacctccgcctcctgggttcagttgattctcctgcctcagcctcccaagtagctgtgactacaggcgcgcgccaccacgcccagctaatttttgtatttttagtagagatggggtttcaccatgttggccatgatggtctcgatctcttgacctcatgatccacctgcctcagcctcccaaagtgctgggattacaggtgtgaaccactgtgcccgcccaggtcctttattctttaacataaatttttgagtttccttcaagttcctaaaaaatcttgttgggtttctgatgggaattggatgaaattgatagataagtttggggagaattgatatttttatgatagtgttttcctttctataaatgtgaactatctttctatttaatgaggttttctttaatgtggttcaataatgtatcatttcattctctctataaatttttataaaactttggctagatttcttctcacataccttgtattttcttgctattatatctctttagattttaaaaaatttccagctgtcattgatgatacaaagtcaaaattgctttttttaaaaaaagaaaaaaatcttttttttttttaatgctttaatgctttttagcctcccgagtagctgggactacaggcgcgcaccaccacgcacagctaatttttgtatttttagtagagacgggatttcaccatgttggccaggatggtctctatctcttgacctcgtgatctacctgccttggcctcccraagtgctgggattacaggcatgagccatcatgcccggcctctccttcattcttgaaggatagttttgttggatatggaatttttggtggacaatttttttttttcctttctgacctttaaatatgtaatcttacttctggcctccatggtttctgaagagaaataagctgttaatcttattgaggatctctggttttgatggtacctctcacttattgttttcaaaattgtctttgagtttcagcagtttgactataatgtatctcagtgtgaacctccttgagtttattctgcttaaagttgttgagtttcttggatgtgtagattatgtctttcctcagatttgggaagtttttggttattttctttttttttttgagacagagtctcgctgtgtcacccaggctggagtgcagtggtacaatcttggctcactgcgagctccgcctcctgggttcacaccattcttctgcctcagccctccggagtagctgagactacaggcgcccgccaccatgcctggctaattttttgtatttttagtagagatggggtttcaccatgttagccaggaaggtctcgatttcctgactttgtgatccmcttgccttggcctcccaaagtgagttatttcttcacgtattttttctgcctctttgtctttcccttctccttggtcttttatggtacgtagttggtacacttagtaatgtctcacaggcccctcaggctctgttcctttttcttcattcttttttctttctactactgagagtggacagtttcaattttcttatcatcatatttgccagctctttcttctgcctgctcaaatttgctgttgagtacatctggtgaattttttattttagttgtttttcagctccagaatttgttgtgttgcttattataatttctgcctttactggtattctcattttgttcatacattttccccctttatcctcctttattacctttcgttctttgtccatgggtttttttctttttcaatctcctggagcttttttttttttttttttttttttatgaaattgacttaatgtctttgactagtaattactttgggcttcctcagggaagatttttgtcaaattcctttttctagggaatgggccatactttcccgtttcttggtatgttttgtaattttttgttgttgacaactggatactctgagtattatagtatggtaactataaatctgtttctcccactcctcagtgattgctgttttttgcttgttgagggctgaagccacctgtttgtgactttacaagctattttcacaaagtatgtattccatattgtgtatggtcacaagtttttgttctgttgtctctgtggctagctggtgacctgacaaagattttcttaratatctggctccaaaaaaggagatcaaaaaggttttaccttttttattgttctaataatacttacagtgaaagccactgctgtggagagtagtgaaactgatgcatgtgcctgcatcactcccttagggccagaccaaccaaaatgtacaaccctaaattttgaaggacatgatccctactgtccctcctggcaccggttagcaactccaggaacatgggctgctatccccactgccacaagaggtggtgggtgtggtggtggtggttgtgaggaataggggaaggtaattggtttatgcatgctgcttattcatacttatgaaagatcggtagcctcttccttcatcaagcactcccctggttgttaaaagggtttggtcagttcctagagttctactaaagtacttgattccagttactcttagtttttttttttaactcttactttttttgagacagagtcttgctctgtctcccaggctggagtacagtggtgcgatctcagctcactgcaacctccgcctcctgggttcaagcaattcwcctgtctcagcctcctgagtagctgggattacaggtttgcgccaccatgcctggctaatttttgtatttttagtggagacagggtttcgccatgttgcccaggctggtctcgaactcctgacctcaggtgatccacccgcctcagcctcccaaagtgctaggattacagatgtgagccaccatgccccgctccagttactctttctagctcaacttttactttggtggggagactgacccctagatctttctattctgtcattttgcatccatgatgtcttttgaagttcaaatgttttaaatttagttaagcccagttcatcaactttttcttttgtagatcatgtttttgtgtcatatccaataattattttcttaaaccatggtgacaaagattttttcttgtgtttatttgtgtgggtagataggaaacctttagggtgcaggcaggtcacgtaggaattgtagagggaatatgacttgatgagaactgtctggcctgtgtggggcttgcagaggaaattggcacactgttgctggcaggaagcctttggtggagtcawtttttttgttgagcaggctgcaggaacgccatctccaggttgaggctgcaggttcagcaaggctgcaggtttgctgaggggctgcagtctgggcatcgagctaagcagaattttactggatgtcctcacacttctacccgatccactctgcagcagctggaaaccacaggagagcccctttctccttcagtgtccctttggtgccctctacccagaaagcttaataatttcatgtttgttttaaaggagaaatgattaaaggaattttttctgttatcttagagcataaaggtgaatttggagttaagaggtattagaagaatcatcaacagaaataataaaaagataaacaaattggaaggaaaatgatagccataaataagatgtagacatttgtttaaatcagctacaaagtgttttcttgataagtggtacacaacgtatcaaacattgtttaaattaatagaccatcctttgaggcttcaaatttttttcttagaagtattcctagtcctcagcatattcattattgaaaackttcacctatttagtgatcttatgaagtagagaattaagtcactgtacatggtctctgaggtgaaacctccagagtatcttaaagtagaaattactctagtgtcatatgtttatttctgttatacacctgaggaaataagagtgtttatttycttttcctttctttttttttttggaggcagggtcttgctctgttgcccaggctgcagtatagtggcagtatcatagctcactgcatccttaactcctgggcccaagtgattgtcccaccctagcctcccaagtagcagggactacaaggtgtgcaccaccatgcctggctattttttttaatttttattttttgtagaaacagggtctcactacattgcccaggctgttctcaaactcctgggctcaagtgatccttttgctttggcctcccagtgttgggattacaggcatgagccactatgcctggccatttcttttctttattattgattagcctgcattcttttgtaggagtcccttaacatttttcattaaaaacttattttctattatcactaatctgcacttttaagatatattgatacggcattttgagtatagataaatctaattatttgggacttcaatttggaactgtttgtaattaatcatatgtgtgaattaagaattttcttactgttcacttatagcttatgcaaagggtttatattgagttgaattcatcagtaccttcctaattggttcattgggccctggtcatgttgttttgatgggtacatatgttgagtatcatccctgcttacataaaaaaataggtacttaatttggttggttagggcatggagataataggtaaaatccttaatacttgtgcagggtgcacaatgacgcggagtgcaatgaggcggtctcggctcactgcaacctccgcctctagggttcaagcgattctcctgcctcagcttcccgagtagctggaattacaggtgcccaccaccacgcttggctaatttttgtatttttagtagagacagggtttcaccatgttggtcgggctagtcttgagctgctgacctcgtgatccgcccgcctcaacctcccaaagtgctgggattacaggtgtgagccatcgcacctgtcctgggttttgtttttttttttctagatttttcagtgagagatactttcttccttggttatatattgactcttttgtagtaagctttcttgtacatagctggcctaggaaagacaggttatgtatatatattatagcaataggggattagtagatataattttattataaataacaaattattactgtaaataatatttatccaaatattgtattacttaatcctttaactgttatatagattcttttaaatgtttttgttttcagaattttggctcttattgttaagtacatgtacagtcaattctagtatactttgtagctgatttagacaaatgtttgcatcttatttatggctatcattttccttccaatttgtttatctttttattatttctgttgatgattcttctaatacctctatataagccagatagtctgtattttactttaagttctgggacacaggtgcagaatgtgcaggtttgttacacaggtatacgtgtgccatggtggtttgctgcccctatcaacctgttatctaggttttaatccctgcatgcattaggtattaagctacatattcttaattgagccttattattctaagtaatagtggtataagtagtagaaatagttttatttaaaagtatttttgtttttgccttgggaacaaacttattataaaattactgttaaatagctctctggttacaaaaaacacaattcatgtaacttttctgtgtttcagaaacctttttccaaaaaggacaaaggaactcaaatcagttgtccatagtgctcctggttggaaattatttggtaaagtccctcctagagagaatcttcagaaaacatccaaaatcattcagcaggtaagtactgacatagccatgtagtttaccctagcttttcaagcattcttcttcttcttcttctttttttttttttttttaaactaaccatattctatttttattcttatttttctagatacagacttttgggattataagtatttatagggacctgctaaattttctagaaaaacaggtcatatattttctgttatcttttataattgtgaaaattcttcaaatagaacgtagacttttttttttaaccagttattccttgaatagattttttaaaaacttagctaatcactctcaccacatactgtttgacttccagttgaagttggtagcatttgtcagtggcacagatgttctgaatattggtagttgtgaactgatgaaatattaaaaagcaaaaactgagtagattatgaggttgaactccttcctttgtcacttttctggtgtcctctctaaaccaaggactttgtaaatgagaagagttggtacacaatctgtttctagtaatttagaagctatttcttctgatatctctgttaacatctgtattcttgagttcttaagactttctgatcttatttgacttctgaactttggctcttcagtactagataagtgagaatggaaagcagtgagactggatcaatctgcagtgttttaaagttcagagaagttattgctcagaagaagacatatagtacatttcctatttttatccttcccaattgtagtttaccaaatttaacacagctagcatttataaaaacaatcacatgaaggcaataatcatcattcaaattggaaaagatatcttcctttaaagatttaatagtgttccttttattgctcagaagaaaaactggttttccaagtaatatgagaaaataattttagatctttaaaaacattattgtagttaattctttttttcttctttttgcatttgaataaaaggtttatttttttcctcaggaaaaacaaagttagggacacacactatgcttttagaacccatattcttttgtagttggtcctaacccttcctggcacagctgtcaaaagcactagctgtttaaccagaaccaagatgttcacccccatagaatgtacatgcacggcactagaggactgcatgtttgtccctgagagaagcataagacaaacagaagttgctgagattgccgtctttctaagcagcccctccctttcccttttgaaggatttgcctgaactatgtagctagtcagtagttagaccatgtgcctcctcctctccctgtaaactaacttaatttcttttttcaagagacttggtattgctatgttgcccaggctgtcttcaaactcctgggcttaaatgatgatgctcctgcctcagcttcctgagaagctgggactacaggtatgtgccaccacacctggcttgtagttaattttctttacaagtgatgaaaatagtgaatagtttatctattggtacttaaaactgtgtgctgtgatccccaagccatgtgctcagacactctggtgtgctgcacttaacacactggggtactgtgggatatttaaattttttgaggcaaacagtgatattccacatcagttggatatggtggagactggtaattagaagcagtacacagttccaacattaagtgctactacatacttttctgtggcatcatatctttgtgaatctgttttttctgaggttgctgtgataaaaaccagatactgtaaaaaagtcagcgtgggactggaaatgagggttatgtctaatctgattttaaggtttgagaaattgtatacaatgcacaaagccacacatgcccaaattggtaattaattgcggttatttaagaatgaggccgagtatagtggctcacgcctgtaatcccagaactttggaaggcagaagcaggcaaatcacttgaggtcaggagttcaagagcagcttggccaacatggtgaaaccctgtctctaccaaaaatacaaaaaattagccaggcatggtggtgcatgcttatagtcccagctacttgggggatgagacaggagaatcgcttgaacctggaaggtggaggttgcagtgagccaagatcatgccactgcacttcagcctgggtgacagagcaagactccatctcaagaaaaaaaaaaaaaaagaatgaaagaaaacatatttcttttttcaatttatgtgtattttttttttttagcagttactaagtgttaggaaatatatccttattaaattgtttggacatagctacttattaaacagaatcattaggtatttcttttggcttaagagttactgtgaaaaaaatcagagacactaaaggcattgaccaagaaaggttgggaacctctgctattgtgacatcttaagttttagctcctttttttttcttttggtaaagtctgaaagtaacgtctctcgtctagaatgtttcagaagaccaagttcgccctctagaggcaaaacggtggtcttgctactgaaggtttatacaggtatttttgatttttatggtagtttaaatatgcatgcacatacatttttatatctttatataaactaatgttctatgatattttcttaccataagtctctgaataaattactggttggataattatctttgctgatacgctgtatacctttaatctgctattttcatttcggaaagccaagacctcacattctcttttttttttttttttgagacggagtcttgctctgtcgcccaggctgcagtgcagtggcacgatctcggctcactgcaatctccgccacccgagttcacgccgttctcctgcctcagcctcccaagtagctgggactacaggcgcccgccgccacgcctggctaatttttttgtatttttagtagagacggggtttcaccgtgttagccaggatggtctcaatctcctgacctcgtgatccgcccgcctcagcctcccaaagtgctgggattacaggcgtgagccaccgcgcccggcccctcacattcccttttttatatatgtggtataaaaacttgatgagtgggccgggagcggtggctcaagcctgtaatcccagcactttgggaggctgtggcgggcagatcacgaggtcaggagattgagaccatcctgaccaacatggtgaaaccccgtctctactaaaaatataaaaattagctgggcgtggtagcacgtgcctgtagtcccagctacttgggaggctgaggcaggagagtcacttgaacccgggaggcggaggttgcagtgagccgacgttgtgccactgcactccagcctggcraaagagcgagaatacgtctcaaaaaacagcaacaacagcaatagaacttcatgagtggtcaggaaaagaacagctctttttcatttgagaagaaggggtagagttgaaatgtagttgctgcctctgcctctgcggccccttctctgatcctttaactgacgattatttctctgcgccacttattttagttttcgaactttccagctatgtcacagctattagtatatgttttagtgccctttttgtggttatgtttgttctctgggaggcattatgtatagtcaagtcatttttcttctgacctttttccatcttcaaaatatgtatcagctgggtgcggtggctcacacctttaattctagcactttgggaggctgaggctggtgtgtcacctgaggtcaggagttcgagacccgtctggccaacatggtgaaacctggtctctactaaaaatacaaaaattagctaggtgtggtggcaggtgcctataattccagctgctcggaaggctgaggcaggagaatcacttgagcctgggaggcagaggtcgtagtgagccaaggtcgtgcccttgcactccagcctgggtgacaagattaaaactgtctcaaaaaaaaaaaaaagtattacttttaccatgtgatggaacatgtttctacctcttgctttctactatctctgcttcaatgtgtgtcctctactccctatttgtctaattttgctgtcctcttccctgcaattctcatttttcaaagtgggcatgattttctttttatagtaatggtaaatttacaattttatgtctctgttttaacttagaaacattttttcatagcactgatttttgaattctctagaagattatgaatataaaactgtatctgagttcctttaccatgtatgctttcagatagatgttattacgtttggaatcagaaaccgaaagtgaatatagtatcagtaaagccatgaagaatgttaggacacttctgtcatgttttgggataggktcttaagctgttaaggctttaggaaatgaagaggtagctggtaatttaggtgtgaaaaactgcttggagaaatgatgcctcacttgctttttgaatggtaaagcagtaagatttattaggagattagagtagtagtatttcattggctaataactttttaaagcaggtcttcagaaagaagttgttgattcttttaaaacattttttgaaaaaaaatttttttttggaatgtggggctcactatgttgcccaggctggcctcaaactcctgggctcaagcaatcttcccgtcttagcctcctgagtacagggcactacaggcgcacaccactgtgtcctgcagagttgccatatttttaaatatgttattaaaccaaacatttctttaatggaaagacatctgtaagattacacactaagtaaagaagaaaagatttaatttacaaagtttttgctgggtgcggtggctcacatctacaatcccagcactttgggaggctgaggcaggtggatcacttgaggtcaggagttccagactagcctggccaaccacatttctactaaaaacacaaaagaattaatggccatagtggtgcttacctgtaatctcatctacttgggaggctgaggcagaagaatcacttgaacctgggaggtagaggttgcagtgagccgasgtcgtgccactgcactctagcctgagctgtttcaaaaaaaaaaaaaaaaaaaccttttttatgtattattagtgacacaaataacacatgattatattctctttataaaatataaaacatagaatgatatatctcagttcactttcctttcacatttttaggccttttaaaattcatttttttgtgtggaaaaaacacgtaattatttttrcatgtatatattttgcatatgtggaattatatgtttttttctatttcaagaatgaaatgtcaccatatttaattatatagatgtgtatatatatacacacacacacatctatatacaatttaactttacatgttttgtacctgtatcttttcagagatatttgggttcataagtgaaagaatctgttaaatattttaaaactttttattcctgcagtaacttttattacaagtctaatcaattttagtgctttccatgttaacagtaaagaaacataaaaaacgttttaggattatagcaaaatcaaactgactgaagttaacttgataatcaattccaaaatcacaagaacattcctagtattactttttgaggattatcacatgtgttctcttgcagatgtgaaattccgcttgtggccttttgaaccagttggtgagccgtgttaaaaattgaatctgttaattataaatagtatttcagttatatcgtagttcagttgacctgagttttttgtttttttttctaaattagtaggtaaagttggaatagctacatggtttgtcttaggaactcgaaactgcaagtgagaatgatttcaaatgaaccatgttatatgtaattatgatacaattgcatactagattgaatatgcactatttatgcatatttatgtcaaactgataatctctcagtgaaacttacctttttttgctaggcactgcttttatattggcatctttaatgtgaaaacgaaattgtagtgcttagatgatcaagtttttcatcaatacacatgccattttctggtaaagtttaagttgagtggttgaatcagtttcacataaattttgacaggcaaggaaaaaagttgtaagatactgatttcttaatcagagagtttcaaattgtctaaaagtagaatagatcactttcctcagttaaggctttgcttttgaaattttttactgcaggaacaacattatggaaaggactagcatacatgtgttttgtgagcagtagttaaatgttaaatacataacacttagaacatgttggggcttaattttctggtttctgattttattggtatgtgtaatagagtatttgaaaagtttattggttttaattatgcttaaatatagatattcttgctgtaaaatttgattactgcaaaaacaaaacaattatttcactgatgttaaattgtagggggactggactgtgttcagaagttattctttaaaaattttgtttttgagacaggatctcactctgttgcccaggctagaatgcagtggcacaatcatggctcactgcaaccttgacctcctgggttcaaacgatcctcccaccttagcctccctggtagctgagactacaggtgcatgccaccatgcctggctaatttttttatatttttagtagagacagggtctcactgtgtttcccaggctggtcttgaactcctgggcttaagtkatcctcctgcctaggcctcccaaagtgttgggattacaggcatgtgccaccatgcctggcccgaaaagtttaaaaaattgttacactcttgcatgttttgttttcacctttatttacctcatctgttatcaccttgaaaaggtagtgaataactacacttctagttgcgtgtgtgttctttattgatggttgataaattattatgcatttctgtgtataaatggatttcataaaaaataatttgtgtggtctaaagattggagaggtactagtaatatttctgggcctatgcttctgggagaagggagaagtatgatcctcaagagagaagcctaaattattaaagaaaattaaaagaataaagataagttttcacaaattaaacggtagrrtttgaggggacgttttttcattttatcagaaacagagacttggaaagggttatgtttgaaaatactctgaatatctatatttgattacaggaatactgttttgcttatcaacattatattaaaagttgtattcatcctgtctttatctcagacttgtatattatagcaggcttcagactaaacaaacaagattgtgctggtaactttgcaaaaatgaagtttactacggtactcttatatgccagaaagtgatgaaatgctttgccccgagactgcaattgagcttgaaatataggatgggttttttgtctcctaattcatagatctggaataaaatttataatctataaagacatcataatcagctaaaccctgtctatcccaagcataatggtttcctcagctcttagatcaagttgtgtaagagactctatcttgggcagacatggtcttgagatagtagaggtggggagtttttctgcttctgaaacattattctggctctctataaattgttcacagcatatagaaatagaaggatttactcactaatgtggtttaacactaacccctttaaggggagtgttcctactgtccattgaaactcaaagtcaagtcagttaatggatatatcagggtatatatcaggcaattttggctctctccttgtctttgaaggagaagcttctatgctactgttctttcttcttgtcagtccccatattttatttatttaggcagctattcaaagattcttgccaccctccctttgaatccagtctgatcttttcacatatttccrtcctggtacacttctttggtaaatcgctttcgctacaaaacgcaaggcatcaaagtgtggtagaataccattctgctgccaattcaatgtgtgacctgatattagcaaactctaggctttttctatagcagaacttgaaggacagaattcttgaattgatcttagatttcttaagattttctggcttatttccatgaattctttattcaaaaaatactatgtataatgcaataggtataatttaggttcttggtgcatatatctatatctatatctacatcctagcctttgagttatttcagtataactgcaggggacaaggggtagaagagaatttcatatgtaactataatattgtgttttaagtgctttagtggagttgtgacagggtatgagagtacagttgaaagagtgatttatttttctcagagatgacatgcaaattgtgttcctaagtgtattagtaggaattaagcaggcagacaagatggggaaagccattctagatagaggaaattgaaaaagcaaacaggaatgaataggatctgtttagctaataggacagtatatcaaagatacagggtagatggtgaaggctcattagccacgaggctagagaattgggttttatctaaaatacttttaaatgaggtactgagatatcaaatttatgtattagaaaaataattctggagggattataggagctgaattagaaaacagtaacgatcgagcaatcccgctactggacatttatccatacaaaaggaaatcagtatatcaaggagacatatgcaaccccatgtttattgcagaactattcacaatagccaagatatggaatcagcctaggtatcccaacaacagatgaatgggtaaagaaaatatggtatatatacacaagcatatactattcagccataaaaaagaatgaaatcttgtcatttgtggcaacatgagtggaactggaggacattatgttaagtgaaataagccagaaatggaaagttaaacaccacaagttctcacttacatgtaggacccaaaaaagaaagttgatctcataggagtaaaaaatagaacagaggatactaaaggctggaaagggtaggaggaaggtggtggtggggagtgcatgttagggagagatttgttaaaggataaaaaattatagctagatagaaggaataagttctagtgtttcataccactgttgaatgaccatagttaccaataatatacagttttaaatagcaagaaggaggatattgaatattcccaacacaaagaaatgatacatgtttgagatgatggctatggtaattaccctggtctgatcacaatacattatatgtatcaaaacatcactatgtatcccataagtatgtaaaattattatatgtaaattaaacaaaaaatcttaaaaaggttataaaaaacagtgggtttgaggacaagtttattaagattttttaaataataatctattctgatttgcaaacacattggatgattagaactacctagagaatgtgttaagaatacattggctccatacattgagttcttaatgtcaattttgtgtgtttttaattcttgtgttcctagctggttctttttcaaatctgctgtatcactttttacagtttactgttccctgctgaaatttcaagcttggcctttatctccttgaatatagtaagtaaagctgtttcatatgtctggaaattccagcatctggaactcctataggtctgcttatatcaaatattatttctgctagtttttgctaacaggtgatatcttatctctttgtgtgcccagttacctttgcttgagtactggrtgtgaaaacatataatatttgagacatcatgtatggaagacagtttgaaggctaacatgatgtcatccttcagagatttgatgaatgtttcttgggcattatatgtgtagcttttggtccattcatgtgaggcaaaactcaagtgccaactcttttgatcatttttttaaattattaagttgtataagttagtttgtggttgttaaaccaactttgcattccaggaataaactatgatcagtcacagttattattcaccttgcatatttctggattagatctgcatatatatatttaaatatatgtatttaaatgcatatatatttaaatatatgtatttaaattcatatatatttaaatatatgtatttaaatgtaaaaactatggcagttgtaggttcatagcagatttgaggagaaagtacagagagttccatataactcctgtccccacatacacacaacctccttcactgtcagcatcctgcaccacagtggatcattttttacaaccaatgaacttacattgacacacagtcactcaaagtccatagtttacagtatcattcattcccagtgttgtacattttatggctttggacaaatgtataatgacgtgtatctaccattgtagtattacacagcatagtttcactacactaaaaattgtgctgtgtgtattcattcttccctcctccaatcccctggaaaccacagatctttttcttgtctccatagttttgccttttccagactattatgtaattggaaccagacagtacttagctgtttcaggttggtttctttcacttagtaatatacatttatatttcttccatgcctttccatggcttgatagctcatttctttttagtgctgaataatattctattgtctgggaacaccacagtttatttacccattcacctactgaaggacgtcttagttgcttccaagttttggctgttgttaataaggcttctctagacttctgcgtgcaattttttgtgtggttttatgttttcagttcattttggtaaataccaaaggaagtgattactggatcataagaatatgtttagttttgcaggaaggtagcaagatatcttccaaagtggttgtaccattgtgcatttccagcagcattgaatgagagttcctcttgtgccacattttctccagtatttggtgctgtcagtgttttgaattttggccattctcatagctgtgtggtggtgtctcattgtcttaatttgcagttccctaatgacatatgatgttgaacatctcttcacatgcttacttgccatctgtatatcttctctgatgatatacaggtcttttgctcatgttaaaatcagattgttcaatttcttattgttgagttttaagacttctttgtatattttggataacagtcctttgtcaggcatgcctttggcaaataccttctttctatggcttgtcttttcacagagcagaagttttaaatttcagtgaactccagctgatcaattatagtagtctccccttatcacagtttcactttccacagttttggttatccatggtcagctgcagtctgaaaatattaaaataaaaataaaaaataaaaatattttgtgtgcatgtatgtctgtgtgtgtgcatatgtgagtgtgtgagagaacacattcatataacttttattatagaattttgttataattgctctattttattattgttaatgtcttactgtgtctaatttataaatttataaagtttataaaacattatcatatgtgtaggaaaaaagcacatagagggttcagtatcaggcatccactggggatcttagaacatatttcccaaggataaggggggactactgtattttactttttatttttttgtagatcatgcctttagtgttgatctaaaaagtcatcaccatactcaaggccatctaaattttctgtgttatcttctaggagttatatagttttgtactttacatttaggtctgtaaaccattttgagttaatttttgtgatggatgtaaggtctgtatgtagattgatttttttttcatgtcgatgtccagttgttccagtaccatttgttgaaaagcctatctttgctccattgtattgcctttgctcctttgtcaaagatcagttgactatatttatgtgggcttatttctgggatctctgttctgttccattgatctatttgtctgttctttcaccaatgccacactgtcttgattattgtagccttctggtaagtcttgaattcgagtagtgtcaaccctctgactttgtctttcttcaatattgaattggctattctgggtcttttgtctctccatgtaactttagactcagtttatcattcccaaaataatttgctgagattttgattgggattgtgttgaatctatagatcaagttgagaaaagctgacatctaaatgacattgagtcttcttttcttttgagacagagttttgctcttgttgcccaggctggagtgcagtggcgccaccacaacctccacctcccaggttcgagcgattctcctgcctcagcctcctgagtagctgggattataggcatgtgccaccatgccgggctaattttctatttttagtagagacagggtttctccatgtttgtcaggctggtcttgaactcctgacctcaggttatccacccgcctcggcctcccaaagtgctgagattacaggcgtgagccactgcgcccggcgagtcttcttaatcataaacatggaatatctcttcatttgttttgttcttctttgttatctttcattagagttttgtacttttcctcatacggatcttgcatatgttttgttacacttatacctaagtatttcatttttatggtaatgtgttttacattttaaattttacttgttcattgctgttatattgtaagaaagtgattgacttttgtacattagccttctgtcttgtaaacttgctgttattgcttattagttccagaagtttttctgttgatttttttggactttctccatagacaatcatgtcatctgtaaacaaagacaattttatttcttctttcccaattagtgtaacttttatttcctttttctattgcattaactaggacttccagaacaatgttgagaagcagtggtgagcggggatatcctcgccttgttcctgaccttagagagacagcttctagtttctcaccattaagtatgatgttagctatgggttttttgtagatgttctttatcaagttgaggaagttcccctctattcctagtttactgagaggttttctcatgaatggtgttggatgttgtcaaatgcttttccaacatctattgatgttttatcatatgatttttgttctttagcctcttgatgcaattgattaaattaattgattttttttttttaaacattgagccagttgtgcatacctaggataaatcccacttggtcatggtatagaattctttttatacattgttggattagatttgctaatattttcttgaggaatttttgcatttmtgtttataagagatattggtctgtacgtttcttttttagtaatgcctttgtctagttttggtattagagtaatgctggcttcagataatgagtgaggaagtatttcctctccatctgtcttgtggaagagattatagataattgatacaatttcttccttaaatgtttggtagaattcatcagtgaacccatctgggtctgtgctttctgttttggaagattattaattattgattcagtttcttcttatgttagtttgggtatatttcaaggaattggttcatttcattcaggttatcaaaattatgggcatagaattgttcgtaataagccaggtgtggtggctcaggcctgtaatcccagcactttgggaggccaaggcaggtggatcacttgaggttgggagttcgagaccagcctggccgacgtggtgaaatcctgtctgcactaaaaatattagctgtactaaaaatattaattttcaaaaaaattagctggacatggtggcatgcgcctgtagtcccaactccttgggagactgaggcaggagactcgcttgaactcgggaagcagaggttccagtgagccaggatggcacctggacaacagagcttaagactccatctcaaaaaagaaaaaaaaaaagaattgttcataatacttattcattatcctttttaatgtccttgggctctgtagtgatgtctctactttcatttctgatattagtaatttgtgtcttttttgttttctcttagttatcatggcaagaggattataaattttattgatctttttaaagaactgttagcttttggttttgttgatttttctctactgacttcctgttttcaattttattgattcctgctctttatttttttctgcttactttgtaattaatttgcttgaatttttcttgtttcttaaggtggaagcttagatgattgattttagatctttcttcttttctcatgtattcattcaaagcaatacttttgcctctaatactgtatttgctgcatctcacaaattttcataagttgtattttcattttcatatagttaaaaatattttaaaattacccttaagatttcttctttgacacatgtgttatttagaagtgtgttgtttaatctccaagtatttggggatttttcagctatctatctctgtcaatttctagtttaatttaattgagatctgagagcagacattttatgatttctgttattttaaacttgttaaggtgtagtttatgacctagaatgtagtctgtattggtgaatgttccatgttagcttgagaagaatgtttcctctgctgttgttggatgcggtagtctacagatgtcaattacatccagttgactgatggtactgttgttaagctatgtccttactgattttctgactgctggatctgtccatttctgatagaggcattaaagttttccagtgtaatagtagattcatctattactccttgtagttctatccgtttttgcctcatgtatcttgaccactctgtttttagttgcatatatgataaggatttttgtgtcttcttggattactaacccctttattatgtaatgcccctctttattcctgataactttccttgctccgaagtctgctctgtctgagattactatagctactcttgttatctttgattagcattggcatggtatatctttctccatccctttttaaaaaatctatatgtgcctttatacttaaagtggggtttttaaaattttaacctaatttaatttaattttactttaagttccaggatacatgtgctgaccttgcaggtttgttacgtaggtatgcatgtgccatggttgtttgctgcacctatcaacctgtcatttatgttttaagccccacatgcattaggtatttgtcctaatgctctccctccccttgtctccccaccccctgacaggcccctgtgtgtgttgttcttctccctgtatccatgtgttctcattgttcaacttaaagtgggtttttttgtaggcaacacatggctgggtcttcttttgtaatacactttggcagtctctgtttcttcatttgtttgtttgttttgttttatttttgagacagaatcttgctctgttgcctaggctggaatgcagtggtgyaatcatagctcactgcatcctcaaactcttggcctcaaatggtcctcctgctatggcctccaaaagtgctgggattacaggcatgagccaccatgcttggcctctctgtgttttaattggtgcatttagaccattgatatttaaagtgattattgatacagttggattattatctctcatttctgttactgtttgttagttgttgcctttataatttgtttccagttttgtcttccacatcttttcagtctttagttttaattgaacatcttatatgattccattttctcccatttcttagcatatcagttatacttctttttttaaaactttttttagtggttgtcctggagtttgcagtatgtatttatagctaagccaactccactttcaggcaacactatacctgaaagtggagtttcatgtgtaatgcaaataccttataacaacaaaacattcctaattccttctgcccatcccttttattactgccattcgttttactcacatatgagcatatgcacacatgagcatacataattgaacacattattgatgttattattttgagtaaactgttgctatggtttgattgtttatcccctctaaaatttatggtgaaaggcaatycccactgtggcaatattgagagagggggcctttaagaggtgattrattctttaagaggattaatctattttataggattaatccattaatggattaatggattattggattatcataggaatgggcctagtgactttataagaagaggaaagcaagatctgagctagcatgcttagcccctcaccgcatgatgctctgcaccacctcaggattctatagagcgtccccatcagcaagagggctctcattagatgtagccccttgaccttgttcytctcatcctctgtaactgtaagaaataaattcttttgaattttaggtattctgttataagcaacagaaaatagactaagaaaactttttttctgttagatcaattaagaataagaaaaattcttgaccagcctgaccaacatggtgaaactgtgtctggaattggtgggttcttggtctcgctgagttcaagaatgaagccacggacccacgtggtgagtgttacagttcttaaagatggtgtgtccggaatttgctccttctgatgtttggatgtgtctgagtttcttccttttggtgggttcgcggtctcgctggcttcaggggtgaagctgtagascttcatggtgagtgttatagctcttaaaggtggtgcgtctggagttgttcgttccttccatctggagttgttcgtaccttccatctggagttgttcrtccctccccatgggttcatggtcttgctgccttcaggagtgaagctgcagacctttgcaktgagtgttacagctcataaaggcagcgcagacccaaagaatgagcagcagcaagatttattgcgaagagtgaaaaaacaaagcttccacagcgtggaaggggacccaagcgggttggcgttgttggctcaggtggcctgcttttatttctttatctggccccacccgcagcctactgattggtccattttacagagagctgattggtccattttacagagagctgattggtccattttgacagggtgctgattggtgcatttacaaaccttgagctagacacagagtgctgattggtgcatttacaatcctttagctagacacaaaagttcgccaagtccccactagattaactagacacagagcagtgattggtgcatttacaaaccttgaactagacacaaggtgctgattggtgcatttacaaaccctgagctagacacagggtgctgattggtgcatttacaaacctttagctagacataaaagttctccaagtccccacccgactcaagagcccagctggcttcgcctagcggatcctgtgctggggctgcgggtggagctgcccgccagtaccgcgctgtgcgcccgcattcctcagcccttggatggtagatgggaccttgcgccatggagcaggcggcggtgcccgtcggggaggctcgggccgcgcaggagcccaccaggggggttggggggagctcgggcatggcagactgcaggtcctgagccctgccccgtggggaggtggctgaggcccagcgagaatttgagtgcggcacgggcaggctggcagtgctgggggacccggcacaccctctgcagctgctggcctgggtgctaagcccctcactgcccggggccagtggcaccggccagcagctccaagtgtggggcttgccgagcccgcacccacccggaacttgcactggcccgtgagtgccgcacgcagccacggttcctgcctgcacctctcactccacacctcctggcaagtagagggagccagctctggcctcagcctgcccagagaggggctcccacagtgcagcagtgggctgaagggcttctcaagcgcagccagagcggacacagaggctgaggaggcaccgagagtgagcaagggctgccagcacgttgtcatctctcaagtccctgtctctactaaaaatacaaaaattagctgggcatggtggcacatgcctgtaatcccagctacttgggatgctgaggcaggagaatcgcttgaacctgggaggcggaagttgaggtgagctgagatcatgagatcacgccactgcactccagcgtgggtgacagaacaagattccatctcaaaaaaaagaaaaaagaaaaatatcttctttcagaagaaattcttttaacattttttgcaaggcaagtctcctggcaaacaaatgccttaataattgtcccagaaagtttttttccttcacttttgaaggataactttgtagggtacagaattctrggtttgcaattttttttctcttggcactttaaatatttcactccactctttacttgcatttctgaggataagttcatatctttgctcctataggtagcatgtttttacctctgctgcctttgaagattttttgattttattttctgaaatttgaatatgatatggctagaagtagttttttttttttttaatgtttatcctatttgatgttctctgagcttcctggatctttgatttggtrttgacattaatttgggggaaattctcagtccatattgctttagatatttcttcttccttctctctgtctctcttttcctcccctctctcttgtccgttatagttttcccagtgttcttggatattctgtactttttttcccagtcttttttctctttgcttttcagttttgaaagttctgttgtcatatcctcaagttcagagattctgtctcagccatgtccaatttactaatcagcccatcaaaggaattctttatttctgttccagtttttttaatctttagtatttctttttgattatttcttaaatttttcatctcttacattattcttgcatgttgtctactttttccattgaagcctttagtgcatagttctctttaaaacgaattctggtttgataattccaacattcctatcatatctgactctggttctaatgcttgtttaatctctttagactgtggtttttaccatttagtatgccatataagttttgctgaaaggtagatataaatgtggtgggtaaaaggaactggtaaataggactttagtaaggtagtggtaaggtgtgggaaaaggggaagcattctatagtcctatgattgggtcttaatcttttggtgaacctgtacctctgaatggtacgcttcatagtgcttctcagttttgttttttttccccctttgacaggacagaatggacagagggagctggagttgtgtatttcccttcccctagttaggttagagcaggttaggctctggtaaaaaagtttctcctgagggcagaccttgttaagaacagaatgtaaaggactatttcaaaataattacttttcctctcctgctgaaagcacaaggggatttcttccccacagtactcagtctgaggacctggtagagttcctggaaataaaactcacgaaagtgtatgcaactgggtcctcctggagttttgtttaatttttaattttttttccttttttaaatagctgcctaccccctggagttctaacactcagacttgtccacactcagcctctatcagtttgtcaattacagtttatgttttcctactgcagcactgccagaggtttcagcttctgggtttctgctctgctaagttgtgattcttctttatgtgtttgtttctgcagttttggggcagtggtttgctctgtggcttcatgtctttggtgaatctaagaataattattaatttttcagtttgcttaggtttttacttgttaggatgcagtggcaacttcttgaactcctggcctcaaaagatcctcccaccttgacccccacaaaatgttgggattataggcgtgagccaccacacctgtcctggaatggcaatttctaagctgtgtacaggctggagtggaaatccagaagtcagtttgctaatactatgttagggatttttgcttctatattcatgagggatgtcagtctataattttcttttaatgcttttgtcagattctggtattgggataatacaatcatcatttagtaagttgaggattgtttctattttctgaaattatttgtgtagaattggtgttatttcttccttgaatgtttgacagaatttaccagtgaaataatttaagccaaggtttctcaacctcagcacttttgacattttaggtcatgtaaatattacatagtacatatttacatgacctaaatgtaaatattgtgaggggctttcctgtgaaatacaggatatttagtagtacccctggcctctaggaattccagtagtaatcccctttcacttctcattgtgacaactgaaatgtcttagacattgtcagatgtccttaagggggcaaagtcaaccccagttgagaattactgatctaagtgaagtgtggaagttttttgttgttgagcatatttttagttataaatttaatgtttttcttgacatcagcctgggcttttcaagttttctgtttcttcttgagtcagttttggtaacatgtctttcaacagagttttatatgtcatctatattgttggatttattgcaattaaattcatattttcttatctttttaatgtctgctaggtatgtgatagaaatgtggatagtgatgatctctcttgcattcctgattttggcaatttttatcttctctttttcattcatcagttttactaggagtttatcaattttattatgttttaaaagaaacaccttttgtttcactgattttcacttcttgttttttgtgtgttctgttcattgatttctgttctttattatttactatccacttgctttggatgtattttgctttttttctagttttctaaggtggatcattcattttagaccttttatctttttaatgtattttaagctacaaattttcctctaactgtgctttagctgcattccataaatttcagtgttttcattttcaatcaatgaaagatacttttccttttcttttgttactgcctttacttatgattatgtagaggtatgttattttacttttaaaatatcttgggattttacggatatgttttcataaatgattaatatggatggtcagtgtctcagtccattttccgttgcttataacagaatattggaaactgagtgatttataaaraaagggaatttatttcttacagttacagaggatgaaaagtccaaggtcgaggggcttcatctggtaagagtcctcttactggttggaactctgcagagtcccagggcaatgcagggcgtcatgtggcaagggagctgaacatatgagctcaggtctcttttccttttcttataaagctaccagtcccactctcatgataatatgttaatccatgaacagattaatccawtcatgagggcagagccctcctgaccaaattacctcttaaaggctcccccacccctgcccagtactatcacactggggattaaatttcaacaccagttttggaagggacaaatagacaaatattcaaaccataacagtcagacaatatatgttatgcaattttagtttttttcaatttattgagacttgtttatgccccaaatataggggcattactgaacgttccttgtgtactttagagcagtgtgtattttgcagatgttgaatgaaatattctgtaaatatcagtttaggtcatgttagatggtagtgttaaattttttatattttttaaattttctgctttttctaccactaactgagagaagagtgataaaatctccaccataatgtacttggttatttctcctttcatttctgtcaattattgtttcctgttttttgaagctttgttttgaagttgtcttggtgaattggtccctgtgtcatcaatgatatgtcctttttgctttggtaagatttccttttatgaagtttttatctgactttattagccactagagcttgtttccagttaatattttgcagacatttctgttttcatccttttattcttgtatctacctttatatttaaagtgggtttcttataaatagcatatagttgggtcttgcttttgtatacaatctgataccctctattttttaaatggcatgtcatttactgtcattattgatatgatcagatttaaatttaccatcttgctatttcttttcaaattatttcttctggtctttcactttttttttctcctgccctcttttgggttgaatgagtatttttgtcactgcactttatcaccactattagcttattagctttacctttgttttacttttttggtggttgctgttgaccaacagttttcaaacatcttagtctcatgatacctttggattcttttttctttttttgagacaaagtctggctctattgcccaggctggagtgcagtggtgcagtcttggctcactgcaacctctgcctcctgggctcaagccatcctcccacctcagcttccagagtagctaggactacaggcacataccaccatgtgtggctaattttaaaattttttttatagagacggggtccctttggattcttaattaataaagacctcaaagggtttttgtttatgggattatcagttattactatacccccagttaaaactgaagtgttcaagtattaatcatttaaatatcacaagaataaagctattatatgttaacaaaaacaacatatttgtgaaaaatgactattaaaaaacaagtagtggggagagtggcattgttttacatttttgcagatctctttaatgtatggcataaatgaaggctggattctcatatctactcttgcacttagttttttgctttatattgttttagtaaatttaagtacatgaagaaaatctcacagttatgtatgtagtaaagagaagaacgttttaatagtcttttcagataattgtgggcattcttctctgatgccactccaaaattcatcaagtggttgtttcttaaaggtaagttatagtgtggaatctgaaaccatataattctgttatagaaaaatgcattggtctttcttgcactttgcatggatatgtgtatttatgcatggttttataatatcatgcattggtcatttggaaagtactggtgcaccagatacgtagatcttccaaatgttacagcattgcattataaaatatcaaaaaacgacagtattatcaccactgatctcacaaaaatctaactctgggaagctgttaaatatatggtggcataggcccgggcgcagtggcccacgcctgtaatcctagcactttgggaggatgaggcaggtggatcacgaggtcaagagactgagctcatcctggctaacatggtgaaaagccatctctactaaaaatacaaaaattagctgagcatggtggcacgtgcctgtagtctcagctactcgggaggctgaggcaggagaatcgcttgaacctgggaggtggaggttacagtgagccaagatcatgccactgcactccagcctgggcgacagagcaagactcttgcctaaaaaaaaaaatatatatatatatawgtgtgtgtgtgtgtgtgtgtgtgtgtacatatatacgtatacgtatacatacatacatacatacgtatacatacatacatatgtatacatacatacgtatacgcatacatacatacatatacgcatacatacatatacgcatacatacacatatacgtatacgcatacatatatacgtacatgcatacatacatatatacacatacatgtatgtatatacatayatacgcatatatacatatatacgtatatatgcgtatatatgtatatacgcrtatgtatgtatatacatgtatgtgtatatatacacatatatatgaagtttttatctgactttattagccactagagcttgtttgcagttaatattttgcagacatttctgttttcatccttttattcttgtatctgtctttatatttaaagtgggtttcttataaatagcatatagttgggtcttagttttgtaagaaccttacatgtaagaaccttacgacagtgtactgctgtttacctcctttctaacttttgtgctgtaaactccttatttacatttgccagtatatttctgtattaaatgaccaaatattctctaaaactttaagaaatgagaaaactgtcttttttatttgtccatatttattatttttggtgtattttctttgtgtatattcatgttttcatgtgatacatactttctgcctgaataatttccttgaaattatattgctgtctattgacaacatatatatatgtatatatgtatatacatacacacatatatatagtggcatttacaagttcacagcattttaattcttactgaaaggctggattttattattagcaacacttactttcaattgctttccttaaaatcactggcacacttcatccttttttgtttgttttaataagctttttattttggaataactttagatttacagaataactttagattttggaataactttattattgtgatactgaaaaaacaatacagagaattcataaatacctctcattcagtttcttctaatgttagcatctattaccctgtacatttgtcaaaactcagaaaattgactttggtagattactattaattaaactccagacttcacttggatttcaccaatttttctattaaagtcctatttctctttcagtgtctaatccggaatatcacattatattttgctatcacaattccttagtctctatggcctttgacagtttgtcatctttcctttttttaatgaacttgacacttttgaagagtactggtctattattttctagaatggtcttcaatttaggtttctctcatgatttccttatgacttgagtgggtttatggttttctgggagaaatatcatggagataaagggcccgctttgtctaatttttagaaaatgactgccactgcagtttgcagtcagtttttcttttaaataaaaatagtgttcttgaaaaagacatttgttcagtttagaactcaaataattgcacaagtgcttttcctttgcacaagtgtgtagtcgagtttttttttgtttttgtttttgttttttaagacagagtttcgctgttgttgcccaggctggagtgcggtggcgctatctcagctcactgcaacctttgcctcctgggttcaagcgattctcctgcctcagcctcccgagtagctgggattacaggcatgcaccaccacgcccggctaatttttgtatttttagtagagatggagtttctccatttggtcaggctggtctcgaacttccgacctcaggtgagccgcccgccttggcctcccaaagtgctgggattacaggcatgagccactgtgcccggccctgtacttttccttttgtcacgcagaatgttaagatgtttactcatatataaatatttaatacaattaataatttttactgttttgtcatagacatacttaaatgaatctggccactccmcctcttttttttaaaccttcaatgcatgtcctgaataatacagtcatcacagtgctattgctttgatttgtgatagggcactgacagtttttgtttttgagacagggtctctattgcccaggttggggtgcagcagtgagctcatagctccccactctcatgcgcgtacaaccatacttggctaatgtttttattttttgtagagacaatgtctcactatattgtccaggctacctacagttttattcagcattgctgagcaccattagtacaaatgtcaatgcagtgacaaactattaacactcttaggaatatagctctgactttgcagaccccatgaaagcatgtcctgaacacttaggtcttctaattacacatcgagaaactgcaacactagggcttttatgatatttaatttatcatggtctaccttcaaataactttatagcacttgagtataatggaagaaccttacaacagtgtactgctgttacctcctttctaacttttgtgctgtaaactgcttatttacatttaccagtatatttctgtattaaatgaccaaatattctctaactttaagaaatgagaaaactgtctttttgtctatatttattatttttggtgctttttatctctttgtgtatattcatgttttcatgtgatacatactttctgcctgaataatgtccttgaaattatattgctggtctactgacaacaaattctcttagctattgcttgtctgaaaataattttattttgctttcacttatgaaagatatttcctctggtataggattctaagttaatagatgttccctctccatttttttttccttcagcagtttaaagatttttctattgtcttttgactggaataattttaggggaaaagtcttgtaattgttttcacattcagtcttttcaatataagtgctttttttctggctgcttttaaaatattcttcttaccattatattttagcaaataattatgatgtcttttggtgtggttttatctgtattctgcttagaatttattgaacttcttgggtctgtgggtgtagtttgacaacatttcagccattattgtcttaaatattgttctccctcgtaccaacactccaattacacataatttaggctgcttcatagtgttccctaaagctctgcttatatttcttcaatttttttccctttctttgcttaattttggatagtttctgttgctctgttctcaagttgattgataacagtgctacagttgttaatatgcaagatctgacgtgaatattttactgggtgacattaatcacagattaaacattgcagaagaaagtaagttcattgataatttcttagttatgggataaattagctccaaagaaaaaattacgttagatgtgaactaaaaaagtttataaataagccataaaggagtcaaactgatgcacaagaagcttaacttctggacagaacaaaatcaagtattattcagccctcagccgtctaaaattcacaatgtcttacatccaacaaagagaccttttgggtttttcctgaatgttttgtgtattcccagtgatgactttttattctggtggtgataatgtgaataattctcacccctgggtaagctctgggaagtgttttgcttgtagctcctcaggttattgttcttttcccaaaagttcttctttgcccagctttgtagggttttattgtacacgtgtagatcagtattcagctgaagaytcaagaatactgctatgctggtttctggagttttttccttttttttttttttttttttgagatggagtctcattctgtcactcacgctggagtgcagtggggtgatctcggctcactgcaaccctctgcctcctgggttcaagtgattctcctgcctcaacctcccaagtacctgggactacaagcacatgccaccatgcccagctaatttttgtatttttcatagagacagagtttcagcatgctggccaggctggtctcgaactcctgaccttaagtaatccacccacctcagcttcccaaagtgatgggattacaggtgtgagccactgtgcaggacctggagttctttcttgatggggcactttcttttctactactgtatccccaaaattctagccctttggcctgtccaaactaacagccaagcttcctttggggtcccccttcctgccctgatgttcagtattgcctccaggcataacagttgagtgatcctcaggctcatcttgtttgttccccctttgtcagggactgcagagattgtttgcagcaagaaagttggtgtgagttacccagttcaccaagtgggagtctactctatgtctctgaagaatttttggtttttttgccaatttgtatatacctaacttttaggaatgtagatgaaaatcagtacttacttaaatttctcattacgtcttcaaatcacgtggaggaggggagaactgagagaacagtagagaaatggagttgctgattgatgtttatgctgtgaacctcttggtcaaacagaatccaaagttaactgattgtatggaatattcagttttaagagctcataaatttgcctaaacctgtttgagttgggttttctgttatatataatcaaaaacatcttaataaatagcatataatcttatgatgaattttgaaagtactagtgttaatatttgattattattattatttttgagagaaggtctcactctgtcacccaggctggagtgcagtggaatgattatgacccactgcagcctccacaacctggctcaagtgatctcccacctcagcctcccaagtagctgaggactagaggcgcatgccaccatacttggctaattttgtattttttgtagagacaggatttcaccatgttgcccaggctggtcttgaactcctaggcacaagtgatctgccagcctcggcttcccaaagtgctgggattataggcgtgaacctctgtgcccagccgtattatttctaatacaatttgtaattcttttttttttttttttttttacttttttttttaatccaggagtgctgctatataatttgtaattctgattgcattaggatggcatgtttaatttattcagcaaatatttaagttattttgatatggaaatctgtgctattttctgataaagatgagctcatacaatgttttaaagcttttttattattattactctagaaatttacagcacttttatgacaaggatgtatgtggaaagtgctagaatacaacttcttatgtgaatgatgtttgagtgacgattctgtacaaaacttattcctaggttgggtgcagtggctcatgcctgcagtcccagcactttgggaggctgaggtgggtggatcatctgaggtcaggggttcgaggccagcctggccagcatggtgaaaccctgtctctatgaaaaatacaaaaattagccgggcatggtggcacatgcctgtaatctcagctactcaggaggccaaggcaggagaatggcttgaaccctggaggtggaggttgcagagagctgagattgtgccactgcactccagcctgggcaatagagtgagactctgtatctccaaaaaaaaaaaaaaaaagctcattcctctcgtagatacataaattatattctagctgcttcattttgagttgctttatatattaaatgtatacttagttcacgttttataaaggacagctttcatcaaacttggctttatccaaactttcagtggtttcccattttgttcatgattaagtccaaatattttagccagtgaaaggccctgtaatttaacccacacctttctaatcttatttctcatcatttttcctattcagtgagattaatgtgtttccctgatccatgcctttgtttgctcctgctgacttgttcttttaattctttctgcctatcagtacccatcatttttgctccagttccgatcccacctcttagtaagatctttgtccatcatccaccatggccatgagtgatctctcataagatatactttattttttgttgtttacaaagccaatcaacactggtttcataaggtgaaccaaaagcccttcatttctagtctcactctccggaggagaacctcttaatacttccttgataattttatgcatatttaaatatgtattagcttatttggttattactaactttggccacaatattggagaacacaattctataggcttaattatatttaactttgatttttcttttggcaagaatatttcaagaatggtagtgtatacttcatattgcatcatacaagaaatattctgtctgggggtctccttttgtgatatttaagtggattggggattcaggcattgtcagtctgatctaccccgatgagcctttcactgaatgattttatgaatctcattcttttaaattttcatcagccaggcacagtggcccatacccataatcctgacactttgggagacagggcgagaggattgcttgagcccaggagttcaagaacagccttggcaaccctaaggagatcccatctctacaaaaaaaaatttttttatgtcatacatagctactttactgcctgttaatatagcaagataatagattgttaaaaggcaggctatggagccaaactgcctgctggtaatgaccttcagcaaatgagtatacatctttgtgcctcagtttttctccactgggagggctctaacagtgcatggttacacagtgtcagtcaatgttagttgttattaatatattggtttgaaagtttgattttgctgtctatgtgcttggcctttgtttgcatggaaaatgttttattggataatattcatggtattctgtttggcagtgaaaccaggttaccttgtaggaaaataaaacaccatttaaattataacaaatttattatttttctataatttttagtaagaaaaacatgagcagaaaagggatttattacattggagtttgtaatgaagaaaagaaacattgagcatgattatatattctagatattaggaaagaaaattggaaaagacaaaaagaaatgagtgacattattgtttttgattatgaacggctgtatggttctttgagatgacagttaataaacataagtgcacacaatcctaaataatttgatagaggagaagtttctaaaaacccaatgtggtgatgcaagggagctctcagataagcagagcatagatatagtagatggaagggaagatgcagaactaaagatgaatatgaaactttataaacagtggctggaaccacaaggtaagctgaagtttgtaagaccaaataagttgttttttaaaagtaatatctcaattaaggttaagcttcaagaagataatcaaggccgggcacggtggctcacgcctgtaatcctagcactttgggagtttcaggtgggcgggtcacaagttcaggagtttgaaaccagcctgaccaacatggagaaaccctgtctctactaaaaatacaaaaaaaaaaaaatagccagccgtggtggctgatgcctgtaatcccagctactcgggaggctgaggtgggagaatcgcttgaacccgggaggcggaggttgcagtgagccgagaccatgccactgcactccagcctgggcaacaagagcataactccatctcaaaaaaaaaaaagaagaaaaagaaaaaaaaaagattatcaaatttttaagaggtatggaactatcaggtctcattttatgattgcccaattgagtaaggagaaataggctttgagttggaaaagatgtaacaatagtattaaaagaattacaggcaattgtagttaagcaactaaaaagtgaaatatctgaccactttaagtgcattttattttcttcatataaatcagtgtcttctatagccaccagtggacttgcatagttcgtgaaatcattgagtaatatttgagaatgtaatgaaaaatataactagtgcctggagatgatcagatgctagcttgattttttagaaaggaaaaaatgtgggtactgaagcttgcaagctggtaaatttggtattgatctttggcaaatttctataaataaatttcagaagtttgggaacatttatgaaagaatacttgaatggataaatttaaatgtgtttaccatatattaaattaatttattttaattagaattatcaggttggatgaattagaagaatactatagtaagtttcttaattttagtgaaatgtttgacagtctgtggctatatttttgaataagatgtgttagcaaactgttgtttaaatttagagtaagtagatctatttgtaatactagattgaaatccaaaactatcatttcattagaggttgaatgtcacccttgagagggatcttcagagcaatacagtggcattatctatatcttgtctcaacattttaatcactgatctaactgaaagtttaggaagtaggcttatctagttgtagattattcaaagatggcctggatagctgatatcatagaaggcaattaagaatgtcttcctaaaactttaattaatctagtgtacttctgtctttccttctcttacattttgatactttgtatgtaatatatatttatagtttaggttgcttcaggaaaacaaaaaaaaaacaactttttttatgttttgtttttagtagaggtgaggtgttgacccttgcccaggctggtcttgaattcgtgagctcaagtaatcctgccacctcggcctcccaagtgctggaattataggcatgagccactgctcccagctcccctccacctccaaaaaaaaaacttttattttttgtctgcttgatatttttaccaaattattttttgaattgtatgtatccctcattatagcataatatttttaatgatacagatttaatagtacaaactatgttggagcagtttctgcataaggtatgttttaatttactctaggaatatgaagcacgaacggggaggacctgtaaaccaccacctcagtcttcaagacgcaagaattttgaatttgagccgctttctaccactgccttgattcttgaggatcgaccatcgtaagtattttagtgataatcagtgacattgtttatattttaaagttaaatttaattttgttcactattttaaaagatagcgagaaagatattgagaaaggatttaatttttacaaaatttaatccctgttgtctatcctaaaactatttggggagaatatatttttcttgggtttttggtttgtttagagacaggrtcttgctatgttgcccaggctgttctcaaactcaagtgatcctcctgcctcagtctccccttccaggattgtaggcatgcactgctggccctagtagagagtatattgttgttgtctaagacttacgcatattttctagaggtctctgtgagttaatatacgaaacataataaagtattggctctttatgtctgtttctatttcaactctctgctcctccatcttaacatgatagggcagttattcttcctttcttgacatttagtatgtatttaagatgtgcttgtctttgccttttgtactatgtaactacttaggtaacaaaagttttattaaggaagtaagagtacactcccaagagaggagtgagctgacctggctgggagcctactattattattaagaatacatttcttatttatttatgtttgtttgttttgttttatttatttttaattttttatttttgagacagagttttgctcagtcacccaggctggagtgtaatggtgcgatctcagctcactacagcttccacttcctgggttcaaaccattctcttggcacagcctcctgagtagctgggattacagacatgcaccaacatacctggctaattttttgtgtgcatttttagtagagacagggtttcgccatgttggccaggctggtcttgaattcttgacctcaagtggtccacccatctcagcctcccaaagtgctgggattacaggtgttagccaccatgcccagcctaagagtacattcttaatgctcagcaaaacatcttaaattgttcttttcctgctgtacatcagaacattgtctgatttattattaaacaaaacacatcctaaagcaagaccacttggttcttagctctttttctcctccttgggttctctggatcaattctttttttttactaggattgtctctctgtccctctctttctttttaatttaatttaatttgtagaggcagagtyttgctctgacatccaggctggagtgcagtggcacaatcatagcttactgcagcctcgaactcctggcctcagacaatcctgccacttcagcctcctgagtagccaggactacacgcgcacaccaccgcacctggctaaagaattctttctctctctctctttttttttttaaatgtaaaacttcctagcctttcttgccattttcctgatctggacctttttctacccattttcctgatgagcataataaaatagtctggagccaaatagaagagcatagaatattttttggacattgcaagagaaaaaaagctggacttattaagtacattattcttttattctggttacattccctcatactaaagaattgtggtcccaatgctcctcttttaggatttgatgaatatgtttataattgtcttttcattgtttaaaaaaagcgttttagaaacttagttatgasaacatgtgaaattttatttcagacttgctgccagggatgaaaatgaaccaggccaattcaaagattcctttcttggtggagacatttataggaaaacaagagtggttagataaacaagaaaagaataacttgttaaagatctttagactttgcagctgtcagctgagtacgtagataagttcccagaagagcttgcttaagcttgatagaatttatccgaaatggattatgctttttaccgggaatgttaatttcttcccagaaagcgtttatgaaaatatcactcaaaaagttctattctagacggtgttggggacaaatctttctttacaccatactctatttcatatcatatctgcctctttaggttctacctccatgcctttgctcatgttattcccctctcttggaaggcttttatcttatttctacttcttacttactcaatccttaaggattaggctttatcttttctatcaagtctttggtgatttcttcagccttccgttgtatctacttctcttgtacctttcttgttacacacaaacaattccttgaaataatgttcaatggaattgtcttgaaataacatggtaggtacaataacattatgaaaagaactcagtgtacaaaaatatataaacagctgaaaaaagtacttttattttcactcttttgaactatctatagttatattaattataatatatgttatagcttttattctgtttctgtgtgtttgctcctttgtagtatagagactgaatttggtctctagtgttccacccaacactgagatgctgtggttaattaacaattttgttcacctttttaaatttgaaggggcctttttggtggggggacgttatttgtatgacttacatttatgtaactaaaacaaaccaacaaagtgtcttcatggtattggagtatgagggtgtttaatcacttatttcttcttctacttcaaccaattgaaaaatagataatggagaacagaagagaatgaaaccttcaattttattgagtataaaaccagctgaggggaagaaaactgtacatgggaatacctgggtacaacctgagtactaaagtggaactttgtactttatctccctcagaatactcttctagcagacttgggccagctaacatctatctagttatagcccaagaagctagaacagaggtctgagtaatcttaggtttcttctgtttatggatgcaggcagattcaagaggcctgttctgcttttgtgtcttatctactggtaatgccactacttcgactatgaggtggcatctggaagaagatagaaattattctacagcagggttccccaaaccccaggccccagattgattctggttaggaactgggctgcacagcaggaggtgagcagtggggtctagaccatgtgggaggtctagatgtgggatgtgaggttgtgcagagaagaggtctatttagatctgcaaatttcaccttgttaaatagaagactagatctcctaaactgtgcccagcaaatcatttgccatgacttgtagaaaagaaacagaggagctaggcatggtggctcacatctataatcccaggactttgggaggctgaagcaggaggatcgcttgaggccaggagttcaagaccagcctgtgcaaaatagtgagaccctgtctctaccaaaaataagccagggtgtggtggcacatacctgtagtcctagcctacttgggaggatttcttgagcccaggagtttgaggttacagtgagctctgattgtgccactgcactccagcctgggtgacagagtgaaaccctgtctcagaaaaaataaaataagatgacagagattgcaaatgcaaaagggattaagcttcacaccagcagcatttcatcttatgtgaagagaaggatcaggcctatttggtggaagccagtaggtggttagaaatcttaaaggcgggatttgtagttaaactggaaatgtaggccaggcgtggtggctcagtcctgtaatcccagcactttgggaggcagaggcaggggcagaccatgaggtcaaaagattgagaccatcctggccagcatgatgaaaccccatccctactaaaatatgaaaattagctggscatggtggtgtgcacctgtagtcccagctgctatttggggagtctcttatgtgtagctgaatgtaattgcttaatcatataccaataaatcaatgatggtgctctaaaggtcaagagccatcacaaactccaaccacatttaaaatccatggagtttagtcctcacatccagatccattgaatcttacaattcctagtattgcctacacatactaactaccttaaatcttgcaaatcgattctgtccaaagctgctttctacctatgtcatagcacctgctcaggaggctgaggcaggagaatcgcttgaacrcggaaggtggaggttgcagtgagcggagattgtgcactgcactccagtctggtgacaaagcgagactctgtctcaaaaaaaaaaagtggaaatgtgatttcaattaagctgtttctccaatgataaaatgaaaatttctaaaggtaaatgaaatacagctatcaatcaattttctgtatcttaagggctcagagtccagtcagaaaaacaaatcaatgtagtaatttcaaacagaggaactttaatagaggaattcattgcaaggttgttaaaaggactagaaaagcaaaagaagggaatacaggttcaaaagattaataattccagaaaggtgtgtattgctctgggatgtagaagcaaaagaaaaaaataatattacccagagtacaatatcactctttacctgaaaactatatttagcttctattttttcctgtggtcttatcttctttacagtaaataaagttttttttaagtattaacataatgaaaagggatattgtaattattttatatggaactatatggaatccatcattgcttttatcttcacaattctttgtaattctaggaagtactttttctgaaatttaggaacagttaaatccattattcttttgcagaaatccagagaggcaagcagaatagcttgtaaaaggaaataagagagacttaaggctaggattttggagttaatagttggtgctatgacataggtagaaagcagctttggacagaatcgatttgcaagatttaaggtagttagtatgtgtaggcaatactaggaattataagattcaatggatctggatgtgaggactaaactccatggattttaaatgtggttggagtttgtgatggctcttgacctttagagcaccatcattgatttattggtatatgattaagcaattacattcagctacacataagagactccccaaatagtagcctaaatatgcaagaatttaagtatgtaagtagcccaaattaagtagttcagtgctagtatggtggctccatgcatcaaagacaagggttgatatctttcaccatattgagaaaaaacttcattttcatgctgaccttatgctaaccgcagaacgggcttggggacccactgggcccacagtaagaaagacttgagctaaaactccactaatcgcctgacctctacatacctctactttgactcgggactatggtaacattttgggtctcttgcaattagtgtcagatcagagccgatatccagtagtccctgaacgatctgattgttttcttttacctaatgaatagttaccctggtaaaaggctgtaagcccctttggggaaggctgggagaaagattaatagtataaatttttggtggtgtactggagtcctctcaaggggacccatcatcttcctcattcaaaggattctgggtctgtaaactggctcaagtctggggagtgattgaggggccattagtcttcatgattcagggtagacttttgttctcttgacctagcacttttctgcttatatagatcaagtaagaatgtagtaggcttctttttttcacttctaagaacaccatatcaactagccaacacaataggtgtgtgcaagtcatactattctgattgcggctttgactctgctgttcattatggtaattctgctcgccttgctttaatgattgagtgctgccacttggtccctgccaccccaggattcaattattccctttgcatttaggtttcccagttcagtgactgcagttcaagaccagcctgggcaacacagcaaaaccttgtctctacaaaaaaaatatatatatatgtttatatatatatataaaattagccaggtgtggtggcacactactgtattcccagctacttgggaggctgaggtgggaggattgcttgagtctgagaggcagaggttgtagtgagccatgatcacgccactgcactccagcctgggcaacagagccagaccttgtctcaaaaaaaaaaaaagacttgaaagtcaaaattacttcttgatccacaggttgcagaatgaatgttgtgatggcaggcatgaaaacaacattcatctttttgtacatctccatcagagctctttggtaactaggtgcatcgttaataagcagtgttgctttgaaaggaatcttttttttttttttttttgtgagcagtgggactcatcaatagtcttaaaatattcatttaaccgtgctgtaaacatgtcctgtcatccaggctttattgagcacaggtagagtagatttagaatgattcttaagggccctaggattttcagaatggtccatgagcattggcttcaacttaaagtcactagttacattggcccctaagaagagagtcagcctgtcctttgaagcaggcattgacttctgtcttgcttagaaaatactagatggcatctttttccagtagaaggctgttttgtctacattgaaaatctgttgtttagagtagccaccttcatgagtgatcttagtgtatcttctggataacttgctgcagcttccccatcagcacttgctgcttcatcttttacttctatgtgtataaacagcttttttccttaaacttcattaactaatctctgctagattccagcttttcttctgtaacttcttcacttctcacccttcatagaattgaagagagttagggccttgctatggagtggactttggcttatgcaaatgttatggctggtttggtcttttatctagaccactcacactttctcagcaataaggctgttttgctttcttatcatttatgtgttcattgattagcacttttaatttccttcaagaactttaccattacattctccacttgcctaactggctgaagaggccaagttttggcctatcttggcttttttttttwaatttcatttttattctgtgtgggtacgtagtagataaatatatttatgggataaatgagatactttgatacaggcatgcaagtgcataataatcacatcatcgtaaatgaggtgtccatccccttgagcatttattctttgtgtaataaacaatccaattataatcttttagttatttttattttctcgtttttctttttgttttccaaattttatgttaggttccagggtacatctgaaggtttattacataggtaaactcatgtcatgggggtttgttgtacagattattttatcacccaggaattaagcccagtatccaatcgttaccttttctgctcctctccctcctcccaccctccacccttaaagtagaccccagtgtccgttgttccttctttgtgttcagaagttctcatcatttagctctcacttgtgagtgagaacatgtggtatttggttttctgttcctgcattagtttgtggaagataatagcctctggctccatcaatggttcccgcttttgttcccgcaaaggacatgatcttgttcttttttatggctacagggttatttttaaatgtacaattacattattattgactatagtcaccctgttgtactatcaaatactaggtcttattcattctgggtttttttttttgagacggagttttgctcttattgcccaggctggggtataatgacgcgatcatggcttactgcgatctctgcctcccaggttcaagcaattctcctgcctcagcctcccgagtagctgggattataggcatgcaccaccatgtctggctgattttgtatttttagtagagatgggatttttccatgttggtcaggctggttgtgaactcccgacctcaggtgatccgcccgcctcagcctcccaaagtgctaggattacaggcatgagccacggtgcctggcccattctttctattttttaaaatctattaaccatccccactttctccctgccccactactgtccttcccagccttaggtaaccatgtttctactctctatctctgtgatttcaattgttttactttttagctctacaaataagtgagaacatgtgatatttttctgtgcctggctatttacttaacatcatgatttccatttccatccatattgttgcaaatgacaggctctcattcctttttgtggatgaataatactccattgtctatatgaaccacatattcttcttcttttttttttttttttttgagtcagagtctcactgtgtcttccaggctggagtacagtggcacgatcttggctcactgcagcctccacctcccttgaaccacattttctttacccactcatctgttgatggacacaggttgcttccaaatcttggctactgtgaatagtgcagcaataaacatgggagtgcagatatttctttgatgttctgattgcctttcttttgggtatatacctagcagtgggattgctggatcatatggtagctctatttttagtttttttaggaacctccaaactgttcaccatagtggttgtactaatttccattaccaccaacagtgtacaacagttcccttttccccatgtcctcttcagcatttgatattgcctgtctgtttgataaaagtcattttaactaggttgagatgatatttcattgtaattttgatttgcatttctctgatcagtgatgttgagcacctttgaatatggctgtttgccatttgtatgtcttcttttgagaaatgtctattcaaatattttacctatttttaaattggattattagctttatccctgtggatatataagcttgagctccttatatattctagttattatattaatcccttgtcagacaggtagtttgcacatattttctcccattctgtttattggttttgtttttgtttttttttgtttgtttgtttgtcttgctgtgcaaaacatttttaacttgatgtgatctcatttgttcatttatgctatggttgcctgtgcttgtgaggtattaatcaagaaatctttgcccagtccagtgtcctggagagtttccccagtgttttcttctggtagtttcatagtttgagatcttacagttaagtctttaatgtattttgatttgatttttgtacgtggtgagagataggggtctagttttattcttctgcacatgataatccaaatttcccagtatcatttattgaagagactgttttttctcaaatgtgtattcttggcacctttgtcaaaaatgacagattatcagtagatatatggatttgtttctgggttctctgttctgttccattggtttatgtgtctatttttatcccagtaccatgctgttttggttactgtagctctgtagtataatttgaagtcagataatgtgatttatccagttttgttttttgtttcttttgttttttttttttttgaggtggagtttcgctcttgttgctcaggctggaatgcagtggcatgatctccggctcaccgcaacctccacctcctgggttcaagcgattctcctgcctcagcctcccagcagctgggattacaggccaccacacccagctaattttgtatttttagtagagacggggtttctccatgttggtcagggtggtcttgaactcccagcctcaggtgatccacccacctcagcctcccaaagtgctgggattacaggcgtgagccaccacgcctggccagttttgttctttttgctcaaaatagctttggctattcttggacttttttggttgcatataaattttaggattgttttttctatttctgtgaagaatatcattggtattttgatagggtttgcattgaatgtgtagattgcttagggtattatggacattttaacaatgttgattcttccaatccatgaacatggaatatttttccattttttggtgtcctcttcaatttcttttatcagtgtttttacagttgttattgttttaagtaaaagaagaccttttacttctttggttaattcctaggtatttaattttatttgtggctattataaatgggattacttttttattttttagattgttcagtgttggcatgtagaaatgttactgatttttgtctgttgattttttatcctgcaactttactgaatttgtttatcatttttaatagttttttggcagagtctttggacttttgcaaatataagattatctcatctgcaaggataatttgatttcttcctttacaatttggataccctttatttccttctcttgtctgattgctctagctaggacttgcagtactatgttgaataacagtggtgaaaatctgcagccttgttttgttcagattttagaagaaacgcttcagttttttcccattaaatatgatactgcaagtctgttgtatatggcttttattattttgaggtatgttccttctgtccccagtgttttagggcttttattatgaagggatgttgagttttatcaaatgttttctcagtgtcagttgaaattatatggtttttgtctttctgttgaggtgatgtatcacactgattgatttgcatacattgaaatatacttacattccagggataaggctcacttggtcatgatgaattatcttttcaatgtattgttgaattcagtttgctagtattttgttgaggatttttgcatccatgtttctcagggatattggcctgtagttttccttttttttttttttttttagtgtgtctttgtmttgtttgagtatcaaggtaatactggcctcatacaatgagttcataagaattccctcctctattttttgcagtaatttgagtaggattgttgtcagttcaattcttctttaaatgtttggtagaattcagcagtgaagtcatcaggtcttgggcttttctttactggtagacttttaattacaactctgtaattaaatgttttgttccattgtgacttgctattggtctgttcaggttttgtatttcttcatggttcaatcttggtaggttgtatgtgtctaggaatttatccattttctctagattttccaatttatcggcacacagttgctcatagcaaccacaaacgatcctttgaatttgtgtggtatcagttataatgtctcctttttcatctctgattttacttatttgagtcttctttttttcttagtctggctaaaggtttctcaattttgtttttcttttcaaaaaaaccaactttttgttttgttgatcttttgtattgttttctttcaatttcatttatttgtgctctttttcttttttcttcttcttcttyttttttttttttttttttgttattgttgaacatggtctcactttgtcacccaggctggagtacattggcatgaatatgacttactgcagccttgacctcctaggcttaggccatcttcccacctcagcctcctgagtagctgggactaaaggcacatgccaccatgcccagctaatttttgggtttcttttctttcactaattttggatttggtttgctctagcttttttagttccttaagatgcatttttaggttgcttatttgaagtttttcttcttttttgatgtaggcacctatagctataaatttcccttttagtgttgcttttgctgtatctcgtaggttttggtatgttttatttccattaacatttgtttcaaaatatttttaaatttccttcctaattccttcattgacccactggtcattcaggaggatattgtttaatttgcatgtgtttgtatagtttacaaaattcctcttgttattgatttctagttttattccattgtgattggagaagatgcttgatattatctcatttttttgaatgttttaagacttggtttgtttttaactaaggaagcaacatgtggtctatccttgaaaatgatccatgtgctgaggagaagaatgcatattcagccattggatgaagtattttgttaatattctattaggtctgtttgttctatagagcaaattaagtccaatgtttctttgttgattttctatctggaagatatgctgagtgctgagagtggtgtgttgaagtctctattatcgtattgaggtgcatctttctctttagctctaataatatttgctttatatacatgggtgctccagtgttgggtgcatatagatttacaattgttatatcctcttgctgaattgacccctttatcattatataatgaccttctttgtctctttttacagtttttgtcttgaagtctattatgtctgacataaatatagcgactctttctcctttttggtgtccattggcatggaatatctttttctctacctttcttttcagtctatatatgtctttataggtgaagggtgtttcttggaggcatcatatcattgggtcttttttttttttttttaaatctattcagttactgtatcttttttgattggagagtttagtccatttacattcagtgttattggtaagtaagaacttactcttgccattttgttatttgttttctgtttgttatgtggtcttctcttctttcgttccttccagtctttcttttagtgaaagtgattttttttttggtggtatgatttaatttcttgctttttattttgtgttgtcatattttttttatttgaggttaccatgtggcttgcaaatactaccttataacccattattttaaactgatgacaacattgattgcataagcaaacaaactagcaaaaagaaaactaataaaaactttacacttcaacctcatcctcctgcttttttgttgtttcacttttttaaaaaaactttttgttgtttcttttttttaacttctgttgtttctctyttttttttttttttttttgagacaaggtcttgctctgtcaccccagctggagtgcagtggtacagtcatcgctgactgtggcctctatctcctgcgatcagttgatccacccacctcagactcccgagtagctgggactacaggtgcatgccaccatacccagctggttttttttttgtttttttagtaaggatgaagtcttgctgtgttgcccaggctgatcttgaactcttgggcatgagcaattctgccatggcctcccaaagtgctgggattatagatgggagccaccataatggctgacttgttgttagtctttatgtcttattttactgcctatgtcttgaaaagctgtttcaggtattattttttattggttcatcktttaatctttctacttaagagtaggctgggcacagtggcttacgactgtaatcccagcactttggaaggctgaggcaggtgaatcacttgaggtcaggagttccaggctagcctggccaacatggtgaaaccctgtccctactaaaacaatacaaaaattagccgggtatggtggcacgtgcctgtaatctcagctacttgggagactgaggcaggagaatcgcttcaacatgggaggcggaggctgcagtgagctgagattgcaccactgggtattgctgtttgttattcagggcccaaggggtcttttttttttttttttttttttgagatgcagtcttgcactgtagcccaggctggagtgcagtggtgcgatcttggctcactgcaacctccgcctcctgggttcaagcaattctcctgcctcagcctcccgagtagctgggcttacaggcacatgccaccacacccggctaattttttgtatttttggtagagatggggttttaccatgttggccaggctggtcttgaactcctgacctcaagtgatttgcccgcttccaccttccaaagtgctgggattacaggtgtgagctaccggtccggcctccaaggggtctttagtcagcatgtgatgaatcctgccagggctggattctttctttcaaggcagcaggttcacttctattctagggtgtctctagaaatgtcatccaggagctaggacctgagatgggggcctcaccactgcctggtgccctatcctactgtggctgagctggtatctaagatgcaakacaaagtcctctttacccttctttctcctctcctcaagtggaagaagaaaggagttactttagttgctgcaagcttcactacctgggattgagaggggagtggcgtaagcactcccccaaatgtcctgtctggtgtctcactgtgtcatctactgccccagtccaccggctctaagcccagcatagcatcaggacctgcctaagaattgcagtccttgtgtcctagactgtctttcaagttcacttaggatcccagagcactttaacctgtgattgcgaggcttgccgaaactcaagtttcagctgctgggatgggcgcttcccctctggctagtgctgttcaaaatgctccctccatgggcaggtgctggctgagttcagcatgattttgctttccatgtgctagggcagcattaagttcaatgcaaagttcctcagtcactgtgttgttcctcccctgagtgcatgggttctgtctcctagccaagaagccactgccaggggttgggggaggggtggtgttggcaatttaagactgtctttcctaccctctgcaatgcctctttcagcgatatgaagttaaaactaggtactgtgattgctcacctgatttgtggttctcatgaaggtgcttatttgtgtgcagatagttaaaatttggtgttcctgcagggtggacaactggtgcaggcttctattctgccatctttcttcacccccctatcttggcttttggcatgccttcctcattaagcttactcatttatttctggcttttgattttaaattgagagatatgggactcttcttttcacttagatgtcattgtagagttattaattggcctaatttcaatgttgtatcccaagaaatagggatgcctgaagagatagagagagatgggaatggtcagtctgtggagcagtaagacacacatgtttgccttggcacacaaatttgccatcttatattagcactgtgtgtggtgtcccaaaacaatgagaatagtaacaacaaaaatcacctatcacagatcaccataacagatacaatgataatgaaatagtttgaaatattgcaagaattggctgggtgcggtggctcacccctgtaatcccagaactttgggaggccggggcaggcagatcacctgaggtcaggagtttgagaccagcctgactaacatggtgaaactccatctctactaaaattaccaaaaaatgtagccaggcatgatggcaggcatctgtaaccccagttacttaagaggctgacgcaggagaattgcttgaaaccaactgggaggtggaggttacaatgagccaagattgcgcctttgcactccagcctaggtgacaagagtgaaactctgtttcaaaagaaaaaaaaaaagaaatattgcaagaattactgtaatgtgatacagagacacacaatgagcacattgttagaaaaatggcacccatagacttgcttgacattagggttgctacaaaccttcaatatgtaaaaaatgcaatatttgcaaaatgtaataaagcaaatcacagtatagtaaggtatgcctatagtatatttataacagctattttatcatccttgtgttataatcctattatctgtgacatttttatattgtgactgttgattaatttttcttctcattatgcattatatttttctgcttcacatctctgtttttattgaatgtcagacattgtggtttacataggtggatgctggacttttttgtgtgttcttttagatactttttggctttagtctggtttgcagttttttggaaatggtttgatctttttgacctaatctttgttggagtggttccagaatagcttttagtttaggagtaatttgtcctcactactgaggcattattcttctaagcactctacctagtactcttatctatcaggaggcctttccactctggctggtcttgtgtgaactttaagaatgtcctattttttttttctctggtggttctttctctggcygtagttaatcacacacatgcacagatcagtactcagccaaaaccttgagaggactctctgcakctcccttcttttctggttttctggtttgtaacttttagctgtcttggactctccaactctaaactttctcctcaccttaggattgatggaccactgagacctggaaatgtcaggtacttgtagggttaccttgcttatttcttttctcttaaagatcactttcttgtgctgcccagtgtctgttgtctggaaactatagtttaatatattttgtccattttctaatgatttaaggggaaagggtaaacctggtttcttttattccattatggcctgaagcagaggtcttaacttttattcctccctcctacaacctaccagatcaactgactaatttgagaagaggaggtagaatttataatttgaaaatttgtcacatacctttttccacactagcctgttgaaaagaaaagactgactcctaaaactggacactattatgattatatttggataagtgataatataccagtgtatttctttttgcattttttatatctaaatcactgactctgtgaagccattgatttgataaaccaaaatacggtgtagtagttaccccttattggcggttttgcttaaggcaatttcagttacctgtactcagctgtggtttgaaaacattaagtggaaaattccagaaataacttttaatttttaaattgcgtgccattctgagtagcatgatgaaatctcactgtcctgctccatcctgctagggacrtgagttcagtttatctgcactatatacactacccatctggtagttcagttagtaaccttcttggttgtcagatcgactgttggtgataccacagcgcctgtgttcaaagaacccttattttattagtaatgcccccaaagcttaagagtagtggtgctgacaattcagatatgccaaagagaagctgtaaagttcctcctttaagcaaaaaggtgaaagttctcaaattaataagaaaaaaaaatcatatgctgaagttgctaagatctgtggtaagaatcagtttcctatccatgaaattgtgaagaatgaaaaagaaatttatgctagtgttactgttgcaccttaaattgcaaaagttactaccatagagcacggtgttcagttatgattgaaaagacattaaatttatgggtggaagatatgaacaaaaatgtgttccaattgatggcaacatattgtgctgggttaacttaatctcaattaaattaaactttatcrtagttatgtatgtataggaaaaaacctggtatatatagggtttgttactgtctgaggtttcaggcatccactggaggtcttggaacataactcctaaggataaggggggactactatgtatgcaaatgatggatgatccagttttttagttaaaatgttgtcttaaaactctaattagtggaaagcagtttgacagtttattgtaaaggtatatccacacttactatataacccaagacttttgtttaactaagggaaatgaaagcaaatgtctacacaaaaacttgatgttaatttttacagtagttttattaataatggcctcaatctggaaacaatccaagtgtccacccacatggataaatggaatactactcagcaattaaaaggaatacattactaatacaacaacatgaatgattttcaaaactgtgctgagcaaaagaagccagacattagtccttcaatgtaaattaaaacaaaaaaagccagacacaagagtctataaaattcttgaagaggaaacaaattaatctgtagtgatagaaatcaaagaaagaattttgtgaggggtaccacaaggaaacttagtggaatgatgggaatgttctatatcttgattggttagttagctgcacaggtatatacatttgtcaagactcatcaaactattcttaaaatatgtttattcattttattatatgaaaattatatctgaaaaaagttgactaaagaaaactctagtaagtgagtttaacaaataacctaaaaatattgactgaaatctgaaatggactgggctcagtggctcacacctgtaatcccagcactttgggaggctgagtcaggaggattgcttcaacccaggagtttgagactagcctgagcaacatagtgagaccccatctctatttttttaatctgaaatgtttaaatatataccaacttatatacacatgacatagaactacacacacacacacacaccacacatattaacaacctggattctgattctgttctaaaatgcacagttcttttcagcctttcacttccttaatgtatgaaatgaggttagtttagaaattctttgcatctgggtgtaaaaacaaataagttagtaagttgaaagttaatcttttaaaaattgtcttgacttaagtaatttttttttccagaaatcttcctgccaaatctgtggaagaagctttacgtcaccgacaagaatacgatgagatggtggctgaggctaaaaaacgaggtataaaatttaactccaaatggtataattttctgattttaataagaagatggatggtaaaattcatcaagtctgtcttcaagatgatactgaattcttttttttatttcttttttcgtttcttttttgagtcttgctctgttgcccagcctggtatgcagtgatgcagtcacagctcactgtagcctgaccttccaggctcaagcagtccttttacctctcagcctcccaagtagctgggaccacaggcacgtgccaccatgcttggctagttttttgtattgtttgtagagatgaggttttaccatgttgcccatgcttttatttttctctactatttttataattaagtttgttctaaaggaggaataaaatgacataccaggatcatagtttttctgcatgtacttttacagaataggaggaatcttgaaattacagtcataaaacttggacttctactatcttagtttataaataaagataataattcatgaatctattaatgaatttcactttttaccatttttatattttataattaatttctaattattttataatttaataattttaactttctatatggctgtgagaatatgatttgaaactcaaaatttttttgtgacttacagagtctctctagaggcccaattgtgtcatttggttaggtgcataaaagtatactcttgtgtgtataaatttacgtattcattcattctcttttccaaccaaaaaaataatatcaggataatttaatggtgtttatttcctgacagttgttatttcaggataaacatacatttttagaagatattacacagctgtatacatttttagacttaacatctaacaccttattaacaactgatattttttcctttgacttaagttaatggacygttataatagtatacagttctgctttatggtgctattttggaattgaagttacttctttaatgttaagtaaacataggatatataaggctagttatattgttctagaaggtatttaaacattagttgagtgtattttactatacagaattcgaaatatttytgacatatccaattaagtatttatctatttattacttatttttatttttttgagacagggtcttgctctgtcacccaggctagagtgcagtgatgcgaacttggctcactgcagcctcaatctcccaggctcaggagatcctctcacctcagcctcccaagtagctgggaccataggcgtgcaccaccacgcccagttaatttttgtatttttttgtggagacaggtttcgccatataggccaggctagtcttaaactcctgacctcaagtgatccacccacctcggcctcccaaagtgctgggatttcaggtgtgagccaccacatccagcctaagtttttattttttattatgtatttatttattttagagacggggtcgcacttgttacctaggccagagtgcagtggtacaattatagctcactgcagcctcgaattcctgggctcaagcaatcctcctgcctcagcttccctggtagctgggattgcaggtgcatgccaccacacccagctcttttttttttttttgagacaaaatctcactctgtcacccaggctggagtgcagtggcgcaatctcggctcactgtgacctccgctgcctgggttcaagtgattctcctacctcagcctccagagtggcggggattataggtgcccgccaccaggcccagctaatttttgtatttttaatggagacggggttttgccatgttggccaggctggtctcgaactcttgacctcaagtgatccacctgccttggccacccaaagtgctggaattacaggcgtgagccaccatgcccagccccagctcattttttagaagttattttgtagagatgatgtatctctatgttgcccaggctggtctcaaactcctggcctcaagcaattctcccacctgggcctcccaagagcgttgagattataggcatgaaccactgtgcctggctccagttaagtttttattaattttaaaatttttactatatgattactatgtaagataactattggtactggatgatcttaaaagcatggtatgatagggataatattgaactgaggaatcagaaggccacagctttaaccttgtttgatactaccttggtgtgatactctgaacaggcctgatgttagttttctcatgcgtaacatgtgagaggcaggtcagcttaatcagggctttgaagcttctctttcatcattttttttttkttgttggtaaagcagtggaacattctcccaagaaatcttatatagaatatgaatacataaaacaaataaaagaaagtagagattgtcggccagatgcggtagctcacgcctataaccccagcactttgggaggctaaggcaggcagatcgtgaggtcaggtgtttgagaccagcctggccagcatggtgaatctctgtctctactaaaaatacaaaaaattagctgggcatggtggtgtgaccctgtaatgccagctactggagaggctgaggcaggagaattgcttgatcccgggaggtagaggttgcagtgagcagagatcgcaccactgcactgcagcctgggcaacagagcgagactctgtttcaaaaaaagaagaaagaaagtagagattgtttacttggccttctgcttgcccctcaagatggtctgaggcatatctgaaaaaacaatttgaaaacagtttggctagctggtctctgacatcctcactggttctaaaattacataaagttttgatttatgactcactttcgtctgtatttgagacatctcttcttctgaaattgtcacctttgattttcagagagatattttcttcctctaacttttgcctcagaatctaagagatgtactgttaatatatgtgttttgggggacattttaaaatttcaaactagtaaagtgaaacaccatattaaaaagagttaatatactaataatgctactgacaaaatcattttggaatgtcatgtgagttatgtcagaaaatttataaacccttgtaggaaaaatgggtattggttagttgcccacagttgtttgttttttatatagttaattcataagaaatttgacttcatagatttagtgtaaatagaaatatgtgataaagtaatctacttaaattatttttctgaccttttattccacttacttttatagtagaacaggagatgttattttaaaattatgttaataactgggcatggtggcacacatgtgtagtccaagctgttcaggaagttgagatatgaggatttatttaagtccaggagttcaaggccacctgagcaacgtggcgagacccatctctaaaaaaagagaaaacaaagaatagaaaattatgttaatcaagttcatttactttcactttttccctccctttctttccctgtccctccctcccttatttccttccttcctcttatgataatattctttttgagaaagtctattttgtagagtttaggtaaatggagaaaaggattttgatctagcttatttgtattgaaataatttttactcgtttaaaacagaaattaaggaagcacataaaagaaaaagaatcatgaaagaacgatttaagcaggaagaaaatattgcaagtgcaatggtaatttggatcaatgaaatactgcccaattgggaagtaatgtaagtaagcagacttttcctaaattcccatttgtctccgaagatctcatgtttctttttttttttttaatttattattattatactttaagttttagggtacatgtgcacaatgtgcmggttagttacatatgtatacatgtgccatgctggtgcgctgagatctcatgtttctgattctgtatttttattatttccagcatatattttatgctttggctaaattatactattaattaatgcctgaaaatttccatatttgcatctgtgcctttgcttttgtaaatccctcagtgtctaccacctacttcccttactgaccatcctctgtgtctgctaaatcttttttttttttttttttttttgagacggagtctcgctctgtcacccaggctggagtgcagtggcgtggtctccgctcactgcaagctccgcctcccgggttcacaccattctctggcctcagcctcccgagtagctgggactacaggcgcctgccaccgcgcctggctaattttttttttttttgtatttttagtggagatggggtttcaccgtggtgtctgctaaatcttacctatcctttgggacccaactgaaatgctaattgatttatgaaacttttaatgtctttggttactgtgttttctttttttttttttttttctgagacggagtctcgctctgttgcccaggctagagtgcagtggcacaatctcggctcactgcaagctccgcctcccgggttcatgccattctcccacctcagcctcccgagtagctgggactacaggcactcgccaccatgccctgctaattttttgtatttttagtagagacggggtttcaccattcacaggatggtctcgatctcctgaccttgtgatctgcctgcctcggcctccccaagtgctgagattacaggcgtgagccaccgtgcccggcctagttactgtattttcttaatgctaacataccatcaattgtaagacgcactattgatgtaatagcagttatttggaaagagaatattaaatatataaatgtattagaagatgcacttattgttaaaatgatttttaaagtgtttatctcataatcaaggaaatatgtatgatctttcccttatgtaaatgtcccatcatcatactttgagactaatatacttatcttgcctttgcatttatttattcatttttaagttattttgccagcatctttttaatgataaataataattgtatatatttatatggtacagggtgatttgtttttttgtttttgtttttgttttgttttgagacagagtctccctctgtcacccaggctggagtgcagtggcgcgatctcagctcactgcaacctctacctcctggattcagacgattcttatgccttagtctccctagtagcagggactacaggcatctgccaccatacccggctaattgttttgtatatttagtagaaacagggcttcaccatattggccaggctagtctcaaactcctggcctcaagtgatcagcctgccttgacttcccaaagtgctggaattataggtgtgagccactgcaccctaccgtgatgtgttttttgagggtttttttttttcaagrcgaggtctcactctgttgcccaggctgsggtgtagtggcgagatcaaggctcaccgcaaccccgacctccctgggctcaggtgatcctcctgcctcagcctcctgagtagctgggactacaggtatgtgctaacacgtccagctaagttttgtatttttttatagatatggggtctcactgtgttgcccaggctggtctcgaacttttgggttcaagcaatctgcctgccttggcctctcaaagtgctaggattacaggtgtgagccacctgcctggtgcaatgtgwtgttttggtatatgtttacattatggaatgattaaatcaagctaattaacacatccatcagctcacgtatttctcagtattttgtggtaaaacatttaaaatctgctcatttagcaattttgaaacatacagttcattattatttattatagtcaccattctatgtaataggtcactaacacttatttcttstaacggaagtttgtaccctttgatcaacatctcacctttctccattcactttactccccgctccccggccataaccaccattctaccccctacttttatgagattgacttttttggattccacatataagtgaggttatgtgttgatttttctgtgcctggtttatttcacgtggcacaatatcctacaggttcatctgtgttgttgcaaatgacagaatttctttcttattgcctttttacataacattttaaaatatgccttatcttccctctcgactggagggttggggatatcttctgcaatgcctactgtagtttgtacattgggaatttgttgaatattggcacagtgtgacatattatctgaggcactttacataagtaattgcatttgagtcttagaacttttataagrtgtatgtatttttactcccatttatcttataaggaaactcaaggtcagagaggttaagtgatttgcccaaggttatacatttaattaatggttaaactagattggatctcagatctatctgactttaaagccgacagttttttttagcagactttactgcttctcaaaaactagggccttcccactgtagattcttggttgttttgtttttggtgctgaattggtgatacatttttatgtcccttttatcctgttttttaaataattgactgcatatttctgattctctcattgacatttataaaacgcagttccctttagattactgttgcccctttgggatcctatacatcttgtaggctgttgttgcctgcaagcatgaacgcaaagaaaagaatgcattacatacttaattctctatagtcctaaaaatgatttgatcacttggccatagactaaagataatccatcatgcaactagtatttttggtataaaaagtaactttctccttttttctcctcctttaattctaggcgtagtacaagaagagttcgagaattgtggtggcagggattgccycctagtgtccgtgggaaagtttggagtctagctgtaggaaatgaactaaatatcactcctggtttgtattctacgttcagttattcccacatgtacaaatagccatctacagagttacatagcagattagtagagtgaccattaaaataaatggcctttatcatatataatgtcattttaaaagcatgcttcatccccctgttatgaagcaggttattaaacctgttatgatttaataagttattacattttatataaagatttatggttttccctttagttcacaactatcaataatcttcttggcattcaaatatcaaaaacttctgggattctacttggcagtggataatawgtatatacaagaaaaaagaaaatagtcaattatgaaaaggcttcacttttatacagaaaacataaatactggaggaaggctaaaagtttcttttcctccttctttacctaaaccagtcattttgggattttttttttaatttgaaaagtttaggccgggcgcagtggctcatgcctgtaatcccagcactttgggaggccaaggcaagtggatcacctgaagtcaggagttcaagaccagcccagccaacatagcgaaaccctgtctctagtaaaaatacaaaaattagctgggcatggtgacacatgcctgtaatcccagctacttgggaggctgaggtggaagaatcacttgaacccaggaggcagaggctgcagtgagccgagatcgcgcctgtgcactccagcctgggcaaaagagcgagactctatctcaaatgaatgaatgaataaatgaatgaatgaatgaatgaatgaataaataaataaataaawaaaataattttaaagtttataacttgattagctgcataaagaaaaaactttagccgggcatggtggctcatgcgtgtaatcccagcactttgggaggccaaggcaggtggattgcctgagctcaggatttcgagaccagcctgggcaacacggtgaaaccccttctctactaaaatacgaaaaattagtcagacgtggcagcgtgtgctgggaggctgaggcaggagaattgcttgaacccgggaggcagaggttgcggtgagctgagatcaagccactgcactccagcctgggctacagagcgagactctgtctcaaaaaaagaamaaaaaaacctttaaagaacagaagaagaaataagactttcaaagagttatattattttcttaagtttcttaaactttggtggataggagcaaaatgtagagtagtttttttgtttttgtttttgagatggagtctcgctctgttgctgtgctggagtgcagtggcgcagtctcggctcactgtaacctccgcctcccgggttcaagcgatcctcctgcctcagcctcctgagtagctgggactacaggtgtgtaccaccacgcctggctaattttttgtatttttagtagagatggggttttgccatgctggccaggctggtctcaaactcctggcctcaagtgatccacttgcctcagcctcccaaagtgctgggattacaggtgtaagccaccgtgcctggcttgcagagtagttttgatgagtttttaaaaaattaagctggacatggtggctcatgcctgtagtcctagctacttgggaggtttagatgggaggattgcttgagcccaggagtttaaggttacagtgagctatgattgtgccgcagcactccaaacagggctacagagcacgactctgtctctaaattaataaataaataatttggccaggcgcggtggctcacgcctgtaatcccagcactttgggaggccaacgcgggtggatcaactgaggtcgggaatttgagaccagtctgaccaacatggagaaaccccgtctctactaaaaatacaaaattagctgggcgtggtggcgcatgtctgtaatcccagctactcgggaggctgaggcaggagaatcgcttgaacccaggaggcgaaggttgcagtgagccgagattgcgtcattgcactccagcctgggcaacaagagcgaaactccatctcaaaaataaaatagaataaataaataaataaatttttaaaattagataaaattagaataatatcaaatagaggaaagtaaaatagtttataggccaggcatggtggctcatgtctgtaatcccagcacttcaggaggctgaggcggataggtctcttgagcccaggagtttgggaccagcctgggcaacatagcgagaccccgtctctacaaaaaaaatctcaaaattagccaggcagcccgcatgtggtcacaccactcgagagggtgaggtgggaggatcgcttgagctcaggaggtgcaatgagctgtgattgtgccactgcactccagcctgggcgacagagtgagaccctgtctctaaataaataaatagttaataataaaatgtgctaaattggtctaaatgataatgttaatgctagacaatggcaccacataaagacttaaggactttaatactagaaataatatattgtcactgttacttctaaaatttttctttttatatttattggaaaaagttaaagtaatgagaaggtacaagtgtctgctcttccacctgaactgctattcttgatcctactgtaaacactgttagcaatttggtgtatattctttctggtcttttttctatgtacataaagtgtgcatctacatatgatcaattttaaagcttttcttttttattttttcacccacaatttatgccataaggttattctgtggctttctttcttcacactataatctatcttgaacatcttccatgttagtacatacaagtctgtctcatatgtactacagctacattgtattccacaatttggctgtactataatttatttaactgttttccttgagatagccaaatcaaagacatatattttttcctgccattctataaaaaagacatatatgttaacatccaagtactgtttttcatccctcaaaagagattaaaatgaatgagaattacccatacgaggatgactgaaaatcattcataaatatttaccaaaggtctcaaacaaataacctttgactgtttatttcagttctaagaatttactctgaggaaatagccaggattggatgcaaaagcttttctacaaaaatgttcattgcagcaatcagcattatatataattggacagaattataacaaaaattaaatgtttaccctttgtctgaaaagcaatgccaactttggatattatgattatgtatgattttaaaatttgattttcacaagtctcctgtaataaacatattattttatttatttatttatttttatgtatttatttttgagatggagtcttgctctgtcgctgaggctggagtgcagtggtgctctctcagctcactgcagcccctgcctcctgggttcaagcagttgtccctgcctcagcctcccaagtagctgagattacaggggcctgccaccacactgactaatttttgtatttttagtagagatggggttttgccatgttggccaggctggtctcgaactcttgacctccagtgataggcccacctcggcctcccaaagtgctgggcttacaggcatgagccactgtgcccagccaacatgttattttcaaagaacttaaaaacttttagaatagaatttaaaggaagaattaagtttttatttaacttagaaaaagttagattttatatgacttaactgttctctccaaatatacacagagattacttttgctttctgagtttggaacagattgaatgtttttaaattatagtcagaactttcagttagattttctaaataataagaatttttgaacatactgtaattgtttaaagtcttaagaatcaattttgcaaacaggtaatgaggtattgatggttatatgaagttatgtttgcaatttttattgataactggctttagaatctgatttatcttgataacttagacattaaaatattggttaaattggtgttaacgttttgtgatactataatcaaaaggttcgtttttagcttgaaatttatagttttgtaacataactgagtcatttatttccaacataattttcgattttcttcactaaacatttatgtattcaagaatggaatgtgtgtttattctctccttttttattagtgcggaaaagatgctaaaattggattgaattacatttatttttgttaatcttgtttacttttgaatggctttagtaatttgacttgttttagtcatgaaatttataatcattagagaatagtagctaagagtaagggctctaaagtcagtcaaatatggttcaaatcttggttccaccataatatattaggtttgtgaccttgggcatattacttaacatctagaaatcttagtttttcttcacctgtaaaataggggtaagaatatgaaaggagtgttctaacagttatttgtgataatataaaacaatagtgaaagtgcattttgctgagagtatggataatatcataattgtcacaaaatcagaaagcaaaatatacactgaaatcaaagtattctctgttcaagtccaaagtatcatctttaagcctgcttcaaactctccctttgcagattcaaagcaaagtaagtgtgacatgaggacctaagcatcaaagtgaactgagatgcaggtcttcttaactgtgaatcttactggagagatgtcctttgatgttttgaaatcattaccacatttttattattagatcaattttatgacttataaaactgatgggtttgtctggtgagcccccttttttttagatagttttaaaatttgggtataatattgaagctgactgtcttagaaccagtttgaattttttaaaaaaacttacaattttatacctaataacccccaaataattatatgtataaattttaaccttatattcatctcttctatgaaatcactgatggagccaggcataaataataggaattttgcctggtgtggtggcttacgcctgtaatcctagcactttgggaggccgaggcaggtggatcacatgaggccaggagttcaagaccagcctggccaacatggtgaaaccatgactctactgaaaatacaaaaaattaactggatgtgttggtgcatgccagtaatcccagctactcagaaggctgagaattgcttgaacccgggagggggaggttgcaatgagctgaggtcacaccactgcattccagtctgggcaacagagaaagaccctgtctcaaaaaataagaagaagaagaataggaattctaagtttttttttttaatttcttctttccaaaccattagtaatgatgaaaagtaaatagaagggagaaaagattagaatagtaagagtctgtttgaaatatatctactcagatatttgataatgatatgcttcttggcaatataagaatactcgttatggtatagtcattactttggaaaattatgcagttgtttaaaagaaacaaaagcaaatctatatctactaacgtggaacaacctctaatataacaaagtaagatacagaccagtgcatgaaacatgttgccactttaatttttttaaaaaggattatatatttatgtatatgcttgtgcatgcatattttcattcttggaagaattagagctctgataaccacacttgcatctgaggaaaggaaatttatttttctctctacactattttgtactttttgaaattttttttttttttaaacggagtctcgctttgttgcccagactggagtgcagtggtgcgatctctgctcacagcaacctctgcctcccgggctcaagtgattctcctgcctcagcctcccaagtatctgggattacaggcatgcaccaccatgcccagctaaattttttgtatttttagtagagacaaggtttcaccatgttggccagactggtctcaaactcctgacctcaggtgatccacccgcctcggcctcccaaagtgctgggattacaggcatgagccaccatgcccggcctactttttgaaattttttaaaaccatgttcttgtattacctttaaaaatgaataaaattttaaaaagaattaattgaagcaaaaaacttattttggacaatatataaactttggtgtttgggcaagacgtattttttctattcttctgtccctgaaatgtcctatttttatgtagtttcaaatatctgcaatagttagttacaaaataaagaccaaaaaaatttgggaattgagaaaacttttgaaatctttcctgtcctgaagtttttatgagaccctgcatatgggagtgccgtgactaggcacttaaattaaaaagataggggtagagattttgtttgttggtgacacacaccaagtctgtgtgaaatataagtagctttagatagcaatatcataatggagaaaccagtttcagtagtgatagaaagcaagatcgagcatctgttgaagtgctatgaggtgccaggagctttacatatattatttaatcatcagtaaccctatgagtaggtgttgtttttctctggtttacaggtaaagaaagctgagttccagggtagctaaataactttcttgaagtccctcagatagtaaatggcagagccagaatttgaatctaggtctgattgactccaaaaatcatttttttctgctgttccacaatgatacttcttagcagaagcatctctttctgcctcatatgtacattctgtatggatgattactctgcagtaattttatttactttctttctgagtatataatgaatagttttggtagaatcaagtacttagatttgccacttttttgatgcttgctacatcagagagacctgacctgtaataggtaaagagtaaaaattaaaatttgcaaatatatttctttcctattattcatacatttttgttctccccccaacccccagaactttatgaaatcttcctctcaagagcaaaagaacggtggaaaagtttcagtgaaacaagttcagagaatgatacagaaggtgtgatttctttttttaaataagaattttaggatgaaaattcagatactgagcatgtatcagaagctgtagtaatcgctttacatatatcatcttatttaatcttaaccctttcagtaaacaaggctagaaaaaagacttgatttacagaaaagttcatgtaagtatcatcctaagacctcttagctatgtcagctatttgtggagaactaaaagtatgtaaaaggtaaagaagtttatactggcagacagcagctatttcatcatttttgactcatttttatgaagcattgaaattatgagaattaaaattataagtattcacttctgaaatattttttcaataataaatggtgaggctgggcggatggctcacacctgtaatcctggcactttggggggccaaggcaggtggatcacctgaggtcaggagtttgaaaccagcctggacaacatggcgaaaccccatctctactaaaaaaacaaaaattagccgggcgtggtggcaggtgcatgcaatcccagctacttgggaggctgaggcagggagaatgtcttgaacctgggaggcagaggttacagtgagctgagatcacgccattgcactccagcctgggtaacagacttcatctccaaagaaaaagaataaatggtgaaaattgcactttagtagaaattaattgaatgtaatgaagagttctagtcagaagcagtgtctacataaattactgttttcttatttcctggatatgtataatttgcatgtgtcatttaactttttggtcattgtctttttaaatattgcttctgccctttcttgcctgttttccttctggactccaattacatgtatagtagaccatttaacagtgtttcacaagcctcttatactctctcttttttttttctttttttggtgggggatagatataattttatataattgaaaaaaattttaattcatcatatagggatggggtctctctatgtttccctggctagtctcaaactcctggcctcaagcaatcctgccttggccttccaaagtgctgggattgcaggcatgaaccactgtgcctggccaattctttttctctctctctctctctctctttctctgcttcagtttcattgatttttattgatccgtcatcaaattcactaatcctttcttctggtttatctagtctgctattaaatctaaatctgtgtaatgggcttttaatttcagatgtgctttgtaattgtagaatgttcacttggttctttttatacattctgtttctctgttgaaattcatcttcccatcccatgttccttccgccatcttttcctcttattttctttttaaaatttattattatttttttctctagcgcatatcagccagatattttctttaacatatttataacagatagtgtcattgcctgttaattccaatactgcatcatctgcaggtctgcctctgtcggctgtttttccccttgtttcccctttaaagtggttgtaagtcacattttctgcttctttgtatatcttaaatgtttaaattgtatgccagacattgtatataaaaagaatgtagaaaccaaagctgaggtttcccctgcagagtaagctgctctttcctgttaggcagttcgattaagggcttatcacctcaattcaaccattaattgatctaggttggggcaaggttgtaggtttagatagacttagtttatcttgagtttcaaatttcttgatgggaaaaagtgtttttttttttttttttttgagatgctcaccctgtcgcccaggctggagtgcagtggcaagatcttggctcactgcaatctctgcctcccaggttcaagcaattctcctgcctcagtcccctgagtagctgggattacaggtgcgctccaccatgcccggctaatttttagtagagacagggtttcaccgtgttggtcaggctggtctcgaactcctgacctcaggtgatccacccatcttggcctcccaaagtgctaggattacaggcatgagccaccacacccggaccaaagtgttctattttgactacaggtaatctccctccaatgatatgccctctcaagaccttgtgactttggatgattttattctgcatttctagcccagccttctgcattcagaaaagtcccatagggaaaaccagatacacattcagggctcctccagattcttgtctatcacatcaattttatttggccatgtgtagctcttctggtttctcttcctccaactagggtgactttgtcttcggcgagctcgatcctaagcccatacctagacctggcagatacccctaggaagaaaaatggacactggtgtctactcaccaaggaaagactcttacttttctggaatttaaatcctattgatctctctgtgtccatagctctctgatgattttttaaatgtgatatttgtaaatttttttcctagttgttaccatggaaatgatggtctgcccatatcttctgtaaaaactggaattagaaatcctttaccatataactttctgataaatgtatagctattttctttgtacaagagaataacaagttctaacaaaagctatgtgacatttcttataatttcttgattattcagcttttaacttaaataacacatgctgtgtgatcattctgtatttataaaattggacttgttagagccaagtgatcatttaaattgtatctgcttggtaaatgcaggtgtatctgttgctgatcgagaggccagtctggaattaattaagttggacatatcccgtacatttccatctctctacatctttcagaaggtgagggtttctaaccagcttgtaattacttaaaaaaaatctatcaatatccaaggcaacagattctttaaatgaatagctattactttaaaaaaggcaaaactatagaaattggggaccctgtataaaaagtgtaaaactagttataaaattataaaggaatttctattattttattccactgaccgaaatacattatagttagcatagcatttaataccttttatgtagtaggcacttgatgaattttattacagtgaatttattttgctttttattttgtaagatatatgaattcttaatattttggcctagtaaattgttaaagtataaagaacttttcacaaaacttaaaaattttcagaattatcattaaaataggaagaaatggttttctttgtacataggctattatgaagttgcttataccttatgaaaagagaaatgactacattatatatactttatctttgactcatgtctttatttttatttctttttaaatttgagatcaggtcttgctgtgttgcccaggctggactcaaactcctaggctcaagcaatcctcctgcatcagcctcctgcatagctgggattatgggattacaggcatgtgccaccacacccagctgattcaagtctttatacatggaattcttctatctttagattgataaaaataaaatgagataaaaatttttaccattaagattraaattattaacacagtttagtttagcttgatggttttttttctgctgatggtgtattacataaaatgaaacagtgtgtattcatcatacccttataccaaatctagaagattttaaaactgttgacaaattatatagcttgtatccatcaagtaagtttatttggctttttgttgttgttgttatttagtagtaaatatttctttttttttttttttttttttgagagattctcactctgttgcccaggctggagtgcagtggcacagtcctggctcagtgcaaccactgcctcctgagttcaagcgattcttgtgcctcagccacccgagtagctggaattacaggcgtatgacaccatgcccagctaatttttgtatttgtagtagagatggggtttcaccatgttagccaagctggtctcaaactcctggcctcaaatgacctgcccatctcgacctcctaaagtgctgggattataggcatgagccaccgcacccatctgcagtattaaatatttattattcataatttggaaaacatcttggcagagtacatttataatattttttattaaatatgctaaaactagtcatttaggaaatgctacagtttattaacatgttatatgaaaattaacttagagamaattatttgtacagtttcaaatttcatttttctctcctaagggtggtccatatcatgatgtcttgcatagtattttaggggcatacacatgctacaggcctgatgttggttatgtaagtatttgtttccatctgttttttgaatataagcattttatctacactctttatcaaaatatcctatgttgtattagctcccaaatgtctgtatttctatgtctgtttttcttaggcttatcaatttacccagtgaagaatctttctatctcttgccaagagcttatatgtacttgaggctgccagctttctgggggagctgcgggagatttcaccatgcaatttataaacttttatctcatgccctgatatcagtgtgatgccttgtccccctcttcctaaccctcttttccatgactgtgcctctagagagtaaacctcctatgttctaccaggttaagggaaggataggtacctgtccctaaaggataggggaggggatttgctccttatacagactttcacccaatcctatttttagctctmtttctccatttcacaggtacctgacaacttcagcttctgagccttcagggttttacagctgaattggcttgctgattattggcttcctcctctgtagatattttagttttaacattctacacttatttaatttacaatttctaaaatactattaactatctactgtataatttttcattcttgtagtccttgtgggttaatatttattttttctttactgtatttttagttggattttgcaggagaacaaagaaagatgtgatgttcaattgccatttttaactagaagttatagaactttcatcttctcacctttgccttaaaatagaagaatgttagacctctctatagggtggctgtctggtacaagttactttgttctgttgcatgttcatttctatgtttgtttactcaacaaatatttattgtgctcttatgactatatgtcaggcattgttctaggcacttgaaatacctcaatgaacaaaatgatttctgtccttatgatgcttacagtttagaagaaagaaacagacaataaacaacaaacaaataagtaaatcatgttatattaaaagataagtgctgtagaaaagtgtgagatgataaagggggaaagtgctagatttagggtggggcaggttgtagtatttgaaaagatcgtaagatagtccttatagagaaagttagatttgagcaaagagtctttaaactctcttactcaggtattctgtgaatgaattgtaagaacaccttgtatccccttcacatgttwaagttgaagtttaaagtttttcatcgtaagtttacttgtaaataatttaattttttagcactggttaaatgttgacatcttatagttttctaaaaatgtccccaggcatgccgggcgtggtggctcacgcctgtaatcccagcactttgggaggcctaggcgggcagattccatattcaggagttcgagaccagcctgaccaacatggtgaaacctcgtctctactgaaaatacaaaaattagctgggcatggtggcacgcgcctgttatcccagctactcaggaggctgaggcaggagaatcgcttgaatctgggaggcggaggttgcagtgagccaagatcgtgccactgcactccagcctgggcaacaagagcaaaactctgtctcaaaaaaaaaaaaaaaaagtgtccccaggctgggcacagtgtctcatacctgtaaatcccagcactttgggaggttgaggcaggaagatcgcttgagcccaggactcccagacagcagtgagctaggattggaccactgcattccagcctgcacaacacagcaagaccctgtctcaaaaaaaagtctgtagtggagtttaaatactgtaataaatttacatatatcatagtccatttaaagaaaaatatattaacaagctcttcattaatattttacatttttgctttttctctgaacttgtatttctttttttatttttatttttttgagacagggtctcactctgtcacccaggctagagtacaatggcgtgatcatgacttactatagcctcgacttcctggtcccctggtccctggtgattcttccatctcagcctcccaggtagctgggactgcaggcacaagccaccatgcttggctaattttctgtattttgtgttaagacagggcactgtttcccaggcttatcttgaactcctggctcaagtgacccgcctgcattggtctcccatagtgctgggattacaagtgtgacctactgtgcctggctgatattatgatttttttaaatataacgttgtataattaaaacaaagtaattaacctgcccaacatctgaaatatctgacattttttgtaatgagagtaatttgagatttactctctgagtgactgtgaaatgtacagaactcagttattagttgtatttgccatgttgtgtaataaatctcaaaaaaaaaacaaaaaaaaaaaaacaggccaggcatggtggctcatgcctgtaatcccaggcatgtaatcccaggcatgtaatcccagcatttgggaggccaaggtgggaagatcgcttgagcccaggagttttaagaccagcctgagcaacacagtgagacctcatctctgcaaataataaaaaattagccaggtgtggtggtgtgcacctgtagtcccagctactcaagaggctgaggtggaaagatcgctagagttcaggctcttgaagctgtagtaagccgaaatggtgcctgggcgatagagtgagaccctgtctcaaaaaaattaaagttactcctcctttctaactggagctttttgtactctttgattatcgtcttccccacccccaagcctctggtaaccactattctactctttgcttctatgagttcagtggttttagattacacatttaagtgagaacatgcaatatttgcttttctgttttttgccttatttcacttagcataatgttctccagttccatccatgttttcccaaacgacataatttcttcctttgttaaggctgaacagtattcttttgtatacatacacacactctctcatcccattcatctgttgatggacacttatgttgattccttaacttggctattttgagtagtgctgtaatgaacatgggagtgcaggtatctttttgatataccgatttcaagtcttttgggtaatagccagaagtgagattgctggaccayatagtaattctatttttagttttttttgaagaacttccatacagttttctataatagctgtactaatttacattcctataaacagtgtgcaagttttttttttcttttttttttttttttttgagacggagtctcactctgtcgcccaggctggagtgcagtggcgggatctcggctcactgcaagctccgcctcccgggttcacgccattctcctgcctcagcctcccaagtagctgggactacaggcgcccgccactacgcccggctaattttttgtatttttagtagagacggggtttcaccgttttagccgggatggtctcgatctcctgacctcgtgatccgcccgcctcggcctcccaaagtgctgggattacaggcgtgagccaccgcgcccggccgcaagtttttttttccaacaacctcaccaacacttatgttttgtctttttggtaatagccatatamagcagtccccgcttatcctcaggggatatattccaagacaccaagtggaatatataggtttggtttttttgttttgttttgtttttgtttttgagacggggtttcgctcttgttgcccaggctggagtgcaatggcatgatcttggctcactgcaccctccaccttctgggttcaagcaattctcctgcctcagcctcccaagtagctgggattacaggcgcccgccaccatgcccagctgattttttgtatttttagtagagacggggtttcactgtgttgaccaggctagtctcgaactcctgacctcaggcgatccacccgcctcggcctcccaaagtgctgggattacaggcgtgagccaccctgcccggcctatgtagggttttgtacttgtcctgaaactgcagatagtgcagaatcctatatatactatgttttttctgtacatacatacctatgataaaatttattaattaggcacaataagacataaacagcaataactaataataaagtagaacaattataacactattctaacaatttaggtgaaagaagcattactcaaacacaagctctacaataccacaacagttgatcttataaccgagatggctactaggcaggtgggtagcatatacvtggttacactggatagagggatgattcccctccttggcaggaaggagcaggaccactccagattttaccaccctatttagaacagcatgcaatttaaaacttatgacttgtttgtttctggaacttgccatttaatattttcagaccactgttgaccgtaggaaactgaaacttcagaaagcaaaactggggaaagtggaggactactgtattttatttcatttctctcacagaattttattctaatgtaacacttttctgcccaaaagtmttttagtaatctcattatacttctgctacaaatatataaattaattaaaaattagctttatttctgatatacataatattctaaatattaaacgttttttctaatttgtgttattacaattattagtataactgatcaaaacaaatctattagagaaactacataaatgaaaaaaacaaaacaaatttatttttttggttgggcatatataaattttcaatcaactttttttgttttttttaaaattatactaagttctagggtacatgtgcacaacgtgcaggtttgttacatatgtatacatgtgccatgttggtgtgctgcacccattaactcgtcatttacattaggtatatctcctaatgctatccctcccccctccccccaccccatgacaggcccccgtgtgtgatgttccccttcctgtgtccaagtgttctcattgttcagttcccacctatgagtgagaacatgcagtgtttggttttttgttcttgcgaacagtttgctgagaatgatggtttaattatctcagtaactcaattagattctcctttagctttattgaatacagaagactgttaactacttgagatgcaaaaacattttgttaccaatcattagaattgttcactttctcaatttctataaagtatcccaaaagcctttattgagactagtcaaaatatctattactgacattttaggctaaattttattttgtgttttgtgttttttgttttgagacaaggtttcactatgttgcccaggctgatcttgaactcctgggctcaagtgatccttccacctcagcctcccaaagtgctgggtttatgtatgagccactgcacccagcctacactagactttaaaaaaagaaaaaaaatatattaaaattatatcttcaggctgcgtgcggtggctcatgcctataaccctagcactttgggacactgaggcaggcggatcacttgaggccaggagtttgagaccagccttgccaacatgccaaaatcctgtctctactaaaaatacaaaaattacatgggtgtggaggcgcatgcctgtaatcccagctactcaggaggctgagccacgagaattgcttgaatccaggaggcagaggttgcagtgagctgaggttgtgccactgcactccagcgtgggtgacagagcgagactctgtctcaaaacaaacaaacaaaaatcctcacttaaaggcacttgtttaacctggtatactgagaaaaattggggaaaattaaaatactgttacttttattacacttatgataatgattttttagaatatgttttaaatatttttttttaccctggctgcagacttattaggtcactgtatatttgctgctgaaatgagctctgttaggtcactgaatttatgtaaagtgaccaccatataacttaactggtggtatcaaggctcactgacaaaccagtcagtcaaatcacacttactttataagttaaaaatagtgtagactatattggaatacctatttcatgtcatgatttgacaaaatacgtttttaactatgttaatgaataacatatgctgaatctataaataactcacgaaagttttatctgtagattttattcttgagaaaatttggtaatcttggttcacatttcagttatacttatttaaaagaaccacaggctgggtgcggtggctaatgcctgtaatcccagcattttgggaggccgaggcaggtggatcacctgaggtcagtagttcgagaccagcctggccaacgtggcgaaatcccgtctctactaaaaatacaaaaattagccaggtgtggtggcataggcctgtaattcgagctactcgggaggctgaggcaaggagaattgcttgaactcaggagacggatgttgtagtgagccgagatcccgccactgcactccagcctgcgtgatggagctctgtactgcaattgctgttctcttttttctcctaggactctccctcaaggactatgcattcttttttttcttttctttttctttttttttgaaatagagtctcgctctgtcacccaggctggagtgcagtggcacaatctcagctcactgcaacctccgccctctgggttcaagcagttctcctgcctcagcctcctgagtaactgggattacaggcacatgccaccatgcctggctaatttttgtatttttagtagagaaccagtcagggtcatgtgtggtatttagttgttctttttagtttcctttaaaacagaacagttcctcagccttttgtatgtgtcgtaacaatgtcacttttcaaaagttaagtctagctgtttgcggaacgaccctcaacttgaatttgattattttttcatgattagattcaggttagacagttttgtcagcaatactacataaacaatgtatcttttttagtgcatcacaccatragtcaataaataatgcaaaatatttagaagaattggactctgaagaaattatagaaataactttttcttattttcttttcatatatgcacaagagtgatatataataaatctgaatgagctataaatagttttaaaaatatgcataatattccgggctggacacggtggctcacgcctgtaatcccagcaccttaggaggtcaaggcaggcggatcacctgaagtcaggagtttgagaccagtcaggccaacatggtaaaaccccgtcactattaaaaatacaaaaattagccaggcgtggtggcaggcacctctattcccagctgttcgggaggttgaggcaggagaatcactttaacctgggaggggaaggttgcggtgagccaatatcgtgccactgcactccagcctggacgataagagctaaactctgtctccaaaaaaattaattaagtaaataaatattccaagtgataaggtattatgccattgcttaattggcagcattttttcttttttagcagtatgtaaaataatgttacttaaacaccatcttaggtacaattaaatgtaattttaattccttctatttactttgctaccattctattacagatggttaataatttgccccttgtattcattcagcaaatattgtggtactaagaatacaactatgaacaaacaaacatggtgtggtctctgtgctagttccctatggatactgtaacaaactaccacaaacttagtggctttaaacaccacaaattaggcgaggcgcagtggctcatgcctgtaatcccagcactttgggaggctgaggtgggaagattacttgaggtcaggagtttgagaccagcctgggcaacataggaaaactctgtctctacaaaaacaaaatttaaacaaacacacatacaacaacaacacaaagttactgtttgacaattctggaggtcagaagtctgaaatagacttcactgggtttaagtcaaagtattggcagggttgtgcttcctcaggaagttctaggggagaatacatttccttgctttttccaccttctggaggctgcctacattccttagctcatgggcctatagctccatcttcaaagccagcagtgtagcatcttcaaatctctctctgactaacctgccttcttctttcacttataaggaacctcatgatgattacttcaggcccacccagataattcaggataagctccctatctcaagatccttgacttaatcatatctgtagagtcccttttaccatgtccagcaacatattcatagcttctggttattaataaggacttggacatctttggtgggcaattattatgcctactacagtccctgtcttcatggaacttaagttctagaaaatcaaataggcaattactgtagaatctgcaaaaagtactcagaagaagacagagaaataagatgagaacaaagaaataattggattgcagaagctaagggaatgctgttaagagagatagcaccctctgggtttttcaataagtatcattggtcatactggcaagagaaatctcaaaatagtatggtaatggagtgggaatacatactgaagtgtgttaaaggtgaaaagggagctgagagccgggtgcagtggctcacgcctgtaatcccagcactttgggaggccgaggtgggtggatcacctgaggtcgggagttcaagaccagcctgaccaacatggagaaaccccgtctctactaaaaatacaaaattagccggggtggtggcacatgcctgtaatcccagctactcgggaggctgaggcaggagaatcgcttgaatccgggaggcggaggttgcagtgagctgagatcacaccattgcactccagcctgggctaaaagggtgaaactccatctcaaaaaaataaaaaaataaaagaaaagggagctgagaaaatagagatagtgattgtaggcatccctttcaaaacacttggctgggaacaagagacagagttatcattgcaggtgttcttttttttttgagaccgagtctcgctctgtcacccagtctggagtgcagtggcgcaatcttggcttactgcaagctccgcctcccaggttcacgccattctcctgcctcagcctcctgagtagctaggactacaggcacctgccaccacgcccggttaattttttgtatttttagtagagacagggtttcaccatgttagccaggctggtcttgaactcctgacctcaggtgatccgcccgcctcggcctcccaaagtgttgggattacaggcgtgagccactgcgcctggcccattgcagttattcttaatggtctcactgtgtaagtccattatacaaatctcttctagaagtaagtgataacttttttttttaattaaacaaatgtatgggctggacaggcgtggtggtacacacccatagtctcagctactcaggaggctgaggcaggaggatagctggagctgggaggcagaggttgcagtgagatgatatgccactgcattccagcctaggtgacttgagtgagaccctgcttcaaaaaaaagaaaccaaaaaaaaaaamaaaacaaaaaaaaaacaggagaagaagtatatgatagctgccaataacttacaagcaagaagcaaacatctatacagcttagccttttactcaaggtctttcacaacataaacacatcctaccttctctaaatgcctttccttactccagctgagctggtcctattgttcccatttttgtgtcttagttcatgcttcttttccattttaggttttttcctatttctgtctcttgcttttccaggactccaggctcaacccccacaacgtctcctttcttggtatttcagcagcacttctgatagatctcttttattctgagtccttcattttttactcagatgtgttataacaatgaaaataatcacctgatttttattaaattttgtgattctgtactctattttgaaagaattcagactgagaggaaatgaaaactaggtaatacgctgagatagccttttgtagcagtaaaatctgatacttttttgtttttcaaaaattctccctaatgttgaaaaaccacaccatatgaacaagaaattagggagatttcgtaatcattaggggctctctgtatttacctttgctgggaaggaaaaaakaaatcttggttaattctactttgtaatgtcactgtaatttttcaggagtacaataaamtaaactatatagatttattattgtaagtccattttgactaaatttttctccctttgaaggtccaagggatgtccttcattgcagcagtactcattctcaatttggaagaggcagatgcctttatcgcatttgccaatctcctgaataagccatgccagttggccttttttcgtgtggatcacagcatggtatgaatggatcatgttttccattgtttctgtagtttgaatgccctcttagagtgaaaaacaataattagaaggccaaaacaatctaatctaatataaacttatcattatattatagtttattaatgaatgtttgctgagaagactcagaaaaagatgagattcttaatgagcamgatttcctgttagtgtttaagcgtttaatttctttatttctagactatatactttcataattttattgattttttaatctttagatgttgaaatattttgcaacatttgaagtattctttgaagaaaatctttccaaattatttcttcacttcaaatcttacagtcttacaccagatatatacttgatagactggtaagtcataayatacgtaatatataataatgaaaaggaaataaagtataactttttgtgtgttttaggaactagagtaaatctcatgtgcaggattttacatataaagagccttcttttacaaatttagaaacttccaaatttttgtggggacgcatttgattaagagcatggactcgrctgggtgtggtggctcatgtctgtaatccgagcactttgggaggccgaggtgggcggatcacctgaggtcaggagttcaagaccagcctgtcccacatggcgaaaccccgtctctactaaatatacaaaaacttagtcttggccaggcacggtggctcatgcctgtaatcttagcactttggtgggtggatcacgaggtcaggagttcgaraccagcctgactaacatggtgaaaccctgtctctactaaaagtacaaaaattagccaggtatagtggcatgcacctgtaatcccagctacttgggaggctgaggcaggagaatcgcttgaacccaggaggcgggaggttgcagtgagccaagattgcgatactgcactccagcctggtgacagatcgagactccagctcaaaaaaaaaaaaaaaaaaaagaacttagctgggtgtagtcgctgtaggctgcagcaggacaattgttggaacctgagaggcagatgttgcagtgaaccgagatcacaccccagcactgcagcctggacaacagagcgaaactctatctcaaaaaaaaaaaaaaaaaaaaaaaaaagagcatagactctgggttgaaatcagaatctctcagtttgtgtttcagttttttgtctataaattgggaataatattatctttatcttgagttgtagcgagggtgttttacgtggattatctcattcaatgcctagcacatactaagctctcagagttagttgctatttattttattattaacacacaagggcttatgatagttataatagtgtttctttactaagggcttcatattgtttctttttatttcaaggttttatcaagcttttttcccccaagatgacaccaatttgaattttttaatttgatctcccttcttacatattgtctgaaattttttttaaaaatgtaataaatgtaaatacgatatactttctccaagtttcacatatgaatagctcagctttttactgttccacacacaattttatttcctagattttctctagcttaaaaaaaaaggccaagtgcagtggctgacgcctgtagtcccagcactttgggaggccaaggcgggaggattgctggaggccaggagtttgagaccagcctgggcaccacagcaagaccccatttctacaaaaaataaaaataaaaaaattggccagacatagtcgtgcattcctgtagtcccagctactcaggaggctgaggtgggaggattgcttgagcacaggagtttaaggttacagtgagctatgattgcaccactgtcctccagcctgggtgacagaacgagatcctattaaaaaaaaattatgtatgttgccaaatcatgtatactgcagacaggatcaccattttattacttgtgtttaaagttcaaagttttttagactttttgtttgtcatattaagactaatgatattaatggtgttcctaataggcatacagctctcctacaacctgtaattcaggcaccaacgttccttccattttttacttccaccrtctttaacaaggcattttcagggttttcacagaaggggagagaacaaggagactcacaaggggagattttgggaagctaagcctagaggtattacgcatctcctcctctcacattccactggccaggactcagtcatgtggccacaactaactgcaagtgaagatgcaaartgtggtttagctgtttgcccagaaagaaaaagaaatggtttggtaaacagccagtttctaccacacatactttttttctgtttaatcagaacaaccacataagatatgtactgtaaaccagggcatgatggctcacgcctgtaatcccagtactttgggaggccgaggcaggcggatcacgaggtcaggagatcgagaccatcctggccaacatggtgaaacccgatttctactaaaaatagaaaaattagccaggcatggtggtgcatgcctgtagtcccagctacttgggaggctgaggttggagaatcccttgaaccagggagttggaggttgcagtgagtcgagatcgcgccacagcactctagacagagcgagactccattaaaaaaaaaaaaaaaaagatatgtactgtaatttttaccacatactgatggggaacctgaaattttgttttttattttttcgttcattaaaaaattttttttttattttttattttttgagacagtctagttctgttgcccgggttggagtgcagtggcgcaatcacagctcctcccacctggaactcctgggctcaagcattcctcccacctcagcctcctgagtagttgggattacaggtatgcgtcaccatgcctggataattgatactgaaattttgataggcttgagtaccatacctaatatttcacagttaataaatggcagaatagaaactaaaacctcagcagtccagttccagaaaccatattctttataaagttaactacaacatgaccaacactgattttactgaagaggaatatttagggtttttttagttgtaagagaggtgggattttagaactggaagtaatccaaattcatcattttagagctgaagaaattgagatgcagaagtagaatgtcatagtgaaggtcgaatcattgctgttcaagtattatacaatataaataaacattttttaaagaaaatataatggctgggcatggtggctcatgcctgtaatcctagcactttgggaagccgaggtgggcaaatcacctgagctcaggagttccagaccagcctggccaacatggtgaaaccctgtttctactaaaaatacgccggatgtggtggcctgtgcctgtagtcccagccactcrggaggctgaggcacgagaattgcttgaacccaggaggccaaggttgcagtaagtcaggaggctgaggcacgagaatcgcttgaacccaggaggccaaggttgcagtgagccgggatcacgccactgcactccagcctgggctacagagcaagactccgtctcaaaaaaaaaaaaaaaaaaagctaaacaaaaaaaccgtaattgcaacaatgtaacaatgtatattacattttctaaaagttaatttcttaagctatgtggtttaatggaattaagatttctttttcttttcactcttttgaagttttaaaatattttttttagttgacacataataattgtacatatccatggggtacatagtgatgtttctgtacatataatgtatagtgatgagatcagggtaattagcatatccatcatctcaaacatttatcatttctttgtgttaggaacattcagtatagttgtcctatttgaaaccatatgttaactatagttaccctacagtgctatagaacactagaacttattcctcctatgtggctgtaattttgtatattttaacaaatttcagcctatctcttccttctctccacccttcccagcctctagtatcctctgttctactttttacttttatgagatcagctggccagtgcgatggctcatgctcataatcctagcactttgggaggctgcagcaggctgactgcttgagctcagagtttgagaccagcctaggcaagatggcgaaaccccatctctacaaaaaatacaaaaattagctgtatggtacatggtggcatcacctgtagtcccagctacttgggaggctgaggtgggaggatggcttgagcctaggaggctcaagtgagctgatattgtaccactatattccagcctgagcaacagaaccagaccctgtctctgagaaaaaaaaaaaaaaagaaagaaaaagagagtgactagcattttttagcttctgcatatgaatgagaacatgcagtatttcacttaacataatgtcctctggttctatccatgttgccacaaatgacaggatttcaytcttttttgtggcttagtagcattccattgtgtgtatgtaccacattttctttatccattcatctgttgttggatactcaggttgattccatatcttggctattgtgaatagtgctgcagtaaacatgggagtgtagacctatcttaaacatactgatttcaattcctttgggtatatacccagtagtgtcattgctggatcatatggtcgttctatttgtagttttctgaggaatcgccatactgttctccatagtggctgtactttacattcacaacaacagtgtataagagttcccttttctttgcatccttgccagcatttgttattttttgtctttttgataatagctatcctaactggggtaagaggatacctcattatgcttttgatttgcatttccctgatgcttaattatgttgagcattttaaaatatatctgttggtcatttgtgtgtcttcttttgagcaatgtctgttcagatcatttgcccattttttagctggattgattgtgtgtgtgtgtgtgtgtgtgtktgacggagtcattctctgcactctgttgcccaggctggagtgcagtggcgtgatcttggctcattgcaacctccaccttcacggttcaagtgattctcgtgcctcagccactcgagtagctgggactacaggtgtgcaccagacctggctaatttttgtatttttagtagagacrgggtctcaccatgttggccaggctggtctggaactcctgacctcaagtgatccaccgtctcagcttcccaaaatgctgggattacaggcatgagccatggtgcctggcgtttgttttttttttttcttttgctgttgagatatttaagttcctcatagattttgcctattaatttcctgtcagatgaatagtttgcagatattttttcccattctgtggggtttttttttttatgctattgattgctttatttggtgtgcagaagctttttagtttgatataatctaaaaatgggaatttgtttatttttggttttggtgcctatacttctgagaccttactaataacattttttccaagactaatgtcctgaagcatttcccctatgttttcttctgatagttttatagttttgtgtcttacatttaggtctttgatccatcttcagttgacttttgtatagggtgagaagtgggggtctagttttgttttgtttaattttcatatgcatatccagtttttcccccagcaccatttattgaagagactgtcctttcctgaattagtgttcttggcatctttgtcaaaaatcagttggctatagataatgtggattaacttctgggttctctattctgtgccatttttctatgtatctgtttttatgccagtactattctgtttgggttactatggctttgtagtgtattttgagatctggtagtctaatgcctccagcttttttttttcttcttttctcaagattacttttgttgtttgaagtcttttgaggttttatataaattttaggatggtttttttatttctgtgaagagtgtcattggtattttgatagggattttatggaatctatagattatattgggtagtattgtcatttgaacaatattaattcttccaatctatgaacatgggatgtctttccatttgtttgtatcctcttcagtttctttcatcagtgttttccttgtagaggtctttcacctccttggttaaatttactcctaagtttactccttattatttttgtacctattattaatgtatccagttttctgatagaagaatgatgccttatttaggcactaatgtcttttatcatgttttctgttgaaaatcttttgttttaacttggagagtttgcctttgaagcaatacccagtagattatagaatggtgggtgaattttgccaaagagatggagcagttgatcttaagacaggttgttgttaagaatacacatgggtgcagaggctcatacctgtaatcccagcactttgggaggccgaggcgggtggatcgtctgaggtcaggagttcaagaccagcctggacaatatggtgaaaccttgtctctactaaaaatacaaaaattagccaggtgtggtggcaggcacctgtaatcccagctactcgggaggctgaggcatgagaatctcttgaacccgggaggcagaggttgcagtgagccgagatcctgccacttcactctaacctgggaaatagagcaagactgtgtctccaaaaaaaaaaaaaaagaattcacatgataatttgaggaggggggaagagtacagatgacatatttaaactttaattcttaacaattcacaaccagtgggtttcacgtaaatggtattaagctttaatgtagaaaaataaataatggcattggtcaaatgtgtcttctcaggtcttctttggttcaggatttttttttttaatttttttgagacaggctcccactctgtcacccaggctgagtgcagtggcgtgatcacagctcactgcagcctcaaaatcccaggcttaagcagtctgcccacctcagcctctcgagtatctggggctacaggcaaaccactacacccaactaatttttgctattttatagagatggggtctcactatgttgcccaggctggccttgaactcctggatgcaagcgatcctcccacattggcctcccaaaggctgagattacaggcatgagccaccagacccgactgatttaggcttttttaaaaattaagttattggctgggcacagtggctcatgcctgtaatcccagcactttgggagtccgaggcaggcagatcacctgaggttgggaattcgagaccagcctgaccaacatggagaaacgccgtctctactaaaaatacaaaattagccgggcgtggtggtccatacctgtagtcacagctactcgggaggctgaggcaggagaatcgcttgaaccccggaggtggaggttgcggtgaggtgagattttgccattgcactccagcctgarcaacaagagcaaaactccattaaaaaaaaaattatttttcaatgtattctcttcccgtcccccaagagcattagagttactcagggaaggacccaagaaaatgggagragggttttttaatattatgggactgagatccaagtttaaatactaattccattaagaaggaaaaaaaartcctccattgtcagtcttgagaagtgtgagcatgggggatagcaggatcacaattgatgtgggggacaggagagaactaataaagagtaagtactgtatactagaacctgagcctaggcactcctcattttgaacagggagttttatactaccaaaagtggtttttgtcatatgattaaatacgtgtttgtaatttaagagatagggatggacttttgtttcatgtytctgttgagtttattatatacaaatcccagagacatttttgtgggataggaatgaataagtggcagtgcaaaaggatttttttaaaaattattttggcgaggaagcttttagttcccttcctcaaaccccatcagcactacctcaaataaacacacaatcagtgtaaacaattgtatactttctttgccaaggcaacttcaagacaagtcctgtaatacttactctccccacttcccccaaccagaatggctcccagagaaccactggataaagaattacgtggtcagacattgtcagaaaggttgggaaaaaccattttggtgattctattggaaggtatacatgcttcaaaagaagtagtaaataaagctgggtggaggaaaaagacaaaacaaaacaatggatgtttgtgcaaggggaagagaaaagagagaagtcagactttgagtttatattaggttactaaaagatgatatttgagttcttcatacaataataataatttttatttagcatttcttacatgccaaacgctgatgtaaacacttttacgtttattaactactataatttttaaaacaatcctgagaggtaggtagttttcttatagtttactaatgaagaaactgaggcacagtaaagacaactatcctgctcaaggtaacacaactaataagtggcaaattcaggattcaaattcaggcattctggtttcatagctcatacccttaactaccagactgttctaccactctagtatatattaggcctttcctctacataaggttgtaaattcacataattttgttatttattatttaatttcccactactcaagtttgagggaggaagcctttttttttttttttttttttctgagacagagtctcactctatcaccaggctggagtgcagtggcacgatctcagctcgctgcaacctccgcctcctgggttcgagcgattctcctgcctcagcctcccatgtagctgggactgtaggtgtgtgccaccatgcccagctaatttttgtatttttagtagagacggggtttcaccgtgttggccaggatgggaaagccatatgttatttgccttcttatccctaattaaacactgttctttttttatagagatgcttactgagtaaatgagtcaatgaatgaaaaatttcagtgaccatttttccctctaattttaggatcttcacactatatagcaaatcactaccacttgatctggcctgtcgagtctgggatgtattttgcagagatggggaagaatttttatttaggactggattaggaatcctccgattatatgaagatattctcctgcagatggactttattcatatagcacagtttctaactaaattgccagaagatatcacatcggaaaagctgttcagttgtattgcagccattcagatgcagaatagcaccaaaaaatggactcaggtagagtgacattttcttatctttaatagatgtgttaaagcagttgacttattgtaaaaaagttaggtatttcttaaaagttagtacttaaaaatatgtcttttaaaaataatttttgacttctaagaagcaagagtttaaatcaaattgcccactttgcagctatccaaacatagggcttattttattttattttattttattttattttattttattttattttatgttattttatgttatgttattttatgttattttatgttattttatgttatgttattttatgttattttatgttattttattttatgttattttattttatgttattttattttatgttattttattttatgttattttattttatgttattttattttatgttattttattttatatgttatgttatgttatgttatgttatgttatgttatgttatgttatgttattttattgtcacccaggctggagtgcagtggtgtgatctcggctcactgcaagctccacctcctgggttcacaccattctcctgcctcagcctcccaagtagctgggactacaggtgcccgccaccacgcccggctaattttttgtatttttagtagagatggggtttcactgtgttagccaggattgtctcaatctcctgaccttgtgatccactcgtcttggcctcccaaagtgttgggattacaggcgtcagtcaccgcgcctggcctattttattttattttgagacggagtctcactctgtcgcccaggctggagtgcagtggtgtgatcttggctcactacaaccaccgtctcccgggttcaagcaattcttttgctgcagtctcccgagtagctgggattacaggcacatgccaccacgcccagctaattttttgtatttttagtagagacggggtttcaccatgttagccaggatggtctcgatctcctgaccttgtgatctgcccgcctcagcctcccaaagtgctgtgattacaggcatgagccactgcacttgactgggctttattttatttaagtccagtattatcaatttagtgaagtacaacccacagtagtcatttatttgccagagtagttattattttggtatttcaaatagacaacaattttattatattaaatacctactgtgtactagggtttgtagttgaaagaatatataatgtatggtcctggcttttagatgcttagtcttgttaggaaagtaaaagcattggcaatctaagttaagtgacataaaaggatagcagtatcactcaatccatgaatgatataaacaattggcattattaaattcacagtcttattggttcagaaaatgttatgttaccaaatagtaatttcagaatagttggcaattggtaaaaattggaatctaatcatatttcatgattagaaaaaaataaaggggatttgagaatgacacactttcggggacagtgttaagtataataaagctttttcatgtttatgaactatagttatttaaatctctttaatctgggtggtagtttttgaggattaatctttattttatataattttcaggtctttgcatctgtaatgaaggatattaaagaaggagacaagaacagtagtcctgctttgaaaagctagtcttcaaaattgacagactaactgacatagaaaaagtggtttttggataaaggttttttgtttcctatgtaaaaggcgtggaagaaaatgttggagatacctaaaagaatcaagaggtggaaaactgctgatttwacattttatggctgaagtaaatgaaataagtaacttattgacagtattaataaactattattttgtaggtagagtcatttttcaaaggaaaaagtttaagtggtgagtttatattccacaatttggagtaaacaaaatgcaataaatttttaaaatagctttgaagatacttcaaatttttacatcttttcttttgtaacagttaccacaaagatattctggaggctagagtaggattgttaaatactactgttaacctccaaagtactatagtacagacattgtttccagttctgaccttttgaagatattatagaccagtaatgaacagatttggttgtaaattatttaagtcactgaagatgtcatttatcttcattcacaagttggggcaaattcgagttacctaggaactggaaatgttggtgggagattgtttattgtttgtttagatgtttttccatagtatggtgtccatttgttttttaagggaaattttttgtcttccttaaggaattcctatcactcagagaattttagccattctggttctagtctaacaaattattcatctaataatttgacattaagaaaactataaataactggtagaaggaaagtgctttgcacttcagtggattgaagacttgactttgagagtaagtccaaaaacatatatgatgtttctcagtgataagagtaaaaagtaatgaatcctgagagttcttaaacagcatgctacttggcaagacttcatattttttagttacaattcttccactgtttaactccagtttgaaatttgaaatctaatatgtagctaaatctgtgacttgtaaaactctatgcataatttttcctaatcagtggaaataagaataaaagaaaaaggtaaagttaattttttttctaagtctacatcctatctcttgattcagttgcctgaagaagctgggtaaggagattagtcttgttattgattcttttatgtgtcagtgccatcttaatctcttcacatggtacactaaatgctgcctataacccatcctcatcttctttactcatcattgctttcttcaaggaaggtcttgatactgccctcgtctacctcactatccgctagtctagatagtgactctttggaaaattggtagcctctgaatgagttatccaacttctgcttcctcacattggccactttgcataggttcgggaacttagcaggttttaaatcatcatgcccatggaggtgaaatactttgaggaatgggaacatctcttcactgtgtttttggatcagccttctctcaaccgccaagaaatgcatgatttccctgccaactctaggaagtagtgctgcatgattgaatcattatttgatgaattctttcattgtaacatagggagtcattttcaaaaaggtagatatgaacttaaattaaattgacttatgaatgctttgcctgtgggcccaacagtgtcatgaccctccaattgaaacatagcatgaattatttttatgtcgagttcttgaactgctaatcaggtgtgtgtttccttgaagtccagagcaggatccaggtcagatgaaggaggtggtatgcctggcttaactgctgaaaatagagcattgaaactcttcacaatgtgctgcattgggtttctgcttggctttctcactgaaaagtaaattggggaaaatgctgcttttactattttgcattttatagcaacattaacagtcttttcccagtcaggtgctgtccagggaacatgtttcccttgggaggtctgaacagagtgacctggcttgatgtatttcctgagctctagtaccatatcatagaattagttaaatgtagycaacagcaatgtcagaacaattgacattgtctttccaagagtgaatgcattggctttcggaactgctactagagacatacatgaggcagcgaacacatctttaggtgggggcaaggctatatctgattgacagagatctctgatctctaatgacatattgctattgtcctattatgtttaaatttgaacctaaatcacttgagtgttatgagtgatggctatataacatgctgtttggttagatttacagtgtgtttttatgttgcagtttagtttgaaacaacacttaagcacactatttctgttagtgtatatagttttcaaactaacaagcctgcgatccttgttagtgtagtgactgcctctttaggagtatggggccctagggtgtccatatatttttaccccatgggtcattctagtctaaggactactagtagaaccctcaaaaggtaattgctattatagggacttacttattggagactggtaatataataaaatattgaaggagtggccatggtcttagcaggttttagaatgaccttttaactccagtaactacttccttggtattggtatccttgatagagggaatataacatctggcagtaatctcattcaggttatactacctgactaaatttaatcatactttcatgtatttgtttcctcagttggacctaagttactgtatttgtttttcttatttttttattattgtacagtttctttacctttcaagtataaatgtgtatataaaatgtaaatacaaagaattcactaaaaaccactcataacaattactgtgtaaataaaactggtaagcagagtaattacttgaaatgagtcttcattactttggggatatctgttttatttaactgcatctcaaggaaacaaaggaaataatctttgtttttgtttgccaaatttgtcttccaaggaatgcactaagccttcagtctttttagactgacagtactggcagctaaaatattgtactgtatcttctcttgagcccagtatgtaggaaatatgtgataattcacatggtcagtatatggcagtttttgttgttgttgttacagtatattttcaattaaaaaaaaacttttcctaaaatactcaaaataatgtgaaatttaatatggtgtttcatttgtttgtctactcaatatatatatttcttacttaatgttcctttagtccaggtctacaatgccttatttaaatgctgttagaaaaaaaaatgctgttagaagactccagtaactcgcatagttttgtatagtcagcttttgctgatgtcttttgcatatgtgacctttgagtatatttgtttgactttataaaattaggtagcatttgcaaaatgacattgacattttcaaaatctctgacttcaagataatagcgttccttgcagcttaggaactaatgttattttgacctaggccagtcaactctttagagtctacactactgaagggtataattctaaagcagataatcatgaaataatttatcttacttcataatgtcatatgatttatttttatttttaattttatgtttttgtttgggtaagataaaattattttatattccaagagtgtgttcagacagcagggactagtataaaatagagtcaaaaaagtgtaaggtagcattggacagtaagttacattaaaattaaaatttgtcatgactaattgatagtgtcagaaaacagtcttctgagaggaaaaaaatgttatttttgtatggaatcgtattattttgctgtttgacaagcattgtctaaaatatgaattctcaactctaataaaacctcattaactagaacatcactgctttacaacatgtaaaaactaaaatgaaatccaggatttcagggaaactaaccactccagagaaagccctgctctttaaaaatattgtttgcttggtaagagtgtaattgcaaacatgggaaatttgaattaatacacttatatgtcttaagccctgattattgccaagcactgcctcttaatattttgttaggctacataaagttttaagatttgggaaattccaaaattgcctttctttcaagatattctgctgttcatattgatcatcccttgatctcaattaatgagaatttgcttatgtgcattttattttgtagattccatttattttccagtaaacaccaggaaggaaatttgactaaaattacattatgaaagtgtttcatttgaacatttacgtaaacaataatgactttattaaatttaaagtaaaatgacttttgtattattgcaatgtatttgaaaaatcatctttataataaatatgtaaatgataaatgaatatagacttgaaggagtatataaaattgacaacaatggggtatatatgttctcatttttcatcctcaggcataatgctatacacaatggtataaaagcagaaagtgaagcttcaaattctggtcacagctgagcacggtggctcatgtctgtgatcctagcactttgggaggctgaggcaggagcaccacttgatctgaggagctccagattagcctgggtaacatagtgagaccatctctacaaaaaatttaaaaattagctgggcatggtagcatgtgcctgtagtctcagctacttggaaggctgaggtaggaggattgcctgagcctgggaggttgaggctacactgatcacaccactggactccagcctgtgcaacagagtgagacactttctcaaaaacattttaaaaaaaattgggctgggcacggtggctcacgcctttaattccagcactttgggaggccaaggcaggcggattacctgaggtcaggagttcgggaccagccttaccaacatggagaaaccccatttctactaaaaatacaaaattagccaggcttggtggggtattcctgtaatcccagctactcggcaggctgaggcaagagaatggcgtgaacccgggaggtggagcttgcagtgacccaagatcgccggctgcactccagcctgggtgacagagcgagactccgtcttaaaaaaaaaaaaatggggtaagttaggcaacaaaaaagcctcttatgtgagcccttgaaaagcaaacacatcttatgaaatttttaattagcttacatgtttcattaccttttaacagtgtaaatcaactgggcacggtggctcgcacctgccatcccagcaccttaggaagctgaggtgggcggatcacttgaggtcaggagttgagaccagcctgaccaacatagtgaaaccctgtcactactgaaagtacaaaaattagctgggcatggtggtaggtgcctgtaatcccagctacttgggaggctgaggcaggagaatcgcttgaacccaagaggcggaggttgcagtgagccgagatcacaccattgcactccagcctgggcgacagagcaagactccgtctcaaaaaaaaaaaaaagtgtaaattaatttctatcatttttttactcaagatcctctaatggcattcctcgtaataaaaatccacactctttatcctagtctccatggtcctacttgatctggtcactgtgcatctttccaatttcagctgcaatttataaacattctgcctgtagacacagtggacttactgccatttttcaatttgtcagccttctatctacctgaggtctttcttccctctgaagtgttttttgtctaggtctttgtatggcttatactttataccgctgcttaaggtcacttcctcagaggacttttctctcaacatgtatccactattctcatgaccttaccctgcttcatatttctttataatttctattatatatcaccaactgacactactttatagtgctgtctattgtttccactacagtgtaaactctgaggtcaaaaacattgtcttatttactactgaagcgctagtacccaaaatagtgcatggcactaacctatggtagatatggatgactggattgtttttatttcggtccattcctcactgcacttaccttttcatttaaatttttttctattatagatattatgcagtgaccagaaactcaaatagtttctggttcactcggaaagttaaacatttaaaggttgggtagaagagaactagtaaaagtcaggaataggaatatcaagagaatgtggggtcagaaaagacaacggacaagagtgtttccataaaggagtgattaacagtgttatgttgcaatgagattcaaataagaactgagaatgtccattaaactgagcaacattgaagtcattaaaccttagtgggctactttgatgtatgctgaatgttgcaatgagacagagggttgaagaatcagtgggaggcaaggaattaaacattgctagtgtagacaattataaaagtaagctttaaaggggaagagagaactgaaaatagttggtagggaaataggaggttccagctgggtgcagtggcttgcacctgtaatcccagctacttggagcctaaggtgggaggattccttgagttcaggaattaaaggttacagtgagctatgatggtaccactgcactccagcctgggtgacagagtgagattttatcttttaaaaagagggaataatgatttctaatctaaaataatttctgaataggcagcagggagttggatccagagcacaagatgagagagtgagaaaggtattcaggatgcagatgggtttgtaaatttgatgttggtaagctgaatggggaattctgtcttgtagctattgtttcctttgttaggtaggccagaagtggggccatctaccgtaacaagagggagccagggttttcttttgttttgacttctatgattggatggatggttatgcacattaatatgaaaaggattctataagaggaagacattttgtgtgggtagggaaaaatgacttgtaacatcatacttagaagaaaatccccagtgccttatctggagggtctgcctctgactttttgtgccattcccccttgccaattcggcttcagtgatactggccttctctctgatattcaaacatgcccaagtgtattcctgctttactctctgtacacgtgtagtttctgcttggattgctcttcccccaggctggctagcttcttggcatttggttctctgcttaaagtgcctatcacttcggctgggtgtggtggctcttgcctgtaatcccagcactttgggaggccgtggcgggtggatcacctgaggtcgggagtttgagaccagcctcaccaacatggagaaaccccgtttctactaaaaatacaaaattagccaggcttggtggcgtatgcttgtaatcccaggtactcgggaggctgaggcaggagaattgcttgaacccgggaggcggaggttgcggtgagccaagattgcgccattgcactccagcctgggcaacaagagtgaaacttcatcccacacacacacacacacacacacacacacacaaaagtgcctatcacttcttcagacatccaattacccaatctaaaataactatcctgtcactctcatgccaccctattctaatattttgcaatttcccccttttcatcccaactcctggaatgtaagttccatatcaacagggatgtagtctgtctggttcattgctgtacagctcctgtgatagttcctggtatccaggagacattttaatttaatttttaatttttgtgggtacacagtaggtgtatatgtttatggggtacatgagatgttttgatacaggcatacactgtgaaataaaaacatcatggaaaatggggtatccatccccttaagcatttatcctttgagttataaaccaattatactccttaagttatttaaaaatgtacaattattattgactatagtaaccctgttaggcaatcaatagtaggtgttattcattctttctaaccaggaggcattgaaaaaacaaagaaaaaacaaaataaatgtagacccttaaataaaagtgaatgaacaagagtgttcacagccactttgaagggagggtttgcacaacggcaaagacgtgccaggaaatgcaccaatgcacttttattaccaagtgtggggccagatgtcagttgagatgtgtgttctttgagaatcagatgaagttttcttgagctccatttcgtgtatttggacaaattctctctcttgcctgtggagcagaaggtccaaggaacaaagtttctagagaaaaacaatgaatggaagaaagatttggggaggtgggccacagttgaatttgtattagtccattttcatgctgctgataaagacatactcaagactgggtaatttataaagaaaaagaggctaatggacttacagttccacgtggctgggaaggcctcacaatcatggcagaaggcagaagatgaaaagcatgtcttacttggtggcaggcaagagagagaatgagagccaagcgaaaggggtttccccttatagaaccatctcatcttgatctcgtgagacttattcactaccacaagaacagtatgggggaaactgctgccataattcaattatctcccaccaggtccctcccacaacatgtgggaattatggaagctgcaattcaagatgagatttgggtgggggacacagccaaaccatatcagaattcaaaagaaggaacaaggaaagatttttcagtacattagggaaaaaccccataaaaagtgtttcaaaagtcaaagggaaagaaattttggaggataggttggtaaaggtcaaaaaaaattttttttttttttttgagatggagtcttgctctgtcgccaggctggagtgcagtggcatgatcttcgctcactacaacctctgccttccaggttcaagtgattctcctgcctcagctaccctagtagctaagattacaggtgtgtgccaccacacccagctaatttttgtatttttagtagagatgggcttcatcatgttggccaggatggtctcgatctcttgacctcatgatccacccaccttggcctcccaaagtgctgggattacagacatgagccactgcacccggccccaaaaaccttaagtagagtgagggtggcgggtgaagtggctcacgctctggcatgccagtaatttcatactctgggaggtcaaggtgggaggatcccttgagcccaggagttcaagaccagcctgagtaaca

SEQ ID NO: 6944 - DNA, 94463 bp, Homo sapiens
tttcagccgtctctgtgctgctcgcctcactccaagggcgtcactttcctcaagctcggctggattgcttaatggatgactacaacacgtattcgtaaaacaacctggaaaatggtaatacagagacagatcaacttttcttcaaagtaggtctgaaagatcaagaaaaagttttataagtaactgaaaaatgaaatgatttttaaggattttaaaatcagttataatgggctatcagtaattattttaaggattttaaaattggttataatgggctatcagtaattattttaaggattttaaaattggttataatgggctatcagtaattatgttgtgaaacagactacatttgtaggtaggttccttattaatacttctttaaccaaaaaagatcaaagtgtagataatacagattaaagataaatatgtaaattatacatattgcccaattgcttactagttcttattttttcttgctgttgtattaggttgcactcattgtgtaaactcactttatgcagaatataaaattatgccattcacaggatttccctttgtgaccttggctccaagaattcagaatgataaaaagtcaaattaatgtacaaacacaatattgtacattaaaagtgtactaacctggaaaggtaatcttagcatctgatctttgctgtagcagaagcttattttcggtgttgaataagaagacactaaaagctcgatgcaataatcctgaaagcaaaagaaataacaattattttagccttaagtaccagttatttgccaaattctctccctgcagttcagaataacattagtaacttgctgctgcttttgctttttcccatggtttatccacatgcatagtctctgcatggctatggtgaggaagagctctgcactgggcaaggaagttggccgtcgagtgaaggaaatggtgatgctggtggcccctttccggcagtcaagttccctatcaaggacattcagttctcggaaagtggtgaaggcacatgcttccctgcatggtgcccgcctctctccactctctagaaatattagaggctaggctgctgctgtatgtcagggctagtccctcttctatgaatccagaataactctgaagaagccgagtaacaggcatgaagtgaagagaaatcgctgtaacaggaagacagcaaagcagatgctaatgaccacactatttaacgaactggaaccaacgagaaaatacggtattactgaagactgcacttccttgaacagagtgctcttctcagcaaatcggaaatgcctacacaaatcgctttacaagaaagactgtttcaaagcagcacctttctcaatgttctcgttcaggtgacaattcttcttggtctcagctccaattttattgtcattttcatcaataaggatacacatctctgccaggagttgaacctgttgcttgtcgaggtggttagtgtttatttcaggcatcattacaaaatgtctgatctgttctagaacactaatattaaaggaaaagagaaagaaaggccatcatatatttttctgaatgtcatataaacacaggttaataatgatgctgcttccccatctgcagttgtaccactctgcatccccacagggaccccaagaacgctgccagccggctgctcagcactatctgggtcatcatttctcctacaggtttcacagctggccttttatcacagtcatgctcctgaaggccaagctcaacgttccgctctaaattcttgacctctgagatcctctgcagcacttgatactcaatcctttttccagtgtacttttcttctctggtttttggccccaacctaacttttcatcctgcttttctacaccagcttctgtaatctctagaatgtgctcccattgccatcctgaattgtttttcccactgcctgtctctgcatagttgctcaagattgccacaggccaatcttggttgaaatccattttttcaaggcacaactcgtgccagacattcaataacctttctaccaatgtcacagtaagacttaatccagtttttctcaacccaagctcctgggttatcagaaaaattatttgtatgagttttgtcaatttcccccaggacagtacttagctgatatcattctagataaacaggagaagacttaattcgttatattcaatagatgctttaaggcagtgcttggcaagttttttctgtgaagggccagagagtatgaactctgcctctgtaacactaaaatagtcacaggcaataggtgaactgggcagtatgtaaactgagtgtgggtgcatgccaatatttatggacactgaattacatttaattttcatgtgtcacaaaatattttgattcttctccatccgtttaaatatgagaaaaacactcagctcacaggacgtaacaacaggcagcaggccagatttggcctataggccatagttggcccattcctaccttagtgcatcaaacattaattttctgaacccccatttatccctcccatgtgattacaacgtaaagcacttattagggtactttcagtattctgactcacacttttacatatctgtatccagcagcgtctaagctttctaatctttgtatccttcagggcacctttacatagtctgaccttgaagttttttattcccttttttcttctcctttatttctgaatgaattataatttttgttttctgatttttctacccaatatattttgaagatcccatgtgctctactttctatgtgactctatttcaaatacatagattttactgaaatacttttttgtttctgagagggagtctcgttttgttgcccaggctggaatgcaatggtgcaatctcagctcactacaacccccacctcctgggttcaagtgattctcctgctttgacctcccaagtagctgggactacaggcgtgcaccaccatgccaggctaatttttgtatttttagtagagacgaagtcttgccatgctggccatgctgatctcgaactcctaacctcaggagatctgcctgctttggcctcccaaagtgttgagattacaggagtgagccaccacacggggaccactgaaatactttcaacagagttcaagcatactgcagaatgtacacaaagtgtttaaacagctacttaatacaaagttctagacccacatagggtctgggtgtgtgtgtgtgtgaatgcgtgtgtcaggagtcagtgatgatggagatattgatatctaatacaaaaaatctgaaataaggttaatgattaaaacaaatcaagagggaaaataatgtgaaaaggaagtcaacttcagagttagcctcaattttagaaagatttccaacttctataggctagttttatatacagtcatcctttggtatatatgggagttagttccaggacctcccacagctaccaaaatttgaggatgctgaagtttcagatataaaatggcataatatttgcagatcacctgtgtatatccactgtatacatacatgtgtcacatgatggtgtttcggtacactacagactgcatatactacagtggttccataaaattataacagaactgacatattcctattgctaatgatgttgtagccattgtaacatcggagcacaacacatcaccttttctatgtttagatacacaaatacttgctgttgtgttacaactgcccacattattcagcacagtcacacactgtccaaatttaggcctgaagcaacaggaaaaacagcctaagagcaactggctacaccacacagcccagctgctccactgtctgtctacaccacacagcccagctgctccactgtctacaccacacagcccagctgctccactgtctacaccacaccgcccagctgctccactgtctacaccacacagcccagctgcccattgtctacaccacacagcccagctgctccactgtctacaccacacagcccagctgctccactgtctacaccacacagcccagctgctccactgtctacaccacacagcccagctgctccactgtctacaccacacagcccagctgctccaccgtctgtctacaccacacagcccagctgctccactgtctaggtctgcgtcagcgcactctgcttccacaatgatgaaagtacctaacaatgaacttctccaaagtatccctgttaagtgatgcgggccgaacgttaaattatcatctgtagatgatctcttatagtatctaaaacatgtaaatcctacataaatagttgtgctgtattgtttacagaataagtctgtatatgttcagtacagatgaaatttttttccaaatattttataatgtgcagttggttaaatccatggatatggaccccaaggatacagtaggccaactgtatattaggtgatcactaagataggtttcgttactacataattactagactttttgacatgactttttttccggggggatggggctgggtcttgctgtgtctgtcgcccaagctggagtgcagtggcgcgatctcggctcactgcagccttcgactccgcctcccaaagtgctgggattaaaggcgtgcaccaccgcccagctgtaatgacaattgctctttcaggattttcagaattcagattttaaagctaagctgcataatcacaagataaaatgaatacgtctatttatgcgtttaaagaataccatgtagtagacgcgggaacacatcatccaacccaagaaaaaggtctagttccatctatgcgatgctccccatctcttctcctgctccattcccaggagaagcgccttgagtgtgttgctgtcaccctcttgcacggacgcaggtgtatgcacccgcgtcacacgcgtggactcggcacggggaggccggtgtcgtcacgctcgtgtttctgacgatgctgtctacgcttgtttctgaattctctaaggggagactcgcaactcttagtctcctgcgactcggtttccagttccacgagttcctaaacctcaggtgactgtgcgcagacgacgatcttttccgctgacaaagaatggcaacgtctctgacgccccgactcacgcctccgccttccacggggcgcgggcgcccaccacagcccgggaaggcccggcctccctccagttcgggagaccaacgccgccacccccagctgtccaggcctccgcgccgagacctcacgggtggctcagacctcgggcctcctccccgccccgtcccgcagctccccgatgccgccctgcccctgtctcccgaactccgccgcccgtccacagtacctgatcagcctccggccacagacaaccgccggtcccggatggcgcccgctttgagcacagtctgcggcgcgcaccgcccactggccccgcccccgggccgcgcagccaatcgctcgcgccagcgccagtccacgccacatcgcccggccaattggcgcccgtacgcgcttgacgacacaatctcgccaagcttcgcctggtggtgccacctccctggcctgtgacaacggcagacgcgcgaagcaccgggaacctgagccgtgaccgcgggctctggcgcctttaagggggtcaacacgccccacccccagttccgcagaggcagcgtcccgcgactgggcggtgcccgagaccacagacgccgccagccaatcacgctttcgatcctgccgtgcgagcccgaggcgctgcgaacggtgcctaacgtcagacgtctcgaggctcgcgttccatggaggaagccctcccaatccgaaagcgcccgggcgccaagccctgcagccggaagctcggcgtcccatgggagcgacctccgcatggctggaccaatggaaacggaggaaaggcgggacgtcactgctgactggctggttgggcactcccccccctccccccccccgagttccgccgctgggactacagcgtttggctgcacggggagttctcgtatgtctagaacgatggcctttctgcggtgtctgcgaccgggaccaaggcggagcaaagtcgccgggggtgtggggtgttccacgctatgttgggagtgttcgctttcgaggtacatgactacgttctaaattttttttttttgagacagtttcattcttgttgcccaggcttgagtgcaatggtgcagtctccgctcacagcaacctccgccgcccgggttcaggcaattgtcccgtctcagcctcccaagtagctggaattacaggcatgcgccaccacgcccggcttatttcgtatttttagtagagacgggtttccgcatgttggtcaggctggtctggaactcctgacctcaagtgatccacctggctcagcttaccgaagtgctgagattccgggtgtgagccaccgcgcctagccctctaaacttttaaataatcgtgaaatgtatgcgcagctgaagcgaattcagctatttcctctaccttttgtgtggaatttaaaatactgaacttgtgagatgaacctggtgggcaccagttctcaaacttcttggtcacaggacgcttgcactctcttaaaatgtactgaggacacctaaaagcttttgctcactgttgtttactactgctatttactaacatagaaattaaacatattaaaatattcacttaaaaaacacacgacactaacataagttatatttttattaaaaatcttttccagacaaaaaacagactttgattttgttttatgtgttgacagatctctttcatgtctggcttcacacagataagaaaatctggcctcccgcatgcgcagcaagtcctcactgctgtcagtgcgttcttgggaatcaggacttttaagtgaaacaacgtatagcaaaaccaattttaccagaggctaaaaaataaggattaagttcctaaagcatacttctggccaaggaaaaaaaaaatcactaagcttctaaaggccaaagtattctaatattaaacattgaaataaatgtgagctatacatacatttaagaaagatgaataaaaagataattattacttamttattccagttctgggtcatgtgtagctgaagcctgtttcagtagctcagggcacaaagagggaaccagccctggacaggacgccattccatcacagggccactcacacacccacactcagactgggacagtgaagacacaccagttcacctcacgtgcacacctctgggatgtggcaagaactgcagcacccagagaaaacctatgcaggtgtggcgagaacacgtaaacaccacaaagacagtgcccctggctgggagtctttttctcatcaatgttacaaagaaatgaatgagcacctgctgtatgcagtttgaaaattgagaagtattttttaatagccttttcaaattatcttggttattctttttcgatactactaccccaaaacacgagtggtggattttccaattactatttggaatttgaaaccacttcaatggacattttgtacttgttacattaaaactcattatttttgactgtacctcgaatgcctattttcctgtgcgtgatgttgaaatgtcatgcattggtcatttggaaaatactgatttactgaattaaacagatcttccaaatgctaaaacatttcattattcaatatcaatcacattgttaatatcactagtaatctcatcagaaaagtttttaagtattgggaagctaaagtattgtagcactggcttccacataaagtcaccaagttcttgatggttttaagtttgttttttatttgaatttttgcatgaaaattccaacattattggcaacaagtactgagaattatgttccttgaagtggcacgaacatatttattttcacgaaaatgtctgccaaatatctaggtttgaatacctcagtttatctgtcagttctttccagtaaaagcggtatttcatgaaaaaagcagctagttagttcagcttacaactcaaacgttcccacaagttcttttcctggagacaacaatcataattcagcatgtagcagaagtgctttatgtgcatttcccattttgttatagagaatattagatgagtactgaatggtcgagatgattaaagttaatattttttactgctaaccatcagctgagccttcaatgagtcataatctttttgctggtggagggttttgcctcaatgtygatggctgttgatcaaggtggtgcttgaaagttggggtggctgttgcagtttcttaaaataagacaataatgaaatttgtcacgttgattgacaattcttttcatgaaagattttttttaaaccacaggaaaacttttttttgagacagagtctcgttctttcgcccaggctgaagtgcagtggtgcgatcttggctcactgtaacctccacctcctgggttcaagcaattctcctacctcagcctcatgagtagctggcactatgggcgtgtgccaccatgcccggctaatttttgtattattagtagagctkgggtttcaccatgttggccaggctggtcttgaactcctgaccttgtgatctgcccaccttggcctctcaaaatgctgggattataggcatgagccaccgcacccggccaggaaaacttccaaagttagagtcaatcctctcaaaccctgctgctacttcataaactaagtctatggagtattctgaatcctttgttatcatttcaacagtgttcacatcttcaccaggattaggttccatctcaagagaccactttctttgttcatccacaagaagcaactgcttatccattcatgttttattatgctagtgcagtgattcagttacatcttcgggcagccatagccttacaaaatgtatttcttaaataatgagacttgaaagtcaaaatgacttcttgagctatgggctgcaraagggatgttgtgttagcaggcatgaaatcaacatgaatctccttgtatatctccatcagagctcttgggtgaacaggagcactgtaaatcagcagtaatattttgaaacgaaatcttttttttttcctgagcagtaggtctcaacaacagtgggctgacaatatttagtaaaccacactgtgtaagtagatgtgctgtcatctaggctttgttgttctatctacacagcagaggcagactagaattagcataacgcttaaggactctaggattttcagaatgataaatgagcactggcttcaacataaagtcatcagctgcactagccccctagcaagggtcagcctgtcctttggagctctgaagccaggctttgacttctcctctctagttatgacagtcctgggcggcatcttttcccaaaataaggttgtttcaactccaatgaaaacctattgtttagcaaagccgtcttcatcagtgatcttaggtagatctcctagatgacttgctgctttatcttgcacttgcacatttttttttttgagatggagtctcactctgttacccaggagtgtggtggtgtgatcttggcttacagcaacctccaactcctgggttcaagtgatcctcctgccttagcctcctgagtagctgggactacaggcgtgtgccaccacacccagttaatttttgtatttttagtggaggcagggtttcaccatgttggccaggctggtcttgaactcctcacctcaagggatccacttgcattggcctcccaaagtgctggaattacaggcataagccaccatgcctggcctatcttgcacttttgtattatagagacagcttctttccttcaacctcatgaaccaacctctgatagcttcagatttttcttctgtagcttccttacctctctcagccttcagaaaactgaagagagttagggccttactctggattaggctttatcagaatattgtggctggtttaatctatacagaccactcagagtttctccatatcagcaataaagctgttttattttcttaccatttgtgtattcactgtaggagcacttcaaatttccttcaagaacttttcctttgcattcacgacttagctgtttcaacatgccttcctcaccatgcttaatcattaatcatttctagttttgatttaaagtaagagrtgtgcaactcattcttttatgaaacagtagccattttagggctattaattgcctgatttttttttttttttgagtcagggtcttgctttgctgcccatgctgaagtgcagtggcgtgatcacagctcactgcagcctcgaactcctaggctcaagcaatcctcctgcttcagtctcccaagtagctgggactacaggcatgagccaccaccatgcctggcccctaatttcagtattgctgtgtctcaaggatagggaggtctgagcagaaggagagagatagggaggcagctggtcagtgcagtggtcagaacacataaaacatttatcgactcagtttgctgtcttatataggggtggttcatggtgccccccaagcaattatgacagtaatatcaaagatcactaatcacagatcactataactgatttaataacggaaacattccaagaattaccaaaatgtgagagagacatgaagtgagcacatactgttagaaagatggtgctgacagacttgctccatgcagggctgccacaaacctccactttgtaagaaacatatgatacctgtgaagtgcaataaagtgatacacatgaaaacagttgtgcctgttacatgacatatatacacacatatatataacttgagaatttaggaagcgacatgtcaaacagcttataacactatagtgtactatccaagtgtttgagacacagttaaaataatcagtaatgaggacaatgacagaatacctagtaaatcttaattccctatcaaaccatgcgcaaaaatgagtcttagtaaattcagcattgttgccctatgtcagggacaaagtacatgtattttgcatagatggacatgtgacaaaatagaaattggttttctgagacaggattctccacagcttctgcaggagggagaatgtaactggataccaggattgcaatcataaccttttataatttcggctagttttgtgtcttttaaaaaaattacattggatagttatttcaggatacagtgtgttatgggttaaattgtgtccccctttcaaattcatgtgttaaagacctcacttccagtattttataatgtgaccttatttggaaacagggttgttgtggatatgattagttaacatgaggtcatattaaagtagcgtctactgtactccaatatgactgatgtcctcataaaaagaacgctaagtgtgcagacagacacggacatggaaaacgtcatgtgaagactggcgggggcatgctgccacaagccaaggaatgcctagacgctgagatgcattaacaggctcccatcacagctctcagaaggaatcaaccctgccaataccttgatttgggacttccagtcagacctctgacaataaatttgtttaagctgcctagtttgcagtattttgttcctgcagccctagcacatcaacagtgaaaagaatatggattctgatgccagcctttagtctttgccctgctgcacgattatttttgacttttgacgagtaatttccacattctcatgcttaaaattcaatttagaataacttttactttattggattcctttggggattaaattagttacaaaagatgtaaagcgactgatcctcaaaatgatttctttcccttgttttgtgacatgtcatgctctcagttattttcagtgacttttatggaatcctaaatatatcaacttaaaaaattacattagcgatattcttggtgttacctgactgtggtgcggtccagcaaaataaaaccacctgttagaatgcgggttaattagatgggacactgcgatttacaaagctttctatttgctgccatgcccagtacaatgtctttgcatactaggtactaaataaaattatgttacttaaatgtcacaacctctaaaagtttaaaaaatgacttctctaaaaactcaaatatttttttccttggcgttcctcttacagaattgtttttagtgataaagttttattaatatacttaatgcagaaataacttcacttcttttttttttttggtaatctggatcccctaaatagaatgctaaatttgtttcttgtgcaacaaacaagttaccacttctgactcttcatcttgagcttccttatttttttttggagacggaggctcgctctgtcccaggctggagtgcagaggcgcgatctcggctcactgcaacctccgcctcccgggttcaagcgattctcctgcctcagccttccgagtagcaggggttacaggcgcgcgccgccacgcccggctagtttttgtatttttagtaaagacagggtttcaccatgttggccaggctggtctcgacctcctaatctcgtgatacgtcggcctcggcctcccaaagtgttgggattacaggcgtgagccaccgcgcctggccttgagcttcctttttaaaggaaggagcaggaatgttaacctacacagaaaaaaaaaatgctttcacgctcttgatttactctaggtgggcttcaaatgcgcggttagcgctttctgtagagcgttgagacggctgtttacgtaaagaccatcatgcgacgtttccaacctagattctaagaaaaaagcggcccaagtcccacctttcgcagggaacagctgattctgtttttccttcccagccaatggtgatcaaaagcttcaggacgctggtgagtcactgcggaggagccgaacactgaccgcgccgtccccgccaggctcccgcgcggccggcaccgcggccctgagcgcaggcggccccgggtctcaggcctcaggcggaccgcgccccgggctcgcagccctcccgccccggctgccgggctacggggcagatggactcggagcgccccgccggtgagtagctacgacccccgaggccacctcccgcgaaccgctcggcggcaggagtaggtgaccaagggtgggggcgttggcccagcagccgaaggggtcttcagcgcgmccagacccctcggggctgcggggcggaagccggggcgtgacttccggcgccgccgggtgtggggcggaggtgtggggcggcttccggagaacccagmggcgcgggactggggcgggacttccggcgacaccggaagtgcattagcgccaggttggggttgtggggtcgcgtcagtgcggagasagcggtgtcctgcgcgtcttcgggtcagtacggggggccgcgtcgtagggactcactggcggtgcgcgacctgggctggctccgggggtggcgggcgcagctgctgtgacaggtgagtgccgccatcttcctacctgtcaggcgccgagtcgttccccggatgccccgaagaggagtcgggacactgcagggctcaagggggtgcaggggcagtcggggcatagtggcggatggggtgcaggtgggcttggaatgcagagggtccgtggtggtgcaggaggggtcgggtccctggaggacccgtggcggtgcaggaagggccgtggtgcagaagggttcagggtgcaagagaagtcggggcgcaggagtagtccgtggcggtgccagagggaccagggtgcgggagggatgggggcccggggcggtgcagaagatgtcggagtccaggaagagtcggggcgctggaggggttgggggcagaagggttcggcccggggtctctccccgccccctttgcttcggcctgggcatcccggggaagtgcgtctccagggaagcacttgggaggcccttcagagaggagaatggcctttcttctctccaaagagtggggatggtcggcttcaagaagggtggtgagtgtggagtgacggatgctgaagtgattaacacagcgccatgatattgttccccttttgaagacttccttttccttcccttccccctgaaagcagccaccgctggagggaaacattttaagacagctgttcaccggaataacacaagagcaacartaataatgtactcatttactaaaccaagttgaataaatacatttttccaggttgtgagtgaaaatagcttaaggtctgccaggtttttagagattttgtcatttaacttaaacgctaaaacattcgtcccttgaagcggataccattatagaaaagtgttaattgcttggaagtttcatttattgaagttcaagtgtttttctcttaaattcagtatgttggcctgtgagttacggtcataaaagtattgcaggaattatttacctctgaatgagaaagctcaagatagttatatctccaggaactttcttcgtcttctgaacttcccccaaccccagcagacacacacactgttctggttactttcctgatcaaattcgagtctttcaaaatagcttttgatatgtcccaggagttaaacacggtatgtaaataagttaaacacttgtaaacactcaccaatgtggaacaaatggagtgatctgttatcccctgggtttagacgctgcctttctattaatactgctcacaggagacagagtagggactcgtgtgcactggccacgtctcaacagcagtgtgaccttgggcaaggccttcctaagtcccgactccctgtcctctaacatggtgttcatatcagcctcattttcttactgggaaggttacgttatgtaatatrtgccagccatttttgcaaagtgctgtatacaggagatcttgagtgagtgtgtttccctcctcctctttttgggtagctatgttaggctgttcactttgggcatttgccctgaactaaaatccctaagtccctttccccaaggtgaaactaagatagagttttcatatttatcctgtcttattcttttcagggaaaagattttacatctgttgaatttcatccttggtttaaagttgttcttttaactactgagatcttttgaaaatcttgatggctatttatctgattaatggtatttcctaattgattgtcatccacagaattgatggtgtatgtattccatgccttcatttcgtcaatgacaaaacattttaagcaggttaatactgatgacagatttctgaggttgcctgtagagaccattctcttcctcgatattgctcagaagttgaatttggtgtctcagcccactaggaattcgtctaacagtgttattacgataaaatgttactacaaacttgattaaacttctggtggaaattccatcacattttatgcaattttcaatttatttctccaatttatttttaatgccacatggacattatattccttaaccattcttttgcatgtgattaacatttgtgaaattaaccacttaagcaagtgtttttgctttgatgaaagaaaaatgtttaaaatcctactggatatgaaactgaaagtaatgttttgtgttttttgtttcaaatgaaagtgtaaattaagaatttgttggcagggcgtggtggctcatgcctgtaatcccagcactttgggaagccgaggtgggcagatcacctgaggtcagcagtccaagaccaccctggccaacatggtgaagtcccgtctctactaaaaatacaaaaatcagcygggcatggtggcgggcacttgtagtcccagctactcaggaggctgaagcaggagaatcacttgaactcaggaggcagaagttgcggttagccgagatcacgccactgccctccagcctggggagacagagcgagattctgtgtcaaaaagaaaagaatttgtcgtattgctgtttcaagctactttggttatgttatctgccttcctcaaattatacacacttaggagaatgataatttctatagctacaaattaattaatattggaaatattgaaaagaatctggccaggcgcagtggctcatgcctgtaatcccagcactttgggaggctgggtcaggtgaatcatgaggtcaggagttcaagaccagcctggccaggatggtgaaaccccgtatctactgaaaatacaaaaaattagccaggcgtggtggtgggtgcttgtaaccccaactactcaggaggctgaggcagagaattggttgaacccgggaggtggaggttgcagtgggtcgagatcgcgccactgcactccaacctgggcgacagagcgagactctgtctcaaaaaatatatatataaaagaatcttttgagaaagagcagaaagctaagtgttcattgatgctgtttaatattacagcatttctgtcacgcaggctggagtgcagcggcatgatctcagctcaccactgcctccacctcccagggtggagcaattctcgtgcctcagcctccagggtagatgggaggcgtgtaccatcacgcccagctgatttttgtattttagtagagacgggacttcaccatgttggccaggctggtcttaaactcctgacctcaggtgatccgcctgcctgggcctcccaaaaggctgggattacgggcatgagccatcatgcctggcccaatattacagcatttctaaagatgaggaattcagcttgctaacacagtgtgtttatgggtttcattaattagtcgaatgtttggccagtgcctgctgtgtgtagagcactgtgctgcatcacagctgtgtgcctgttgttctgactgcttacaagcagtggggtgtattacgtacacggcaacatatactaagggcaggtgaactggacagactaaatgagtcaggagttcagaaggagcgtttattctgttaaatccatggtaggataaagagattgaatttttagaggggactatttatagtttcttgaaaataatgttttattgaaaaccagaaggacatttaatctccataagccttctttgtaatatggtaatctgtccaataatattgggtaaatgtgaatattttgaaggaaaataattacgttttggaatctcaggtttctctttgcttgtatttaggtaaaacagtgcatagaggttaaagaaggttatatttggagtgaagaagtttgttttttctctttacagttctataatcagtttattagtgtttagtctgttaaatacaatcgggtgccacataacaaatgatgttttggtcaacaacagacctcatgtaagatggtggtcccataagattgtaatactctatttttactgtaccttttctatgtgtagatatgtttaggtacacaaatagataccattgtgttacagttgtctgcagtattcagtacagtaacatgctgtgcagggttgtaggctaggagcagcaggctgggccatctagcctaggtgtggagtaggctgtgcacctagctttgtgtaagtgtactctgcgatgttcccacagtgacgaaatcacgtaacgatgcatctctcagaacctgtccccatccttaagtgatgtatgactgtgttgaaaggctcttaattggatttgggaactctgtctcatagggatgttatgaggattagtgactctttgtatttattgatccatttgagccttacagcaattctttgtagtagctcttcagcctctggtagatctgccagtccaccaactttcttccagtatctctccattaattctttytgttttcacttcccttcctgtctattttagattccatggtataccatttcagtagttttacaaacacctgccacttccttgtccctcttcccatgataccaacctgaaaaccccctaaactggwgattaaacatttaaataagatttatgctacgccggttgagcatcctaatccaaaaattcaaaatccataacatgacacaagtggaaatttccacaccttaccttgtgacagacaggttgtagtcaaaatgtgggtgcgcaacatagtttattcaggatcccctagggcaaaataaaattaccttcaggaggcctgctgtggtggctcaggccagtaatcccagcattttgggaggccgagctgggcagaccacttgaggccaggagttcgaaaccaccttgccaacatggtgaaaccccgtctctcttaaaaatacaaaaattagctgggcatggtgttgggtgcctgtaattccagctacttgggaggctgaggcaggagaattgcttgaacctgggagatggaggttgcagtgaaccgaggttaacaccactgcactccagcctgggcaacagtggagacgtcatctcaaaaaaaaaaaaaaaattaccttcaggctacgtgcatgaggtatacatgaaacataaatgaactttgagtttagccttgggtcccatccctaggatatcttactatgtatatgcggatattccaaaatctgaaagcatctgaattctgaaacacttctggtcttgagcttttttttttttgggggggccaaggactgagtttccatggaggatgtggtgtgaaaggaaggaagtggtgataggaccaatacagacactgggaaaaaatgtggagggtgtgaatacagagatgataagattactccagtatgaaaaaatctgtatttggtgccaagttccagggaggtgattgtaggaaatgcatacatttggttgtagttgatcagcagaaaaagattgccggcggtattgactattttgtgaagtggcgaagaaagcaagctaaaccaaagagaacaccatgcaacttacggagaggctggaatagccagtgagataaaatcagtgatccaaaacttataattttgatgagaaaggaaaggtgatattgtaatctctgcatttttggtaacgaacttgtagaatgtctggaatgcatcagaatgtttctacagatgaagttcttaagagagggaagggaaaccctttgctggttttatttgcttcatttaactgaagatagagtctccctttttctctgaggccatatcaggacagctttcacaggcttttgatgtggtttctttttttcctttacaaaacatactccataaactacaaagtaactgttttatgttgtaaagcaagacttacttctcctttaaaaataggcctacacatatgcaatttgagaataaaagatgattcttggctttctgcttgcggaaagatggagacttatttttccttattcctcccatgaagtacatctaaaaacactggacatatataaaacaaatgtaagagtgggccgggtgcagtggctcacgcctgtaatccaagcactttgggaggctgaggcgggcagatcacaaggtcacaagttagagaccactctggtcaatatggtgaaaccttgtctccgctaaaaatacaataattagccagatgtgctgttgggcacctgtagtcccagctacttgggaggctgaggtaggagaattgcttgaacccaggaggtggaggttgcagtgagccaagattgtgccattgcactccagcctggggaacagagcgacactctgttaaaaaaaaaaaaaaagagactgaaagatggagaaaagaaggtagacttccttcgtacattgggaccacagaaatgacaccaaacttagttctgtgagttttctttttgcctcatgtatctcatatgttgtgctggataagctagcagcgcaggtataaaaggactcagacaaaacaaggcccaagaaaagcctgctctctgtgtctgaaagaccaggaaaggggcagcctacaaatcacagaacttttcgatggtaagtactttcctccagctaaatatcacaggaaaccctgcagcaccaccctcaccctgctaatcagagaacttttcggcggtaagtactttcctccagctaaatatcacaggaaaccctgcagcaccaccctcaccctgctaatcagaggctgagcaggtacttcagattcccactcatgacaagctgggatgagatgctcctctctgcagggttgctgtcagagaagactggctgaggagttggggttttacttctgctgggtggtgacagagcacagcctcctttctgctagggtatcataagagggaccttgcaaaactcaggaactttactgctgccctgtggtcatgaggccacccccctgtggtgtgggggagactgtatagggagcagcacggaggcagccctgattcagccttggtggtgggagtggaagttcggcaggaggctgaactttccttctcatgcaggggtccgtggaggctgagtgggaatctcaacttccacctcaccgtccacatccacctggcagaggcctgctctaacagaagacttacatcagatcctgagtctgatgtcaggatttcaatggaaaatcactcataggaaaatctcaacctcagtaagaaaagaccactgatgccaacgtagagatgacacagagtttagaattatttgacaaggaccttaaagcagcgattgtagaaatgcttcaataaccaattaacattcgagacaaacgacaaatagcctcaggaagaaaatacaggatgtaaaaaagaaacacaaaatttcaaaagtgaaaaatagaatatgtgaaataaattcagtggatggcttagcagcagaaaggagaggacagacaaaagaagctgtcaatttgaagatagaacaatagaagttacccaatctgaacagcagagagaaaatagactggaaaaaagtgagcagagcctcaggggcccgtgggactttaacagaagatgcaacatctgtcatcagaggtctagaaagagagaaggacggggtggggggaaaacgtgtctgaagaaatcactgctgtatgtttcctaaacttggcaagccatacaccttcagacgtaagaagcagcataaacccagagaagataaacacaaagatgctaagacacatccaggccaacttctgaaaactgaagacagaagcatagtaagagagataccacttgacctgtagtgggaaacaatttgagtgacaatggatcttttttttttttttttttttttttttttttgagatggaatcttgctctgtcaaccaggctggagtgcagtggtgtgatctcagctcactacaacctctgcctcccaggttcaagcagttctgccctagcctcccaagtagctgggattacaggcatgccacatcacgcctggctagttttgtatttttagtagagacggggtttcaccatgttagccaggctggtcttgaactcctgacctcaggtgatctgcccgcctcggcctccctcacgcttgctggaattacagtcatgagccactgtgcctggcctgacagtggatcttatcagaaattgtggagggcataaggaagtggcaggacatttttttcaggtgctgaaggaaaaggactatcaactcagaattttatatcaagtgaaaacttccttcacatgatttatctccagctgacctactctatgaaaataacaaataaaggaaattctccaaacagaaaggaaatgacaaaagaaatgtgggaacatcaggagggaagaacaaagaatggacagcaaaaatatcggtcaatttagtattcgtttattttctaaattgtgtttggaatttgaagcataaccgtggtgtggttctcagtgtatgtgtaggaaatatttgtgattacgttataaatggggaaaggtaaagaagcatagaggaaagtaagatttgtatactttatgtgaactggtaaaatgttgataatcagtagactacaataagctgtaaatgtataatgtaaaacctagagctaccactaaaaagttatacaaaacaggcaaactcagaaatactgtaggtaaataaatatgaaattataaaaaatgtttaccccacgagaaggcaaaaaagagaatagagggagagagaatgaatgatacaccatgaacaagtgcagtttattttgtggctacaaggttggatcaatgtttgaaagtcatgagtgtaattggtcctgtcagtaggtaaaaaaaaaaagctactaggaaaaaaacatgatagaattcagcactcattcgtgaaagaaactcagaaaatgaatgatagagggaaacgttttcaacttgataaacagcacctacaaaaaaatctatagctggcatcaaagttaatggtgaaacacaatattttcacccgaatattcagggcaaagcaagggtgtttgctgtcactatagtaatttaagatagtactggaatttctagccaaatcaataaggtagtaaaaggaaatagaaggcttacaaaccacaaaggaagaaataaaactgtcctttttttttttagatgacttaatagttgacatagaaaatcccaaggaatccacaaaaaatcttgaactttaggttcagcaagaatgtacacgtttaatacataaaatccagttgtatttatactagcaattaacatgtggaaaccaaaataaaagtacagtatcatttaaacttacacaaaaaataaaaagagagatgttagtctaaaatggagaaaagatatgtaggactttttttttttagaaacggagtcttgctctgtcacccaggttggagtgcagtggcgcgatcttggctcactgcaacctccgcctcccsggttgatgccattctcctgcctcagcctcctgagtatctgggactacaggtgcctgccaccacgccctgctaattttttgtattttttagtagagacggggtttcaccgtgttagcyaggatggtctcgaagtcctgaccttgtgatccgtccaccttgacctcccaaagtgctgggattataggcgtgagccacctcgcccagcccgatactaggacttatgcagaaaaaaccttgacatggaggaaagtaagatctaaataaatactgtgttcatagattaaaagactcagcataataaatataccatttctccccagattgatgtacagatttaacacaattcctatcaagatcccagcaagatttttgtagatatgtaaaagattattcaaaaatgtaaaaggaaggacaaaggactagaatagataaaacaaaatggagaaagatttaataggaatcactgtaactgattttaagacatacagaacaataatagaaactgcttgtattagtccattttcacgctgctgataaagacatacctgagattgggcaatttacaaaggaaagaggtttattggacttacagttccacatggctggrgaggcctcacaatcatggcagaaggcaaagaggagcgagtcacattctgcgtggatggcggcaggcagagagggagagcttgtgcaggaaaactcccccttatagaaccatcagatcttgtgagacttactatcacgagaacagcacgggaaagacctgcccctccatgattcagttacctcccactgggtccctcccacaacacattggaattcaagatgagatttagctggggacatagccaaaccatatcactgccgttggtggaaggataaatatgtagatcggtggaacagaatagagaaccaagaaataaccccacacaagtacagtgagttgattttttgacaaaagtccaaagcagttcaatctaggatggatcatcttcaacaaatgaggctgggataattggatacacaggtgaaaacaaacaacaaaaaaaccttgacttaaattttacaccttataaaaaggtcagtaccatataggtaataaatttagatgtgaaacagaaaactataaaaaattcaggagaaacaggagaaaatstttggcccctagggattcatgaaaagttcttgtcatgactttaaaagtgtgatgcatagaaaaaattatcaacattaaagaagtgttgcttcatgaaaaactcttagaatgaagagcaacagattgggagaaatgatttgcagcttaacctatgtgacatataattcatactatagagtatgtaaagaactcttaaatctcaacagtaaaaaacccgaataatactgttagaaaatgggtgtgaagagacacctcactgaagaggatatgtggatgacaagcacatgaaaagatagtgtcactagccatcagggaaatgcaaattaagatcacagtgagatattacacacctaacggaacagctaaataaaaaagtagtgacaaagggatgcctgcacttgcaggtatacacagcactgttcacaatagcaaaggtatggaatcaacctaagtgcctgttgacggatgactagataaataaaatgtggtgcgcacacacacacacactctgcaataccattcagccataagaagaatgaaattatgccattcgcagcaacatggatggaaccagaggccattattttaagtgaaataagccaggcacaaaaagtcatgtctcatgttctcacatgtgggagctaaaaaatgtgaacacatggaggtaaacagtggaaaaatagatagataatagagaccgggaagggtgtgagtygggggcggagggaggatgagaagagagttaaaaggtacaaacatgcagtatgatagaaggaatacattcagtgtttgacagcagagtagggtgactatccttaagaaagcagtatcttaggccgggcgcggtggctgacgcctgtaatcccagcactttgggaggctgaggcgggtggatcatgaggtcaggagatggagaccatcctggttaacactgtgaaaccccgtctctactaaaaatacaaaaaattagccgggcgtggtggcgggcgcctgaggcaggagaatggcgtgaacccgggaggcggaggttgcaatgagccgagattgagccactgcactccagcctgggcgacagcgagactctgtctcaaaaaaacaaaaaaacaaacagtgttttactggggtggtggacaccctaaatagcctgtcttgatgactgtgttgtatacctggcacaaaatttctcatgtatgacaaattttcataaaagagtaatgacaataccaaatgctggtgaggatgtggataactgaatctctcatgtgttcctgatgataatgtagaatgaaacagccaccctggaaaatactgatagtttgacactcttagaaaaaaaccacaaaaactaaacatgattaaacataagcaattctgtttccaggtatacccaagagaaataaaagtatacacatacaagaaatttgcactttaaccttcataataacctaaaatatggaaacaaccaaatgtctgtcagttgtatttggcaataaaagggaatacattaccactatgctacaacatagatggactttgaaatcgttgtgctaagtgaaagaagctggttgtcacagaccagagcgtatgttgtatgattccatttttatgaaatggccagaacaggcagattcatatggagagaaagtaaattagtggttgcctagggctagctgggaagtgggtgggagaaatgaggagtgagggcaaataggtgtggggcttcgttttggggtgataaaaatgtacagttgattgtggtaatgatcgcacaacttcctgagtatactgagagtcattgaattgtgcactttaaataggtgtcttacatggtgtgtgaatcgtatatcaagattttttttaaagctaaatatacatttaccctgtgactgagcagccttattcttgggctgtttatccaaaagaaatgagaacttaggttcacataaaaccctgtatattattgttcatggcaactttattagtaatagtaaaaaaattggaaagaatatatatatatatatatattttttttttttttttttgcagcaggtgaatggttaaacaaatggttaaatgtccatactgtggacactagctagtaataaaaaggaaaaaactgttgatacatgcagaaaattggttggatcgtaaccattaaattgagtggaaaaaagaatctcaaaaagggtaactgctctttgatcatatttacataacagtctcaaaatgacaaaattgtagagatggttacagattaatggttatcaggagttgagggatggtgccagggagttggggtaactaatgggtagtgtgggtgatctgtatggtgagtggagtgttttgtatcttgaacatgtggcacctaaaggaatttatatatgtaacagaatgacaactatacacacattatactaatgtcagtttgttggtttagtgaaattaactaacaaattaacagattgtactgtaatgatgtaagatgtaaccactggggaaatatggaccatctttgcaacttcctgtgaatctgcagttatttcaaaatacaaagttgaggccaggcacaatagctcacatctgtaatcctagcactttgggaggctgaggtgggtggatcacctgaggtcaggagttcgagaccaacctggtcaacgtggcgaaaccctgtctctaataaaaatacaaaaattagctgggcatggtggtgcatgcctatagtcccagttactctggaggctgaggcacgagattcttgcttgaacctgggggatggaggttgcagtgagctgagatcgtgcaactccactccagcctaggagacagagcaagactctgtctcaaaaaaaaaaaaaaaaaaattgggaacttcataactcacatgactgttttggttgagagttactagaagcttgtgattaagttaaagcttttaaaaactgtcctaaataataggcaaactgtcttccagttttctaacatttttggattatgcttggcttttaaaaaagttttaataacaaaatttatatatgagagttctgcatagtatgtaagaaacaggaaacaaagctaaactgtatatactcacattcatatttagaaagacatttagaagagatatttagaaaaatgctacgacttccttgaattctaaggttaaatatgttgatttctactgttttatttataatattaaaaataaatgaagtgaatttttataagtgacaatattttctcttagaaaaatattttcatccttggtatttaggattataattagaatgcttaataaactgaataggaaagatcttgtttatgttattaataacctttatggaagacactctaaattttttgtgaatrcatttcatctctgttaagaatactctcttctatgtgtagataaacttatttttcaaaacaggctgacttgtttaaaaagaagggaacgctagtgattttaaaatattgtagaaaaggaatcattctataacaaagtaaggaggtgttagggctattgagtaagtgagagccatttggaaggaaaggagtagcatttcagggatgtgtgtctgcacctggtaatgtctaaggagttgataatgaagagggctgggcacaccagaaataaggtcttgccttgaggctcaggctattgctgttgcgtaagtcaccattgtaactgtctacttggaatttagatgtttacgtagtccttatgtgtattttaaaggttagcgtatttttcctttacgctgatatattcacagaaccatcccctgctcttgggacttgggccagtcttttctctaaaagaagatgatggaggcatgttggcgtctgggaggtcgtgggcgtgtcctgctttgcctttgactgcatatgggtcaggcattctttgacagtgaggtgctgagctggcctgatgataggattgtgttcatgggaggagggatcagtaatagcaaaaaatcagcaggtaatgttcaaaatagcaaaatctgtagttgaagaaagaagatatgtgtgtaaatatattacctaagattgtagtaagtaacgtagtgatataattgggaggaaggatggataataacagggaatgagtagaaaatgcccaaagtgggtaaatcataatatttaaattagagatttgaataacttaatcacatgtggttagtttgaattsagatatgctgtaaatayacacgctgaatttcaaagaggtaatcataaaatatcccattgttttttatgttgactataaaatattttaaacgtattgggttaagtaaatcattaaaagtaatttcatatgcttttatttttaaaaatgtggacactggaaaatttacatccatgacttgcattatattcctattggacagcatgagtctagaatgtgtagtctagaatatgcaattaacattggttccctcgggggagtagactgtgyctggggaattccgttgggttaagggagagcaattttttttttaaattttaaacctcttttttgccatttgatacttaagatgttaatgaaatttgataaagaaattacttctttaataaaggctgtggtccctaccttaaaacatcttaatttgtcatattccaaattatatagttaatgttaactatagtaaggaagcttgtaattagaagtcatcattatcttcttcactgtttttcttttgtttcaactygctgtatcagaaacactgttttttcttgctgtttttagcttattgcaggagtgaccaggacactacctcctagaagtaatgcccacagaaagcgcaagttgttcgactgctcgccaaacaaaacagaagcgcaaatcccatagcctttctatacgaagaactaacagctcggagcaggagaggacgggactgccaagagacatgttagaaggacaagtaagctacgattgattagggccttattgattgattgatttttgagacagagtttcgctcgtttccccggctggagtgcgatggygcgatctccgctcacaacctccacctcctgggtggaagtgattctyctgcctcagcctactgagtagctgggattagaggcatgtgccaccatgcccggctgattttgtatttttagtagagacagggtttcaccatgttggtcaggctcrtctcgaactcctaacctcaggtgatccacctgtctcgccctcccaaagtgttaggattacaggcgtgagccaccggccccgggatcaaggccttattttaaagatggtgattgtgtctgtgacgttataaaagtagccaaatatataaaggtctccaaagtaaaaaaaaagggttgggttactaagaagaaagatcacccctcccaaattcccccaaaataaactcattaaaacttctatcaaatacaacagcatacacagatgggttagcatatgtatactaagtaataacaaatcaaagtgggtatgagagttgggattagttttattctttgtacaggcttgcggacagtacaattctgggttttctgtctctaacagtctcaagaaaagaagagtatcatatccttttaatgatctctttctgttctctgaagagtttttggaatcagatcttttagtgactttgcttaggtttatccttgtctctgccgccatgagtatgtcattcttggattaaaatgaactaattatttttgataaagataagttttgcttatactttttctagttcatttatagctgatgaaattctgtcagaatttttaaagagtgttgtgaagtctagacgcagtatatttatattaaaataagctctagatatatctaatatatggttatatatgtatataactatatgtaaacttacaaccattccttcacaattagaacaaattcatcagccataatgctgtaggaagataaagcttaaacctgagaaattggcttctgtgaatattggattttgttaggaccatgtgggtaactttatgccaggacttcgaggccgggacctctacactgaatacagcagtgtgaacccagaatccgacatgactgttgccacgaagaggatctttacctcaaattagatgattatgcattgaataaataaaccagtacctggttctaatttctataaaaagtgattacattttaacttagtgttcaaaaaaattacaaaaatagctttggtattcttagtgtattactttgctaggactcccataacataatgccacagactgggtagcttaacagactgggcagcttaaacaacagacatttattttctcatggtccttccaggcagctggaagtcctagatcaaggtgtgagcagggctagttcctcctgaggcctctgtctgtggctcgccgacaccatcttctccctgtgtcctcacagagttgtccctctctgcgtgtcttgtcctagtctcttcttacaaggacccctgtcatactggagggccttcctttatgacctcattttactctcaccacctctttcagggccctgcttccaaacacagtcgcatgctgaggtcctgggcctgtggaccccgttcaacacagcacttaggagacagcagagctatgcggcaggactcctgtggtgggggcagtgtctgtatctgtatctgctgtctgatgtgggaaccaccagtcacgtggctgctgagcacttgaaatgtagccagtgtcccgggacatgagattttaatttttaaaacttttaattacattgaaatttacatagtcagatgtggcaagtggctaccctattggacagtgtgagtaagcagtccaagataggttttcctaatttgtaggttcacgtacatttctagcagtggaaaccctgcagcctcccctgctggcatgttctagagttgtctcctgcctggggtgaaagtgttcttttctgggccctgaatgcccattctcctttgtgacacagcagaggcggtgactgcatctcatggtaaccctcacgaaggtagctcagaggtctccaagccgcacggcctcgtcctctgctccacctttggcctgtgtctcccacgctcgctccctagacggagctcatttgttcaatgagcagtgattcggagtgggaccggtcagcatgttctgtaagtggcccccgtgaggtgctctgccttccccctgccctgggcgggagaggtgagtggcccccgtgaggtgctctgccttccccctgccgtgggcgggagagagctgtggtgtctgccgcacgcgtttggcatggtaggtgtgagggggrcgatctcagaacagggaggtgttgattaacgtaggagtgggctcgttctagacagtgtagagtgacgccctttcagttgttgaggagcagcaatatagaagagagggcagatgagtctgagggagacatcgtgttaggtttaactttatacatctcagatttgccagtctgaagtagtttagaaagccaggttcgcgcaggcgcaggaggtctgtcgttgccgagaactgcgacgtccacgtgcacacagtgctggctgcggcctgaagagctggctgcttcccgcacgtgcgtgcaggtgctttcaggtgtgtgttggtgtcgatgtgatggaagaaattcatttaaaagctttgctgagtcacggcagtagtgtcttgagttttctcaagtggtaccaaaagttcaacaactcgtttgagagtctgtgaaattgaatggcacagaaagggagaactgatggaaaaggttgaaagtcattttgtaagcgcgctcttcctgggctcaagttgccctctagtgggacaagtcctcatttctctgtgcatttagtttcttgattataaagtgaggttaatgctgacttctcagctttcttttccatagcaattccttttttttttttttttttaaatttatactttaagttctggggtacatgtgcagaacgagcaggtttgttacgtaggtatacatgtgccaaggtggtttgctgcacccatcaacctgtcacctacataaggcatttctcctaatgctatccttcccccagccccccaacgccccgacaggccccggtgtgtgatattcccctccctgtgtccatgtgttagcaactacttttatattaatatgcacttaatattcaagtatatatgacatgatgtaattagttgctgaacaataagagccttaaaacatgatgggtatagatgagtaggaactgattctgtaggaggagattggccttgtgtaggagtcagaagggcttttggggagggatgcttgtggggagggatgttcacagagtgggaatggggcgtgcagaggccacagggcagggaaaatactaatagtgattctcagttcagcacaagcttatgtttcatagttattggaacttctttttttttttttttgagacggagtctcgctccgttgtccaggctagagtgcggtactgatcttggctcactgcaacctctacctcctgggttctagcgattctcatgcctcagcctcccaaatagctgggattacaggtgcctgccaccactcctggttaatttttgtatttttagtagagacgaagtttaaccatgttggccaggctggtctcgaactcctgacttcaggtgatctgcccaccttggcctcccaaagtgctgggattacaggcgtgagccactgtgcctggctgggatgtcctttttgatggcctagttttaatttttatagttacattttcctttctttttttttccatgttcttcattggttttagaaggatgtttagaggctatagtaccaattcagtagattcagtatttaaagtagtatatatatgtgggtgtgcgtgtgtgtgtgtggtttgtaaaatttttgtgagaaatctgtgataactgtaaaactcacattgctaaaatgctgtcatttttccctaaaatttctgtcttttaagttgatctcagaaggatttaataaatatagtgcatctttttaaaaagtttacaactcggccacgcgcggtggctcatgcctgtaatcctagagctttgggagaccgaggtgggcagatcatgaggtcaggagattgagatcatcctggctaacactgtgaaaccatgtcttaactgaaaatacaaaaaattagctgagtgtggtggtgggcacctgtagtcccagctactcaggaggctgaggcaggagaatggcacgaacctgggaggcggagcttgcagtgagccaagatcgcgccactgcactccagcctgggtgacagagcgagactccatctcaaaaaaaaaaaaaaaagtttacgactcatcagaataaaaaagtttatgctatatgtaaatttgaaaagtcccattaagtatcagccaggcgcagtggctcacgcctgtaattccagcactttgggaggctgaggcgggcggatcatgaggtcaggagattgacaccatcctggccagcatgtgtggtggcgcacgcctatagtcccagctactggggaggctgtggcaggagaattgcttgaacctgggaggcggagcttgcagtgagccgagaccacaccattgcactccagcctgggtgacagagcgagactctgtctcgaaaaaaaaaaaaaaaaggtaagtattgaaacactattttagaaatatttgatggggatttttttgaaaattactctgggtgttgggagtaggggacacataccaaatagtgcataggccatgccctcagggaggttggagtggcacatggctgtatctagcaggctcctgttgactggtgggtccaagcagtgagtgcctgtgatatgtttggtgctcaggacctgcttacttgctggaccacacttgacaatgtagctccttcccttcgccttcccaggggtgcgggaaacacacaggcatgaagagcgtggcctgggcaggaaataaaaagttaatgttttcactcaattaatagacatttggctcttttttgtgaaatttttctttttttcctcttcacaacactcttttaggtgttatgtcgagtgatgggagagtgactgtgcttttgcttaaagtgcagtgggtgtggcgggaactctgcaaaggtgcctcttccatgagggtctagcagattaaaatacttgtaggatagcgtatgatggcactcagaggctgtttataatagttcatttatgggagctgccgcctttctctccaaatttggaagttttaaaataaggtaggcttatgtcctctcttgtaaagggaaaaattgtgttattttgaaggagtgtttattttcaaatcccatatcatactaggtagccatttatacaatttgatttatagtctccttggcagaaatttggaactttaaactctttaagcattttatatataaaaatatgtaataatacaaaataagagtttacaataaaagataattcactttggaaaaagcatatttgtacttagagtttttcattcattcattcattttaaacaaagtcttcttctgcaggattctaaactgccttcctcggttcgcagtacacttctggaactgtttggtcaaatagaaagagaatttgaaaacctttatatcgaaaacttagaatgtgagtatctcctattttaatatacttttatagctttacctatccatagtcaaatttatgaatagacattcatcactatattagttttctgttctgctgtagcaaacttaaacttattttagtggcttaaactaacacagatttgtcatcttgcagttctgtgggtctggtataattcccacgaggactccgtctcaaaagtaaataaataaaaataaaaaataaaaaatacatggatcttatcattttccctacaccaagtacaccataaattgagaaaacattgatttacttttttattaatataccatcatttgaaaattgatgcatatactatatctgacttattaaagacaaatcaaaacaattttgaattagcttggctttaatttatcttttttttattttggaagtaatggccatatgtgcttaaaaatttatcagacagtataaaaagaaatctaccattacccctcaagcccatcgcactcttcaaaggaagacattttctgcatgtttttgcttttggttcttttggtggttagtcctgtgaatgtaagtaatcatcttctggttttagatctatccgctttagtgttaatgcttcacagtgaaataaacaggtcctttgcgctgctctattactttccagtttttctccttcagggtttgtgtttgtaaaatttatatatataaagacagggtctcactgtgttgcccaggctggtctcaaacccctgggcttaagtggtcttcccaccttggcctcccaaagtgctgggattataggtgtgagccaccacacccaaactataaaatttgtactagacaaatgtaactacaatcaagtctttcatgctttatctacaggttgattccaaaggttgaatactaacaaagagcatttccattgttaagctgtttttcactctgtaactaagtggtgtggttggatgaataatgaagagaatataatcctctgtcatttaaactttgcttttggaaattttaatgttaatactggattctcctttttaaagagtccacctttacaattcatagagggaaaaatcatttcaacttttttgttttttttttgagacaaaatcttgctctgtcacctaggctggagtgcagtggcgtgatctgggctcactgcaacctccgcctcccaagttcaagcgattctcatgcctcagcctyccaagtagctgggatcacaggcacccaccaccatgcctggctaatttttgtatttttagtagagaaggggttttgccatgttggccaggctggtcttgaacccctggcctcaagtgatctgcctgcctcggcctccaaaattgttgggattacaggcatgagatactgtgcccagcccagaataatgtttttaatcgtgcagaatcaatcactatggaaactatgttgaaatgcgggtgctgtctttgagaccctgatagcagtgtcttccacagtgtagcaagtgtgtgagcttttacttttggaatggtatctctaatggtttctttctttctttttttttttgagatggagtgtcactctgttgtccaggctggagtgctgtggcgtgatctcggctcactgcaatctctgcctcccgggttcaagcaattctcctgcctcagcctcctgagtagctgggattacaggcatgcaccaccacgcccggctattttttgtattttcagtagagacaccctgttggtcaggctggtctcaaactcctgacctcgtgatccacctgccttggcctcccaaagtgctgggattacagacgtgagccacctcacccagcctcgaatggtttctttagttttttgagaactctatgaattgtgatcttgcttattagaatattattcatgtctttgtttatataacactaatatatagcattttttctgtgtgcgagttttggaagtggtgagtacacttaaacataaaaacatactttagatttttgaaaacttttttcttcccagtacgtagagaaatcgacactcttaatgaacgtttagctgctgaaggacaagcgattgatggagcagagctgagtaagggccaactcaaaacaaaaggtaaggtgaatcccatgaaagtcttgtcctgcagattatacatgcaggaaatttggaatttagtgaaggatgctggctggtttgcgttttgctgtcagcagacctcgaactatctaattcaggtgtgggtctaggagaataaggagctcggttcttgttcctgttctgccatggctctgtgtcactagggtcaaacgagcctttctgggccccctttcttcctgtgcaagacacaagacccatttgygaggctataggtctttgattgtgtgattgtgtttgattgtcactctctgtccctgcagccagtcacagcaccagccagctctcccagaaactgaagaccacttacaaggcttccaccagcaaggtatgcaggccactggctcttgagccatcatgtggtggttaaggtgtgcagatgtgtactttaagttgtttattttccaattagaaaggcatagcagaaaaagataaatggttttaagggaaatttagttttttaaaggaatgtcctggctgggcatggtggctcatgcttgtaatcccagcactttgggaggctgaggtggatggatcacttgaggtcaggagtttgagaccagcttggacaacatggtgaaaccctgtctctactaaaaatacaaaaattagctgggtgtggtggcgggtgcctgtaatcccagctacttgagaggctgaggcatgagaattgcttaagcctgggaggtggaggttgcagtgagccgagcttacaccaccgcactctagcctgggcaacagagcgagattccgactccaaaaaaaaaaaaaagaatgtcactatgcaggcatttacatagtagcttaccctagtacctacagggattaatatatgatgtattagtaaatatattgtctttagagggaatatataatttctcttgttaattggcttaatataaagggtctgaatttggaggaagctaataaataggtacaaattagtgaaaattatgttctgagctaaagttacattttagttcattatgttcttttcctcagtttcctaagtgtgatcaggaagtgaaggtctgtctctaaggcaaatagggatgttcatggtttttgtattttcttaaagtatctcgtgctgaccttcttaaagtggaaagggtttaattgtttgggaattcatttgtctgtgatggattactatcaagtgatattttgaggtaattttgtatgcatctgtactttggcatatttcaaggatacaaagataaattgaaattttcagtgatcttgctatgatggtgtaagtagttcttgttagctttttatttttccaatttgtttccttgagtttaaagttaatttagcatgacatctatagtaagattaactgcaattaatagagcaaatttagtccttctgccgtttgtcctcacttgatagtctttggtaattctttgttattcaaaagaaaatctgaaattgttggtattttctactgtactttccttcgataacatctagaatgtaagttgctaatttatttgattttttttttggccatgtaatgtctagcttatacttacaagttttgaactttttaataaattaacttgaagctttttcttcataatgaagtgtgaaattatgttcttcctcatttaatttctttttacattatcttggattatgttgttttttctggtgtgtacagttgtatatatacaatgtatggtcttggaattccaaaactttctcattattactgaagtagaggaagaaatgattatataaagttgtcctttaccatgagcagtaaaaaataagatttggacaagggtaaggatatgtatagtaatgctttgctttaaaaaatgtattagagatatttaaagcccagtcattttaggtactagaaattcatctgaatttataagaagcatattactaatgatctttatagcctttgcacactgcccatacccattgtaaaaaataactatgaaaatataagacatctgaagattgaagaaataatttggtaacagaatatattctgattcgtactacagtgtggattcttggtgccaaagctaagcatgaatgcaacaagagaaaggctacagtctagctttattactttccctccttctgacccagagccacgaaaagcaartaacgtgcctggtgggatagcgggaacacaaaagtgtgttacgtgaacgcagaagaggtttttccccttcctgggtggctaatgagatttctgatgcctacgggggagggaagtgaggaagtctaacctgcagccctctttaaagaaacttataaaaatcagaaagggctttttccacaaagaaagacacttatcttctcaaaaatatttgcaaacattttcacaaccgtgctttagattgcgccgcagttcaaacgatctgggatgatgggcgtgagcgtcagtttgcggctttgttctgctgcttttctgttatgaacgttccctctaggtaattcagtctgttttgttgggcctcttggtaatgacgactaagtcagcttttctaaggaaaaagagttaaggtaatagatggtcaaagtgcagtgggcattttggaagcaacacatgagaaaatatttgaaaacggcacatgatcccctgcacagctccagcagcacagctccagcagcacagctccagcagcagtgcagtcagagcctctgggaaggagccactctgttcttaccctgcgaatggagcaggtgaagaatgtractctagtagtttgtttcttataatactgttattaatgttagaagtggtgagagatttggaaaatgaaatttacgacaatactgttacttatgttagaaatggtgagaggcctggaaaatgaaatttactacaatacggttattaatgttagaaatggtgagagacttggaaagtgaaatttaccaccgcttattatggtgggaggttgtgtgtgtcctttaatttcactccctcctaaaatgttacaatgttatttaacatctgaatgacactttctgtaagcaaaagcatctcccatgttgtggaggcataattttcctggattgaataggatattagtgttcagaaagaaaagaggataatgatgggtttgaggttgaacaagtgcttttgcaattcctctgaccagttgcagtggaagttcttcctgttactggtgaaaatgttggcctcttcctcagccttttatatcactgtatccgaggagaataactcgagggtgcggacccaaatccatgtgacagtgggttgtgctttatggtcttaggaagaatgaatttagatgtgtttttcagggctatgccaaatcagtgtttgaaacaagttgtgtaatgccactgattttagttcttcacttagtttttttgttttattctgaaaagtctacattattctgatttacttaacagctggacagctgttttcttaccaaagaaaaatttaaaaagcaaactctgcagaaatcgttgtgttgaattagtttcttcctcactcacttcatatttttcctgacaagagggcatgagaactgtctgctgtgtgtgtcgtcattcgagacgatgcctttctgtggtccgtgatgtgttcgcgttgtctcctgctgggctgagcatgtccaaaaggccaggggcctacggccgcgctgccctgcatcctcatagctggtgcctgttctgagcgagcgccaagtctcgggcaaaccggcacacctattagtgtcgtcttttgattcctccccaccacaggctttttttacacttgatgatacgtggttggtgtaaattctcaaaaacagcaaaatgtgaacatgtacagcgatcagtgtcattagctaaagttaagggtttgggatgtccttcctgacttttttgtatctgagtggctagctaacgatttgtttaagaatttggaaattttgtctcatggtttgggtttgggggagaggacctgaaacacctaaatccacccttctgcagtgagaccttccatgcctggctgtcagactgaggtgggggagcctgcacaggtcgccgcgagagctgcacgcattctctgtgatatgagctgaacccgccaccctttccacgcagggcgtttcagctcacacttgcgctgtgttccttgatgctttaactgtcctagtcagtgatttgtgcattttccaagacgtctttttcgttttctctttcttgacttagaaaaatttacttcagtaaattgtttcacaagactccccatcttggtttcagattgtctccagctttaagaccacgacatcgagagctgcctgccagctcgtgaaggagtacatcggccaccgggacggcatctgggatgtcagcgtggccaagacacagccagtggtgctcgggactgcatcagccggtgagtcgcacacggacctggccagcctgcggaagcatggctgtgcttaatccctgagtgatggacattcacttttctgtggcagaggaaccctagatgcaaaagcgtcatggaggagtcagtggaaccccccacacattaacccttggtgatgcttagtgttgtggcctgaagtcctgcattccgtggtcttgtgggagggtgtgcagctgcaccttgcattttgtggtcccgtgggtgggtgtccagctgcatcctgcattccatgctcccatgagtagatgtgcatctgcaccctgtcttttccaggtccccgtgggtagggcgttgcaactcacagtgaaccaagtatctgaggaaagaaatacttgtttggaatggatttaacttaaatgtgttgaggaatcagtattccaattatttgttttctttttcttatttgagacggagtctcgctctgttgcccaggctggagtgcagtggcgcaatctcggctcactgcaacctctgccacctcctgcgttcaagcgattctcctgcctcagccttcccagtagctgggactacaggcgcccgccaccacgcctggctaatttttttttttttttgtatttttagtagaggcggggtttcaccgtttagctaggatggtcttgatctcctgaccttgtgatctgcctgccttgggctcccaaagtgttgggattacaggcgtgagccatcgtgcctggccctctttttcttatccacagccaagtgtgtttctgatttgtggatgtatttgacttttttcccacaagtggagtgcagttgagggacagtagtttggtactcactgaaagtgaacactacctgggcacgtagccagcagtggaggctgatggcctcccccagcagatgtttgcccacagaatcacaggggcagagtgtggaaagtgaccctttgttttctctaaaaaaagatattttatgaaagctatctaaggtggcataataccccttgagataaaaattgctcaaattacaaatgatgctcattgaaaatgccgtcccagcttgtgagacgttaatcactcactggactctgctttttagaggcagaagtgaatgtgataaaccatttgaatagcgaagaaagttcttgcttctcctttgaaactgttttcatggatgagcgccttggattgctttggaaatcatagttttaaaaaaagaataaaaaggtcctttctgatatttccgaaatttcatttggctaattggtgcttatttctcagattttcccattaaatctacttaaaaaaataatggctataagagaaagacccaaagatccaaagacatgcttatctcaacagttgtaactggatttggatgctgtttgaatttgaactctgggagatgttctggaacattttaatactttaataaaataatgaaactgtgatgggaacgacctctgtctgtcattttccagcatgatgcagccagcctgatagtaaagtaggaaatcgagtctctggttgtccgttagctgacttcatggcctcagacaggtcacagcttctcccatttgggaaatgttttctttgatcaattgaagcatacagagtaatagaatcaaaggtggaagagatatcagtggtcgtgtaayttcccatttttagagtatttgtcttattctttcatttgaaaaactataaactgatgatagctaagttccgacttcttcatttycatcttgcagatcacacggctttgctgtggagcatagagacagggaagtgcctagtcaagtacgcaggccacgtgggctcaggtaagcactgcctaaggagtgccgtagccagaggccgttgccttctccagtgtgtttttaaaatcgtgcatgataaagccagctgctactgtgtaggaagccttactgtttcggttgtcaggggacagtgtggtctgttcagagacygggataactctgtcttgagcttgtatgggctcaataacagggaaaagcttaactccctaaacaatgtacatatcatgttagtctgcattttatttaatattgtatataacccatatgtaggaaattttgtaactgaaatgtgtgcgttatttttcacaaaatacatatctgttttagaggtttacttttgatgtagtgataacttggatgtattcaataaaggatactccatgaatgtgcttgcgtgcccgtagttaatgctgtccacggagtgaatgctgtccacgtagttaacgctgtccatgtagttagttaacgctgttcacgtagctcttttctgccttttcacttagagctgtgtgtgtaccagtttcctgaccagactttgtttctgtttcctctcscacrtgctgtgtggttccttcccccgcagtgccctcttcacttgctcactcgccctccctcacacctccacgctgccaggctgagaggtggcatcgcctgtgtgcacagagggacaggtgtgggtggggcccgtggctctgagcgcctgtctgcccgtccacagggccctgatgagctgtggagccttcccctcccctttcccaggacctcctctcctttggccattcctgctgtcacagtgtcttctctttcttgccctggacatttccccttagtgtgtagacaggctggcgcctttcccgtgttagaccccctcctccgtgctgccttcttacctgtcttcctcccctggcatcccacagactggctggggtgccacagtgtcacctgcagttttctagcagtgcctggcgtgtgtgtgattggtgctcaaatgtagagcaaaacgctgttacaggaacgagtgctgtattctgtttcctccttcaaatttcctcttcagaaacgttaaaaaaattaaatatatgtgcataggttaaaaacttaagacttgaaaatcgaaatgactccttgatccctgggctacagaatggatgttgtgttagtaggcatgaaatcagcattcatcttgtacatctccatcagagctcttaggtgagcaggtgcgttgtcaatgagccagttgtattatgataggtgtaggtcttaatggtaggcttaaaatactcagtcaacaatgctgtcatcagatgtactgtcatccatgctttgttgttccwtttatggaggacaggtagaggagatgtagcgtaattcttaagggccctgggatttttgaaatggcaagtgagcattgacttcagctgaaagtcaccagccgcattcgcccctaacaagagtcagcctgtcccttgaagtttcgaaggcatggatgtctcctttctagctaggaaagtactagacagcatattcttccaatataaggctgtttgtttgcattcaaaacctgttgtttagagtaaccatcttcaccaatgagctcagctggatcttctggagaacttgctgcagcttctccatcagcacttgctgtttcaccttgtacttttatgttgtggagacggygtcttaaacctcataaacaactctctgccagcttccagcttttcttccgcagctccctcacctctcacagccctcagggaattgagagtcagggccctgctctgaattaggctgcagctaaagggaatgttgtggctggtttaatcagtccccaccactcaaacttcctgtgtatcggcgttcttgtcatttgtgtgttcactggaatagtgctcttactttccttcgagaacttttcctttgcattcagaagttggctgtttggtgcaagatgcccagctttcagcctgtctcagcttttgacttgccttcctcactaagcttaatcatttctagcttttgatttaaagggagcaatgtrcaactcttccttgcattggaatacttagaggccattgtagggttatgaattggcctaattttagtattgttttgtctcggagtagagaggcctgagcagagggagagatgagagaaaggctggttggtggagcagtcataactcccacaacatttattgagtaagtttgtggtcttatgtgggtgtggtttgtgcctctccccaaaatgacaatggtagcatcagagatcacaggtcactattaacagacataataataatgcaaaaatccaaggtcaaggtgctggcaaaaagaaattaaaaaaaaaaaaagaaaaagtttgaaatattgcaagaattaccagcgtgtgtcacagagacgtgaagtgaacacatgctgttgggaaaatcgtggcaattaggtgttcaacgcagggttgccacaaaccctcaatttgtaaaaaatccagtacctacaaagcacagtaaagtgaagggtaataaaacggggtatgcctgcatccacacatagacgtgtacatacacgcatagtcatttctgttctctagaggggatttaattttcccttggccagcagatagagtggacggcaagccttgattgacttaagggttggtggccggtgggtttcaggctttaggggttctgctgttcctctcgctttcccttgttctaagggagttgtccttcaagggtgtgtcttcacaggccctgagctttagtttcatctgccagtcctctccgtgttagctcttagaggctgctttctgcttggtgtccgccctcatgcccagtttaggtgctgtcagtgcctgggggaggcgagcagctggcccgctccttcctggctgcctcttctgagggatccagcctcagttcctgtcayggccgctcacgtctggactgcaccctygctccggctggtctctgtgccttgagggagtgcgtcagctagtggggcttccagtgcttccctctggggcctctgggcctgggggcctcagggcttccatgatgacttcaagccttgtgtttattttttgctgtttatctgcagcttttataattaattccactagggggtctgagtggatccacagaggctgccttgtcccagcaggaagaagtctcttcctgttcttgtgcctggcttgtgttttttattggctttccgttcttcacgcaggttaattcagccttcccgtgctcacccacaattcaaccttcccatgctcacccacawttcagccttcccgtgctcacccgcagttcggccttcccgtgctcacccgcattcacttcaaccttcccgtgttcactcactcaccgtcaccatctgctcttctggcctccagtattcggtgtcgtctcttcgctcatcgtctctttagttctttctytgtgggtctgttcctgtttcttccaggatgccttctgcatttagagaggtgtcagagaggggagaagacgcctgtgtttctggcacgttgtcgtgttgcgtgtgtctctcctcttcctcctggggacttgtgtttgtgtttttccactaggggatttttctttttttgagacggagtctcactatgtcacccaggctgaagtgcagtggtgcaatcttcatttgctgcaacctccgcctcccacgttgaaacgattctcctgcttcagcctcccgagtagctgggattataggtgcccgccaccacgcctggctaaattttgtatttttttaaaatttatttttaattaatttattttttgagatggagttttgctgtgtcaccaggctggagtgcagtggtaggatctcggctcactgcaacttccgcatccctggttcaaaggattctcctgcttcggcctcccgagtagctgggagtacaggcacatgccaccacgcccagctaagttttgtatttttagtagacgtggggtttcaccatgttggtcaagctggtcttgaactcctgacttcaggtgatccagccgcctcggcctcccaaaatgttgggattataggtgtgagccaccgtgcccggcctggagatgttttgatctcttaagttgacctaactaaagggagtggtggggctggtgggagttgaatcagtacaactctacaaggagatggtcttgaccctgaatcacactctgcctctttcctcttgggtcctctgagcacaatgcccaacagcagactccccgctctggcccccaggagaggaaaatgggtgagggtcccagtttcactgtgtctgcgcctctcagaggcagaggtgacactggtggcagaggttgttgtcccctttgttcttctctctttagatttcagcttaaattttatgacagttaaatgtgcacgtgatggaaggagccagtgcctttgacactggatgaagggtagccgtggctggcatccccgtttctgctcccctcgtggccactgtggattgggtcaggtgcccatggattctgctgctgcgcctttaaatcatggctcacgtgctgccccggccttcctgctccagccggcctgttgaccgtccactatggaaggtgaccgggggtgattgagctctctcgagggcctcgttatacaggcgtggttttcatcctaaccccaacatgattctgtgccgattttgtaagatcaggggtcagttttcacactattttgagtgggtgagcagtgctgcgaagcaactgcctccacagctcccgtcaccatgtgcctgcctgccctacccctccttctgtggtgtggtgccttccacccacacctcacagtggcccagcttcgtttgtgattagctgagggttgggatagacataataaagtgaaaattgatgattgatcttaccaaaatttctcatcgaaattggaagcattaatactatttgttagtgggtctagtgatcgtttggttttagctccattgagtgcttaagtttattgcttataagtgtacacggtttccaccagtttttcccacagttatctgtattttaatattaataatgaggctatcttctagcatttttcatttagttccttagaaaaatataattctaatggtatagctaccaacattttgttaaggagataacctattcagatttggtcaaatttcctatatgttctacgttagggacatgcattttcttcacaaggggtggaaataagggttggtgtccccagagtgacaggagtcagctctttgctctgctgactggtgctgactgatggtagctcaccccatcccaattcctgtcgtttgctttgggaacatcccaggtgggcagtgtgggctccagactaggtcaggcctgtggagccgggctctgtgttcaatgctggcatttatgtgcgtgcttgtggtcttgctgaccacatgtcaagctattctgtctacattcaagacaggagcaagggggaaggtgaagtgccagggtctcctgctcctttttcaagaaaatgataggccgggcgcggtggctcacgcctgtaatcctagcactttgggaggccgagacgggcggatcacgaggtcaggagattgagaccatcttggctaacacggtgaaaccccgtttctactaaaaatagaaaaaattagccgggcgtgttggcgggcgcctgtggtcccagctacttgggaggctgaggcaggagaatggcatgaacctgggaggcggagcttgcagtgagctgagatcgcgccactgcactccaacctgggagacacagcgagactccgtctcaaaaaaaaaaaaaaaaaaagaaaatgatagcttcctcagacctctggctgggtgcggtggctcacgcctgtaatcccagcactttgggaggccgaggtaggcaggagtttgagaccagcctggacgacatggcaagaccctgtctctactaaaaatacaaaagaccgtgtctctactaaaaatacaaaagaccctctttttttttgagacggaatctcgctctgtcgcccaggctggagtgcagtggctcgcggatcttggctcactgcaagctctgcccccctgggttcatgccattctcctgcctcagcctcccaagtagctgggactacaggcgcctgccacagtgcccatctaattttttgtatttttagtagagacggggtttcaccatggtctcgatctcctgacctcgtgatctgcccgcctcggcctcccaaagtgctggtattacaggcgtgagccagtgcgtctggcccgaccctgtctttactaaaaatggcaagaccctgtctctactaaaaatacaaagaaaccccaaactagtcaggtgtggtggtacattcttgtgtcccagctacttgggaggctaaggtaggaggatcacctgagccttgaaggtcaaagctgtagtgagctgagatcgtgccattgcattccagcctaggcaaccagagcaagaccctatctcccaaaaaaaaaaaaaaaaaaaaaaaaaagaagacctctgccaaataccccttttgtaaggaaagtgggaggacatcatagactgtgtaacccagtcctgattcattctctgaggctggcagaggttatactctctggggtcctggcgtctctactagtcacagaacagactggggtccttaggctgggaaggaaggcggatggggcggggcttatggtaataaattgtgtctgccacactataatttgtcttcacccgttgtcataattatgttttcttttttttaatcctgatttatttttagctaaaaatgacatctttgtctataaaaagaactagatgatgaatatccttttcctggggtcctaaactrtagcgatttggtggttcataccttagttgtttttattgtgcctgtgttctaattcacacatttatttataacttaactgagtggaggatcaaatattgaactcatagttcttttaatgttgactttgaaatacaygctatagctaataaatgttgataacatgtttttgtcactttaaacctgtttttatcatatttttattttgcagtaaattctatcaaatttcatccctcagagcagttggctctcactggtatgttgatttttttctttattgaacaaaatgatagatggtcttaaaacaactataaatattcctttcttatcgtagcagaataatccatggcttttatgaaagttaatctttagtagacattttatgaattaaatgagaaatggataaaggaaaatacattgagcagtactttctagagacagtagtggataagcagttggatttattgtgagatgaagatggcttcacggtcttctcgaagcctttccgtacagcatcagtatgtttgctgttccccccgcagttcctgtagacggagctccttgaggccctgtggttaccattctgttcccttagattgtaggcatctgatatggaggaaaagagaaaagtagcacagagacacrgcaagttgccaatgtcagcatttttacttctttctgggtaatttatctaacccgtggtagcttggatttgctataatttcagagtagttttaaaaacgtgccttccttggtcgctttttcgagggtagccttacagtactgaggacttttcctgtgagattgtcagacccccacagatccccatgatagcccagggacattggtgatgatctcgaaggatgtgtgtaggctttcagtagaccagaggtccttatgatttttctgtaaaggagtaagcagtgaatattttcatctttgcgggacattcaggctctgtcgccagtactgagttctgctcttgcagcctaaaagcagcggacagtgcactgatgagtggacatggctgtgtccacttattcacaaaagtgggcggctgtctgggtttcgcctatgggccaaattgtgctgacgcaggaatagaacactgaggttgagatgactggccccttcatgcaggtggagttgtttaagaaggagccccagcaacaggtacttccagtgtgtgggatgcagcgagtcatgcggtttggttggagtttctatgtgagagagaaatgtggtgggagggttagcctgagagtcattttgagcaggcccagaccacatagctgactttcaccttcatacgtggatgaagactaaagcagacaaggagtttacaccttacgaagttggcggtttgtgggatgattgaaaagggagcaaggagactggtggcaattagacgtgtccagattcaaaccaaagggctggaaaagagggtggaaccagacacatccaggaactgatgaagacttggaaacatgaggtaatggacatagagaggggagagttagactaggaaacatgaggtaatggggatagagaggagagttagacttggaaacgtgaggtaatggacatagagaggggagagttagattaggaaatgtgagataatggggatagagaggagagttacactgggaaacatgaggtaatgaacatggagagaggagagttagacttggaaacaggaggtaatgggcatagagaagggagagttagactgagaaacgtgaggtgatggggatagcgaggagggttagactgggaaacatgaggtaatgggtatagagaggagagttagactgggaaacgtgaggtaatgggcatggagagaggagggttagacttggaaacgtgaggtaatgggcatggagagaggagggttagactgggaaagatgaggtaatgaacatggagaggggagagttagactgggaaatgtgaggtgacgagcatggagagaggagagttagacttggaaacgtgaggtaatgggcatggagaggggagagttagacttggaaactggaggtaatgggcatagagaggagagagttagactgggaatgtgaggtaatggggatagagaggagagttagactgggaaacgtgaggtaacaggcatggagagaggagagttagaggggaaacgtgaggtaacgggcatggagagaggagagttagactgggattgggcatgatgttgatttgaggaggagttgcaagtccgggcagtacattcatttgcatcaaatgtgctgcatcagctcagagcagctcctttagagaagctgggtggcagtgaagagaaggtggaagccagcctgcccgtgtgtgggtgagaggtggccatgctggtgtccgaggcctgttctgtgccccgcagtgctgtccttttgtctttccaatcctcagtcaaagcgtttcctcgcaaactggctgctgaaaacagagtgggacgggagccgcacacatgagcagtgctgataggtgcctggcccattgaaaggccgcgtgtgtgttgaatggatggagatgagtgtcgctttcccgawcrtctcagagttgattgcagctgtaagttctgatatgatagggtttcttaggttagatagatggagaggaaaatctactatttgtacattttctctgaacttccaggactttctatgctaaaatgaaaggtgaaatagttttataagtaatcattatttcctcaattttggacatgtactctattttcaatagcattatgcagtctcagaaaagagttatttaagtaaaaagtacattcctctcactaagtggtcactaagctggaaaggtctgactgctgctgcttagccatagtggcggtgaagagcgcattttaccatggtctgtgccttgggtaattttccccgatttctctcttcagcttctggagatcagactgctcatrtctggagatacgcggtgcagctgccgacaccccagcctgttgctgacactagtgtaagcacctttccttacctgcgaatgtgtaggatgctgatgtctgcgaatctgagaatccatttatgatatctgtcatggacggaatgtttgtgtccccccaagttcagtgttgaaggcctcacccccggtatggttgaatttggagattgggcctctaaggtagtagttaaggttcagtgaggttgcgtgaggtcctcataagaggagacagtggagagctcacctgtgttctcaatctctctgtcactctccgtgtcacgtaagagcagagccagagggcggccgtctttaaggatgagcccgcaccagaacctgaattggcttgatcttggacttccagcctccagcactgtgagaaaataaatgtctgttttttatgcgycgcccggtctgcggccttttgttgcggcagccagagccaactgagacagatttcagtaccgcgcgcagagcgggggctgctggagaaatgccgacggtgtggacctggcttcgggaccgggaatgggtacatgctgcagacgttttcagggacctgctggagaaagcctccatagcggygaagagcttgttggtagaaatacggacatcaatggggactcgggtgaaggctcagagaggaaaggggagagctggagagaaagcttctagcatctcagagaatgcaggtatcatagacagaatgttgtggaaaagtggatgttgaaggcctttctgctgaggcttagaggaggcgagggacaggtcacggggaaccggaagaaagtgatcctcattacaaaatggctgaggacttggctgagctgagatcctgtgaatgaaatgttaaaggtgcagcctggctgctctcctcgcttacaataaagtgtgaaaggacggagatactccgaaagagttgttaagggaaaggggacgagaacttgtaagatttgggaaattcccagcctgtgtctgtgacaaaaaaaagagaaagctggttccgaagagcacatgcagggtttgtctgaacagccagttgacagggaggcgagtgtgggtgggagccacagctttaagcacccaccgcagcaggatccaggactggagatgggattatacccagagaccccgccagcttgaaccagaggggacatggtggggacagaatgaaggaaggcatcagactgctgggattccacagcacagaaaccagagctgcctgggcgagaacctttaccacccttcaagatgagggaagaatgccccraaggtgattctgaggttggcagggctgcagctctcactgcagtcccaggacaagagcctgtttcttccttggtttcgaagtgtgggagcctccttggtttcagggccaggttgcccatggtccagtgctgtgggggtggggttgccaggctgagccaagggggtgacacctctgccccagcatgcctggagggtggcgcatccagaccaagagggactctctggagcctgaagagctcgtggagtttgccttgtggggttttggacttgcttgggccccaccaccctttccctgttgcctctttctctcttttggaaagggagcgtctgtccagtgcctgccctactgttgtattttgggaacatgtaacttgtttgggttccgtggtttayggctggaggggagctcagcttcagggtgggcgaatcgcactctgagtcccacccagtcctgattcaggtgatgttttgttgagacttgggacttcacaccttagcgctgatgctggaataagacttctggggctgttgggatgggatgactgtatttgccatgcaagaaggatatgaatttgggggaggccagggacaggatgttctcaactgaatgtctccgtcccccagaaatctgtgttgaagccctaacccccagtgtggctgtatttggagatggggcctctgagaaagtggttaaagcaaaatgaggtagtggaggggatgccctgatcccataggatgagtgtgtccttgtcagaagagacaccagacagctcacccttatggctgcccttgtgtgtgcacgctctctttctaccccctccccatctgtccgtttttttttttttttttttgagatggagtctcgctctgttgcccaggctggagtgcagtggcgtgatcttggctcactgcaacctccacctcccgggttcaagggattctcctgcctcagcctcccgagtagctgggaccacagatgcgtgtcaccacacccaactaatttttgtatttttagtagagatggggtttcaccacgttcgccagacggtctcaatctcttgacctcgtgatccgccctcctcggcctcccaaagtgctgggattacaggcgtgagccaccgtgcccagcctctctgtgctaatattaatagaagagcccctgtgggcacgcggcaggatggcggtgccacacaccrgaagaggggactcaccagaagctgcactggttgacacgttggtcatggacttagagtctccagaactggaagatgactaatttctgtttttgaagccttttggcctgtagtcttgtgttttggcagcctgcgttgaatgagacagtgcctagaaagatgctccttcacctctgtatgcatgcatctgctccatccttcctttcaacagacagtaaacatttaccgtccactctcttacagttgatgtttggatcctgtttctcactgtttcatctgtttaatattagacatctggtgtatctttcatggacgtttatcatcacatcaactaatggcctttatgacatcaattttatgtggttcacatttaaacgtaggtaacaaaagatgtgtattgagaagaatgaattcatgtatttataccataaattcataaaattcttcacttactgtttgccttgtgctctctgcagtagcccagtgccctatgtttatgatcacaaagaggcctgaatgtttctctgagagcagttatctccctagtttcaatgacaggataaatgttagtggcgtgatcttcccacgtgctcagcccccccagttcggtgcctgaacaggtgggaacagtgccaggcagacagtgtaaatgacgtmcacgtctagaagtttcagtttgtattgggctgtgattgttgcaaggatgaaagtaatctagttttgatattttcatcttggaatattccttgagttttctgctttgtgaacattctaaacactgttctatgtggagatagttaagcagttaataaattccagtgataaatgagttttctttagtcctawtagaggttatcatagttcatttttaactgcatgtattgtgtattaacacagttttgttctctttgtggaattgccagactattcattatgtagcgcataacactgtccactaacacgcacatttagtgatgaaacaagtgaaatgtgtgctgatggtgggcgtggtggagaggtgaggagggtgagcattgatgcttaggaaattcagcrtgtgcactgatggtgtggcggagacgtgaggagggtgagcattgatgcttaggaaattcaaaatgtgcactaatggcgggcatggtggagaggtgaggagggtgagcattgatgctcaggaaattcaaaatgtgcgctgatggcgggcgtggtggagtggtggagaggtgaggagggtgagcactgatgctcaggaaattcaaaatgtgcactgatggtgggcgtggtggagaggtgaggagggtgagcattgatgctcaggaaattcaaaggagttaatgtatggattgttttccaaataaaataagaaaaacactaattttgtcagagggaagattcatgtccagtacttacattaaaaacacctaatagtttacttagaatgttcacttaattttattttcttctttactactttgcttgtgttgggtgagtgcacttctcatattgatagctgccacctcaagatttggggctggtgttgggggttctgagttaaagatgaacctctgtgatgtgctgtgacttgagctgtcctgggagcactgcacactgcacacacagttgtgttgggccctccctaataaggaggaggcagtgcagcctgtggacggccaggtccctgcagaaatggcgtgggaggctccttccagcactactggatgaaatgaggctccttaggtggaaagcagttttgttttctgaagcttttgccggccagtgttgactctgatttgcttagcagttctaattttcaattttaacacaaactctaatctgttaaaatctgtgttcatcttgaatcattatagcttttgggcaaacgtcttgtgttttaaaatttgcatctgtgagttttgcttgacatccacagtgttgataaggaagcgtttgggtggcgtagtggaaacagacttagaccaacagaatgactgtcacatgtgagttaggttacactgagttactcgtttaacttcctcagccttctttttcttctttgaggggttcaccccgtggctgctcctggctctttgctgtgctccctccagagccgttttcccagccacgtgcagtgctgtcacccatcaccccctgccttcaaggtgacgtaccgagtacccccctgctgcagcctgtctgggggcctctgccagccttgtgagcctcgggccccccgtcccgactgagctgcacgtgccaccctgaacttgctgtctctgggtgttcctttccttgtgccacccgtctcaggaaacgtccctgtcacccagtgctttagaccaaacacctttccaccgtctgaacgcctgtattgttctcttactgcctgtggaaatcaccctgtcagccactcctgcagcagagggcrcttcagttctttcttcccaccctgctccaggccgccctccctgcacttctctcatctcctgtccgtctcccccgttgttttctggggctgccataacaaagtgccacaggcagggtgacttctgaacaacagatccgtgttctaaacaacagatccgtgttcccacagtcctggaggctggaagcccgagatgagggtgtgagcagggctggttcctcctgaggcgtctttccatggctcatagatggcgtcttctcctggatccttcatccctctgggagtgtctgtgtcctcatctcttcttacaaggatgtcagtcctattggaataggatccactctcctggtctcattttaccttaattatctctttaaagcccctttytccaaacagccccattctgaggtcctggggtgaggacttcgacacaggaatttgggtccacagttctgcccatagcagccccttccactgttccctccgcagtttgttcacacagcacacaccgggcatcacatcctgccgacagccgtctggtgattttgcatcacacggaataaaacctggtgtcctttccagtctcccgggattacaggagctgttcccgactttgcctcccgtagctgttccgcacatggcgggaatgttgttcctcagcccgggcgagccttacttaacctttcctttcctcacatccgactcacgtgcgacctcatcagagagtccctcctcagtaattctgtgtgaaatagcgcccccatccagctgccccttgtcctgttttattttacttcatagaagttactaccaccttactctgtgtctccatgttgatttgtgttcccgtgctgctctgcatccatgtgatatgtgttcccgtgctgccctgggtccctgtgacgtgctttcccttgctgctgtgcgtcccygtgacgtgcgttcccttgctgctgtgcgtccatgtgacatgtttccgtgctgccgtgcgtccctgtgacgtgtgttcccgtgctgctgtgcgtccctgtgacgtgggaacccttgctgttgtgcgtccctgtgacgtgttctcgtgcggctgtgtgtccatgtgacgtgttgccgtgctgctgtgcgtccctgcgacgtgcgatcccgtgccgctgtgcgtccctgtgacgtgcgttcccgtgccgctgtgcgtccctgtgacgtgcgttcccgtgctgctgtgcgtccctgtgacgtgcattccctagtaatgtatatgtgctcatgacgtgcctgtgttaggccattcttgcattgctataaaaaatacttgagacagggtaatttataaagaaaagaggtttaattggctgattctgcaggctgtacaggaagcgtggcaccagcatctgcttggcttctggggaggcttcagggagcttggagctttcactcacagcagaaggcgaagcgggagaaggcgtcatgtgatggaaacaggagtaaggcgggggcggggggtgccccacatccaagcagccagatctcttgagagctcacccactattgtgaggtcagcatcaggctatgaggaatcctcccccatgagccagacacccccaccaggcccggcctccaacacaggggattccagttsagcatgagatttgggctgggacaaatttccaaattatcagttccagtactagtacttgtgtatatatgacatacctctccatactaacgggtgtgtgtgtgtgtggtctctctcttttgctagaacagaagttctctgagggcaggggctttaccaggggtcttcactccagagttcctacctgctagattgagcgtagttttgcatgtgtgcatgtcagaagccgtctgtcctcttctgcattgtgtaagcagcacctgggctgggggtggggactggcactctgtcaccccctgataaatatttgttggatgaatatacagattttcttacagagctggctgtaatgtgtttgttttagccttggcctttgacagggggcttgatgttacaaaggaaaatagactcttatgactatagcaatagaattccaagtatattttaaataggctcttgagaatgaaaatgcctttttgtaatgtgataaattactgactttcatttgtatttggttagttttatattgcatttctactagtaactgatgaaagcttaaatgttgaaaatcattttatttgccattctgttgatgcgtggaaataaatggtagttcggttgacaatgttgtggattccacttttttttctgtacgagatggtcgtagagttgatgggtgttcacgggcagcagttatgggtcagaggaggacatactcatcactgtggccagcaccaggctcctagtggtgaccatcatgatggatatgtcctcaagagatkaatgagaaccatctattttgtagctatgtcagaagaaactcaagatttccaggaaatgtctttcttttctggccttccctttggcagcagatatctggggaagatgaagtagagtgctctgacaaggacgagcccgacctcgatggggatgtgtccagcgactgccccaccatccgcgtcccactgacatccctcaagagccaccagggcgtggtcatcgcctccgactggctggttggggggaagcaggctgtgactgcctcctgggaccggacggcaaacctgtacgacgtggagacgtccgagctcrttcactctctgacaggtgcctgggttctctgagtccgccgcctcctggctgtgcatgttagtttatgtccatgggttatgtctgaccttgccacttacttcttgaccagaatgagtctctgtgttcttggctcttctgtggtaatttttggagattctttctattaataatagaactattggtagctaaatttattttgtcttcaggggttttaaattgtagcatgtagtatctagatattggacatatggtagttgtattagttttccattgctctgtaacaaatttccacaatcttagtgtcttaaaacgacaggaattgacggcctcatggtttcccaggtcagtaattctgggcccgtggtagctgctcttctccctgggccctcaaagacctaagtgagggtgctgcctggtcaggacctccccaaggctgcggtcctcttccaagcctgctggtcattggaggagctccttcttgcgtctggagtttgaggccctgtcttcttgccagctgccagccggggctcctctgggcgtgcagaggctgtgtctggccctggggcccctgcacagggcttgcctttcccacacagcagccgctttcctctgcagctggagctcccctgctgctctgaactctccaacttctgggaccctttttaagggctaggccagaccacccaggacaatattccctttgatgaagtcaaagtcaactcatttagggaccttaattacatctgcaaaatcctttttgccttataatgtatcataattaccagaaagataatctcatcctatttacaggctctgccctaactgaagggaagggtgttaggcatgtacggggtgggggtggcttggggccatcttgggatgctgcctgctgaagttgcttctgcgaatctatctctaagtgcatttcctgcatgagcgttaaagattgtatttgactgaggacccatagcgttgtatcattagaaggtattctaagcaaagaatcaagatttaagtggttctcacattcaacctgttaatttgcctgaccttctaactggtagggtcagaaaatgggttatgcacctgtttggttttctgttcctttgacatggacggctgaaaggacttcagcttctgagggaaaacctgccccactgtgacccacatgctgctgagtgattccattaggtcaggttcacagtctcagagagacggcttcttgggttcttgtgctgttgaaaagcgtctctctcagcgtgctcctcaggtgatgaccttgtgttttgccatcttggttacagggcacgaccaggagttgacgcactgctgcacacaccccacccagcggctcgtggtgacctcctcccgtgacacgactttccgcctctgggatttcagggacccctccatccactcggtgaatgttttccagggacacacggagtgagttgcggtagtttagacatctgtccttagtcatgaaaaagttctgtgggttgacatgaaaacttaattctagccttaattttcagtatttccgactctactmtctttcaaaaaaataactrcctttcaaattctgctattctttttctaaacatttagctccattttggctatttcaaaggatgtaggagattaagagaaggcaccctccgaagttctctcaagaagtttaatgcagacagaatgggggagtgggtggagagggttagagaagagcagggctgccagagcctgtagctgagcacaggggccggccacgccaccataggagccgcgggagctgttactcctacccacggggtgtctcctggatcttttccatctagtttttgttattacacgtgtctgcgtggtatattctgggagaaggtatacacatagacgcgcaaacacagacatagaccctcaatccagtgtgtccctctctgcttgggtttctctccggcaactcaagtgtaaggtcttttttttctgagacggagtctcgctctgtcgcccaggctggagtgcagtggcgctatctcggctcactgcaagctccgcctcccgggttcacgccattctcctgcctcagcctcccgagtagctgggactagaggcacctgccaccacgcctggctagttttttgtatttttagtagagatggggtttcaccgtgatagccaggatggtctcgatctcctgacgtcgtgatccgcctgtctcggcctcccaaagtgctgggattacaggcgtgagccaccgcgcccagccgtgtaaggtcttaacagaactcttcagttctttccgtgaccgtctccttcccccagtctggccctgctcagtcaatgatgagaccgtctgcccagtcacgggggctgtctacctagagtgttccctggttcttctcttttaatctctgttccccgttcccccatcatgccccactgtggtccactggcaagtctcctgccagccatgcctgtgggatcttcccggccgctcctcgctcctccatgctccccctacctcccaccagtgctgctctccaccccgacgtctggataagcagtgtgcattgaaaggtttataaatgaactccaaatatgaaaatctgttttatatgtttaacgttagttactaagttttagatttaatgttcaaaatgttagtaagatgttggaaaggaaaataggactttttgtttgtttgtttgtttgttaatagacggagtctctttctgtcgcccgggctggagtgcagtggtatgatctcggctcactgcagcctctgcctcccgggttcaagcgattctcctgcctcagcctccctagtagctgggattacaggcgcccaccaccatgcctggttaatttttgtatttttagtagaggtggggtttcaccatgttggttgggctggtcttgaactcctaacctcaggtgatccgcctgcctcagcctaccaaagtgctgggattataggtgtgagccatcgcgtctggccaggacaacgtttttaaaaagaagcttgagattggaaagctaattccttgactctgaggctggaacgggagcaggcagcagtcacgaccatgcgtagagatctttatggcagcctgggtctgttctgggggcatcacacgcattaaactgctccgtcctgacatcaggtcagcgtttattctgccagctccgtcagcgatagccatagtaatacagacctcccggtggtcagtggctgaacgcagcactgtgttgttgctgcatcagggtgcagcaggcgctgagctgggcccccatgagctccgccacatgggcctgaccccgctgcaggccagctcattggtgaggaagatgctgcagctcggggagcgctgcttcccatgcatgttagcttggatgtggtgctccccgacgtccaccagatgcagaggggccccacagcaaagccctggctggacctgggcccaccacctggcaccactgtgtagggcggggcagaggggccgcatgactgccctgctgtttctcatgagaattcattggaagggcagtcggaggcctagaggacgggaggagcaagatggtctcactcctgcgcctgcagtgctttcctaagctttttgcttagaaaagtttcaagcctacataaaaaccaacagagtagtacagtgtacccacaaacccttcacctaggttcgcctgttgtattgcagcactgctgtctctttacacatgtgtacacacctctctctgaaacacacgcccactaacccttcacctaggttcacctgttgtattgcagcaccgctgtctctttacacatgtgtacacacctctctctgaaacacacgcccactaacccttcacmtaggttcacctgttgtattgcggcactgctgtctctctttacacatgtgtacacaccrctgtctgtaacacacaacacgcactaccctgtcacctaggttcgcctgttgtattgcagcactgctrtctctctttacacatgtgtacacgcctctctctgaaacacacgcccacttccccttcacctaggtttgcctgttgttgtattgcagcactgctgtctctatttacacatgtgtacacacctgtctgtaacagacacgcccacttatccttcacctaggttcacctgttgttgtattgcagcactgctgtctctgtagatgtgtacacacctctgtctataacacacacttgtatattttctttggctgagccctttgaaaggaaaactcyagcatgcattttctaagaataaggatgttctcctaatacagtaccattgttcaaataagaaaattagtaaaaattctatggcatcstttatctggtccacatttaaatttactcagttctccccaaaatgtctttgatactttttttagagctaggatttaatcaggattctctcatcacatttagatattatgtcctttggcttcttttaatctagaatggtccttcccccattttttgttactttttaggatattgagttttttggtgaagaatccaagcctgctcttttgcagaacgcccctcattctgcatttttcttatgacttcctttaagtgcccctctgctgtgctattggtgtgctgaagcgctcctgcagttaagatggcgtctgcaggtctgcctgccagaggtgctctcctgtttcaaatagcgaagcgacactattctatggatgttaattccccagtgacctttcctcggtccagggcttcagctcattgttacgctgagtcctgcagaaggggatctttgtacttctgtctacactggttagttggcactgtgttttttgagtattagcgagcatagacacctgcactttgttggtgttggtggttgtgatccctgtggttgctttggttttggyttctgtgatscccccccccccgtggaacctgcagggccctgagtgccaccatcctggcacagctccctgccccaggctgggaagacccagcagctctcactgcattgactctggtcatctgtatggagcacaaaaatctgtcagagctttgagaattgggtgaagagggtagttttgtgtctagagagcagggcagcttcctatgtgcttctgatatgggggttgcagggataggccagtgtgccctgctgtgcctgtcccctttgagggcaggatggaaaggccgaagaattctgtccagaggaggaygcagtggagccagggcttggtgagttgctggtttgtgccaggcactgttggagcccctggcatcaccccagttcagagagagaaactgaggcatgaggaggccaggtggtttgctgagggtttggctctagggggtcattccagagcagtccctcctggtgccttcaaggtgcctcttgtgttatttaagacccttctagtcctgtattgtctctgttcagttgccatatttaactggaagattttatttttgttttgtgtaaaaagaaaagtttttgtatttatatcaccagagttgattgcaagtgcatgttttcgcttctaaggctgttgcaaccgtgtggtcttggccatttgactgtgaagtgaagtcagtgctggtggcatctttaaaatatctgcttaggctgggcgcggtggctcacgcctgtaatcccagcactttggggatcacctgaggctgggagtttgagaccagcttgaccaacatggagaaactctgtctttactaaaaatacaaaattagccaggtgtggtggcgcacgcctgtaatcccagctacttgggaggctgaggcaggagaatcgcttgaacttgggaggtggaggttgcggtgagccgagatcacgccgttgcactccagcctgggcaatgagcgaaactccaaactccgtctcagaaaaaaaaaaattctggttaatttgtggtacatttttgcagctagtggatacatgaaacaatggtagttttttagagagctgtacttaygaagaatgtagtaagtgttwtgaaaaagttcttactaatgtggacctatgaatacagtttcctagggtttatgtcttcctattggaatcaggtgtgggggtagagtaaggtggagtgtgtaattcccgtgtgccctttctcccacatgggtcttccaggctgtaggctgtgcttccattcacctgaaccacgggggtgaggtgaacgtggaccagacctgcccgggccatgcttactcagatcgtttacgctttcttttttcttactcaaattatcatgaactagcgtatcttgttgatgtgtacatccaaaaatacgttttgaaaagatctctctttggcgctaattttgttgctgtgtcggggcgagtccgctgggctgttggacattgagcttcccctcaccggcctggcggttcctcagctgtgcgcatgcaggatgagggcttggtcagcaggtggagccgtggacgcctttattgaacacaaactcttccttcctgacatcagatcagctgtaaacctttagacgtgcctcataatgagaaaagcaggaaatgagtcattttacaaaaatgtttcatctgaggtgtcttcttagtaacacttgcctttgtctccggcatgggttttgtaggttcgagccaatacgacaaataaaacctacagagtgcgtgatccttacaaatgtgtagagctgtgcatccgcgccacagcacaccagggtgagggcctcgcagygcggtttaggtcctgagatgtgcgtccgcgccccagcacacctgggtgaggtccggggtgcgggtttagttcctgagaggaatggccaggttgtgtgtgtgtgttccgtttggtcacttgtctgggacgttctgaacatgacttgtaagagcacaccctgggtcccctgccttccctgccaccatgtcattctgagggaccctctgcgccgggggcttctctgcagtggccacggcatcgccaaggacatccgtgagcctccgatgggtgtccagcgtgttagcgcccagacccacagggcctggcaccctgataggtgggaatgttggcccagggccgggcctgaggcctgcaggactgcctgctcatccgggaaatagctctgccggttttacagggtgatcctgagttcttttcactagttcttttcctgagcattgaaagcaaaagtcagacatgtgttcttaggaagtttgctgttcttgttgatgtaggctggaaagttatatgcatggtgtttttagtgataccccttaaacagaggcagtatttcttcaacatgtgtgactaaaaataccctttctcacataatttatattaacatgatgtggaatgtgcttttcaaagttttatcttagggcgtattttcacttgtaggaactaagcgtaaattctttagtatagtatgttggaatctaatgtcttttataatgtaaataattaactgtctagttaaggtgaattgctgtatattgggttttcttaaggcaagaagtagctctaaaggcttaaggtaactggcccagttttgtgatccagtttccaggagagatttttccccactttcttttttttcttactgtaatccccatacttttacttgcattctgtgcctttttgaaagactggagtttgagttccartgcttcactgtaagaaagaaaagtgtagcgaaatgggtcccctgaaacgtgtggtcattacctttgctggatggggatggagctccgtgctgtgagctgctgaaggctttgatcctacgtgtttagaaggaccagtcaccttttccttttgatgtgtcttatttctttccactctgtgttgtggcatctctgtattatagcaggaattttaccatgatagtacttagttggcgtaactgtgtggctgtttttatttgactgtttgttagtgacccagcgtgtactgatttatatgaaaagcaattttagatacttcatatagcagaaatgtgaagttgtagtatgtgttgttattagaaataataaaaaggcttaatttgaaaatttcagtgtgtcacaggaattcagctgttggtggctatttctctctctctcttttttttttttgtgagacggagtctcgctctgttgcccaggctggagtgcagtggtgcaatctcggctcactgcaacctccacctcctgggttcaagcgattcccctgcctcagcctcccaagtagctgggactgcaggcacgtgccttggtggctatttcttacaccttgtttgattgcactccgtagattgatgttttttgcaaatgaaggtctgtggagcccagccctggctgagcaggtctgttggtgccagttttccaacagcacgtgctcacttcctgcctctctctcacattttggtcattctcacaatacttcttactttttcattgtgattatatgagggtggtcagtgacttttgctgtaactgttataattggttttgaggccctgggaaccttgcccatagaagacagtgaacttagtcgataaatcgtgtgtgttccgactgccccactaactggccgttccttcgtctctcaccttctcctaatgcctctgacttcatgagtgagacacaacactrttgaaattaggccaattaacatccctatagcagcctctcagtgttgaaatgaagagttgcgtgtccctcacttgaaagctggaaatgacgaagcttagtgaggaagatgtgtcgaaggcagagaggctgaaagctgggcatcctgcactggacagccaggttctgaatgcaaaggaaaagttctggaaggaaagtaaaactgctactccagtgaacacacgaatgataagaacacaatcctaatgctgatatgaaggaastttgagtggtctgcattgattaaaccagccacaacattccctttagccaaagcctaatccagagcagggccctgactcttcaattctgtgagggcttagaaaggtgagggagctgcggaagaaaagctggaagctggcagaggttggtttatgakgtttaaggaaggaagccgtctccataacatgagagtgcaaggtgaagcagcaagtgctgatggagaagctgcagcaagttctccagaagatccagctgggatcatcgatgaagatgactatgtttaataacagattttcagtgtagacaaaacagccttctgttaaagaagatgccacgtagaactttcctagctagagaagagaagtcactgcctggcttcgaaggacagacatgctcttgtgaggggctagtacagctggtgacttacagttgaagccagtgctcatttaccattctgaaaatcctagggcccttaagaattatgtgaaacctactctgcctgtgctctataaatggatcaccaaaggctggatgagagcacatctgtttacaccatggtttctgaatattttgagcctattgttgaggctactgctcaggaaaaaacttttttttcaaaattgtcctgcttattgacagtgcacctaagggctctgacggagatgtacaaggagatgaatggtgttttcatgcctggtaacacaacccccattctgcagcccatggttcaaggagtcattttgacttttgagtcttattatttaaaaaatacactttgtaaggctatagctgccatagatagtgattcctctgatggaccttggcaacgtcaattgagcaccttctggaaaggatttatcattctggtcgccattcagaacacttgtgattcatgggagaaggtcaaaatgtcacaggaatttgagagacgttgaggggttcaaggcttcaatggagaaagtcactgcaggtgtggtggaaacaggaagataactaggattagaagtggatcctgaagatgggactgaattgctacaatctcacaataaatttgaatggacgaggaactgcttcttatggatgagcaaagaaagtggtttcttgagtgggaaggtactcttggtgaagatgctgtgaacattgtttaaatgacagcaaaggattttgaatattccataaacttcagtggtaaagcagtggtagggtttgagaggactgactccagttttgaggttcaattgtgggtaaaatgcctttttttttttttttttttttttttttaagatgggagtcttgccctgttgcctaggctatagtgcagtggtgctatcttggctcactgcaacctccgcctcccaggttcaaacaattcttctgcctcagcctcccgagtagctgggattacaggcacctgccaccatgcctggctaatttttacatttttagtagagacagggtttcaccacatcggccaagctggtctcaaactgctaacctcaaatgatccacctgccttggcctcccaaagtgctgggattacaggcgtgagccaccatgcccggccccagtaaaatgcttttaaacagcatcacatgcggtagagaaatcttttgtaaaaggagaaatcaattgctatagcagactccattgctgtcctattttaagaaattgccccagccttcagcagccaccacccttatcagtcagcagccatcagcatcgaggcaggaccctccaccagcaaaaagattatgacttaccaaaggctcagatgactgttagtgttttttagtggtaaaatttatcttacttaagaaatgcacattgcgtttttagaggtaatgcggttgctcacttaacagactacaggatggtgtggctatggcttctgtatgcaccggaaaaccagacagctcttgtgatccgccttactgcgatcttcacctcacagcgtgttctggaatgaacggaacccgcagaagctccgagattgcctgtgtttgtcctaaccaccaggagctgcagctggaagtcagtgcttttcacctgaactaagttcttttctgttcgtgtgtttttcacccggcagkgtaattccataagyctggccctctcctggctgctgcattcccttgcacacacccagggggctgaacccacacgcaggccattccagcgtgggccctcactgtgcagaccgtgggtgaatagacgtgcctgcaagaggcttttgctgtcatgacatttgcctgtttagatctcagcctcagccctcagacctccctcagcacaccccaatcccgtagagttttcctcccctccccatctcccttttttgttttttttttkttgttgttgttattttggttgctataaaaaggagctgacaggcgaggtgtcactggccattaagcctcctctgtgggtggcaggtggctctgccttgtgccgggctggcagtgtttgcaatgcggataaactttagcactgaaaaaaacaggagatcatctcaacatggatgcaatatttgaggatgcaaagttttttgttttcttcctttttaattctttgcaaacgattttaactttattcccaaaatgtggtctttggtgctttcttctaaagaaaacaaaacacacatctaaccaaacaaaattttaaaagatcagttgagaaattataatgatcactttgaagtgatgacatgtttgtgtgcttttatttccaaacacctgggggagagatttggtactaaacactgagttctagatcatgtgctcagaaaggtaaacacagttttgcagcttgtgtcatggtgttaacagttttccttatgcttttaaagggaaaagatgtttggaaatcgacatttttaactggatgatgggcagttttaattgcacctgaactttgtgcttggtcacagtcagcatgcaggtgtcagcttgggtgtgggcctctgggtgctgtccggccagctggccgcctgggaggtgcgtgttggaaaggacgcatgtggtmtctaaatcagtttgctttccactttcagatctgctttctttttggtgatggcttttgagtccttgtctgtggggaaggtggagagccagccrtctaccaggtggtgactttgcrgacagcagggccctgtggaagggcctctggggcggaagtgacatggagatgaggacrgcctgcaggctgtggggccttggaagcacacctgtgtctcctctcagtgttacatcccctacccatatgcctgaaagcttggtggttgtctttttaattagattacattagagtactttaacaaaatgttgtatgtattcatggggtgtgagtgcrgttttgctaccttgatgtactccactcaggtgaggccagggccttcagcatacccctcattggagtgatgctcgttgcacgcaccaggcaacctcccgtcatccaccccgccccaggtctccactctgtccatcagtcttgtatccaccccaccctgggttgtctctgccctgtccatcagtcctcccgtcatyccccctgccctgggtcatctctgccctgtccatcacccaccccgccccgggtctctgccatgtctctcagtcctcccgtcacccacccctccccgggtctctgtyctgtctctcagtcctcccgtcacccacctcaccctgggtctccaccctgtctgtcagtcctccgctgtccctgtgtgcacgtagttttgctcccacttgccaaggaggacacacgctctttgtctttcagtgtttgcattgtttcacttaagataatggcccccagttctatccatgttgctgcataaattaataaaggtgattttatttttaggaagtgtatagatttatataaatacaactcttaataataactggctgatatccaaggttatcataaaacccaggctagggtcactaaggactccatctgtcgcccgtgacagcttttcggagctttgctggttggcctgagtatggtgcagattccagagaactgtagtgggcagcagttggcgggaacagaacctcactgcagcagtcatgttcaggggtggtcttgggtgtttcctttgtattagttagtgaatgttttgtcttgtgaccacagaaactgccaaggagacgttagcagatacagtgtgcagctgggcacacctaggcccagtggttctttctgtgcaaaggagaatccttgtctcttaccagcagagcagcgctgtccgtgccaccacctgcagagctgccgttccatcctcctctctcagtgtcctgtgatatgaacctaacagtaacttcctgagccagtcccttgttgatgcatgtttttaaatttttattggtttatttttttgagacagggcgtcaccctctcgcctaggctggactgcagtggcrtgatcacggctcactgcagtctcgacttcctgggctcaagtgatcctcccacctcaccctcctgagtagcagggactacagggctgtgccaccactccctgctaatgtttgtattttttgtagagatggagtctcaccatgttgcttaggctgctctcgaaatcttggccgcaagtgatcctcttgcctcagcctccaaagtgctgggattacaggcatgacccactgagcctggctgcctattgatgcattttaaagtcgcttccaagttagaatattgtttttaaaagtgagaggagatttagtgtatctctgttttacccttttaaagttcctcatttaagaagggctactcaggaactcataaatarggacttaaggaaatgattgcgtttgaatcgctctactggacagctttgtttcggcctgtcagattctgtcacttttctttgagatgactgtaagacagccatcaggctattgacacatactcaaaacttcctaactgtgaggtacttcaggacagactccggagacaggtrggggtgtctgagtccacaagtcagcagaaaccagcatgatacgcagagcgggcagcatggggaggggtggctgcctaaagcgtcagctgacgtttggaaaagatggtggtgaccatgctgtgtgcatggccactgcagagccagggcccgggtggcatgtgagggtcgcctggcagcctcttatcagcatctgcgctgcgtgcactcagccaccctcagccagctctgtttgaagtccctgcacgcatctgagccgcgtgcactcagccaccctcaaccagctctgtttgaagtccctgcacgcatctgagccrsgtgcactcagccaccctcagccagctgtttgaagtccatgcacacatctgagccgcgtgcactcagccaccctcagccagccctacttgaagtccctgcacacatctgagccacgtgcactcagccaccctcagccagctctgtttgaagtccctgcacacatctgagctgcgtgcactcagccaccctcagccagctctgtttgaagtccctgcacacatctgagctrygtgcactcagccaccctcagccagctctggttgaagtccctgcacrcatctgagctgcgtgcactcagccaccctcagccagctctgcatgaagtccctgcaggcatctgagctgcagggtttctggtgctcagcagcagagcagagaaacacttcatttaacaccatctttggagagcacgatgttccacagaagcgatttctccaatgatccctcaagaaccaacactttgtaaaaaaaaagactatttcgtgtgtgtgtgtaagagagggacataccagtgctttaggagtgtgcacgcactgccacgctgtctccctgccctgatggccccgcagcctgggcgttactgtttgtctctgttgagtgttttgtttcagcttctctggaagtcagctgttgctttttgccatttttgtgctggtttctaatgctgtttctcactcaatcccactgatttctcttacttactgctcctgaacattctaaaactgataacgtagaaatgaaaatgaaccctgaataaaagactaagggccattcctatgaagaaaaaacatgagtgcatcggcgttaggaatttcttctgtataccagaaggccgtgctgcaaaacaagtcaagagcatatatttggaaaatacgtctgtacaggctcctgcagatgcagtggttgtgagaaacggtctctgtccttggtagccttgacgttctaggatgataagatcagtacacgagacagagcagagcaagagaacacagagctgagtgctgttactgagtccaggcaccacaggtcagtgtttctgtaatgggtcttctttctttgtgtcatagccaaggtgaagctcttcagctagcagaagagtgttctcactgtgcccccatagctcatggatctcatctttagaatcttatttttggccggatgaggtggtcaggttatactgaactaaatgttctctttgaatagtctgtggaaaggttcttactaattcagttagtcaaatcttagggaggctttagcatagtctgaagtcactttagaagcccttctctgtgggccatggtaaacacagatgttgcagaggcttcttgtagctttgctgtggtgcctgttggcagcacttccaggccttagggtgctgttgtgcgcctaacactgctgaccttataatattataagtggccagtcacttgcccccttcgctgggaggagggaggcgtcactggagtgactttacctcctcctcttctgcacactgtctgacgaggagcggggcctgcacacagccagtgcttaataaatatttgttgcatgaacagttctgtagtgcagcccttatcagtgacttagttgggaaatctctcattatttctgccgagaggggtttggagagtagcatggccccatgagactactgaggtagaactatgcattaggagaactgacttctccagggaacagttgaatttgaaattctgaaaaagaatcacatgtgatacatacttgatttttgctttgattgatttttatctgaagggtccactttttggggaggtagccatcaaggagtattgagaaatgtgtcttatttgaatgtgacttctccgtttcttggtcagtcctctgagttcgtcaaatgaatgcttgtgtgagttcttgaattccaaaaggcgtgggtgatgagaaaggccgggatggagcttcggagaccccgagtgtgcatttgggctgcctggctgtgaagagaagacctgtttaatgtgttaggagttggatttcatgcagatagcttggaagttgcaggaagggctctgatgactccaaacacaacacagctaccccatgtcttcccttgcgctatgaagcgccgcctccgaggggcacccgggggtcctggctggcttattggggtgtcctttggttacttactcagggcactgttttaaagtcaggactgttggygacgcaggtgttgtacttttgtatcagcgctgtaacagaacagttgacatgccaaagtaataaagtaataaagccacagtgctgcctgtttcacagctgttcattttcaaagatctgttctcggtaccttgactgagaagcctgggttccaaggaaggggctgccgtccacaggactccctctctgtggacacacaggcgtgctcctcagatgtgaacacattaccttgaggaagctgcgttttaaaaataggaaaggaaacgatcgtcagtgtttgatgtcgtgcsggaaaagcactcccatcagcgctttgtggcccagtgttttccacatcgtgtcgtcttttccttagtgaaatttcggcagattgttatgcagaagcggttctgtgtctctgtgtgactgggagacagctgttcrtcctaatgaggatgccagcttcgcggcgtttccgctgatggagacccgcggagggagcggaatgttccagaccaggcagtggtgtgcggcgaggaggtgctgcactgtcagctggaggagcacgctcggctgccccacacgacaagataaatgagtttgccggagtttggcagcgtcggaaccatttccagtgcacggccgtgcgcgccagcctccccatgggacctgtgggctgagggtgccttggaaactgctgcctctttgccagttcttttttcttttgatgtccgacaatacttgtcaggattgtgatttattaaaaacctaatgtcttttagcatttcattaacatggagttaggcgatcttttgttgagccttttttcctattaatttagcagaatgttcactgaaacttaacttggccaaacctcctgaagactccagttcaaagagaagttgggggcacctctcctctcattcttccaggctcccccagcagccgaagtcctctaagcctcattgtaaccttctcactgaagcgtggcagcgtctgatttatagtcaagctctcatgttgttctttatttttttagatgaagactctggaggagttactgggttgattttgcagtctctctcctctgcccatgctgctctcgtaacccgtgctgctctcgttacccaggctgggcgtttgcttgtgtcctgccccgtgtgatgccgtggtttccagttgggcagtttccccccaggagacagtgtttgttgtcacccctggggaggggtctgctctagtttctaatgtgcctgggcagggcggctgctacatccacaggccaggatgctgcaccacagggaagggccccgaccagacatcaggtcctagcgggggaataagtgtcagcaatccacaccgcagctgtgggcaccacgaccaggcctttgagaatgcagacgtgaaaacggtcgccgccgcatcatcctgactgtgttccggggtctcggtgtcagagcgtgttgccaggtgttgttgacgcaccttgattctcagtagctttgctgtactttgatgttatatttttaaaaaccttgtcttaatgcagtggaacttagacgtaattaggactcagctggtgtccactaaatgaggaggattttcataaatgggctttgtgactgcgtggtgcttctctcatccagggccgcatagagcatgaaatcccatgtcacggtacagcttcagtggctgggacaactggcatttaactggactccagagttccaagcaattttgatggactggacctcgatgagggtagatgtggaaaccaagcttttggtccacattaaattagtgatttgtgacgacaagaggacacttccttcatggataggtggaaattcacatgcttatcatctcgtaggtatctcagctgcttcagtgaggggtgaggcgggttttgagcccctgtacagagtgagtgaccccagtttttgtgccctgggagacagtgtaggggtcaagcctgtgtctctctgagaaggcactgcccctgcgtctcaggatctgcccactctgccctgaagtcagaccatgccttcctgggtgggccactcatgcccagttgcatggcgagcatggggacccaccccagccctgagccaggcaggacgcgcagccccctggccgttgctgaagacagcagtggatcatgcctggattgtgtgcccttagctcacrgggaaagtaaggtttttatcacattctttttactgaactttgccagtgagcaaagaggtgattgaattttcttcttcaaatgtcattttattatttgagttctaaataccttctggcaagtgccagagactttcctttgatcactggttaaggtaatcaccccagccactgccagcacagcctcagctggtgaggacatgatttcctctgcagattttgcctgggtttcttcagtgattctcagtgcaattcaagtgataacatcctttgtttacatgtttaatccgattttaccacgggtaagactatttaatatacttagcaccatgtcaaacacttttttttacatttcagaagaaaagtttatgaaagagtttaacataaactgatgaaacctttcttccccctctcttcttgtttttatggtacttttcatctttagggcgtgggtctcccatcttagccatttcagggcctcttcggttcctygagcctctccctgagggccacatatttcaacacatttgaattaaaaagaaaactattaattattattttggatttatagaagcaggttccaagagtggttgtgatgttgaatttttctcctcaaactttttaagataaagattgtggttaaatatacataatatgaaacttactattttaactgtttttatgtgtgtacttcagtggcattaaatcaattcacattgttgtgcaaccaccagcactatttcctatgctttttcattatctcaaatggaaactctgcacttgtgaaactattcatgcccatcccccagaccccgagaacctctgttctacttcctgtttctatgaatttgcctagtccagggatcttagatgagggggattcttgaaagttcattcatgtcatagcacgtgttagagtttctttttttacgactgaataatattccattgtgtgtacacgccgcattaaatccatctgctgatggacatgtgggttgtttgcacctctttggctgttgtcagtaatgctactgtgaattctggtgtgtggggcttcttggctgtttgtatatcttctttgggaaaatgttgatccaagtcctttgtccgtgtttgaattgttgtcagagtgtttttctcttaactcctgtgttatgattacattgattgagagttgttgttggaatggatttcttttaaattctctgctatagaccaagatatgttatgattacattgattgacagttgttgttggaatggattttttaaattctctgccatagacccagatgtgtagacatttgggcatgttctgtccaaccctactttctgtaacctctcttcgttccgttgcctgtagatgtggaatagagtagaatggactgtgtgtttctgatccactgggaagaaatcagttgtccttttcttgcactggtggagaggctttgggaggcgggagcagtttgcagaggagagagctgtgagtttgcgcttctccgacctccttcccacccacttggtcagggttgtgtgtggggtgtggtgtcacgtcctgcacctgctgttgcatctgactctgtgccctttgttcatagcactgtgacttctgccgtgttcaccgtgggagacaacgtggtttcaggcagcgatgaccgcacggtgaaagtctgggacttgaaaaatatgagatcccccattgcaactattcgcacggactctgccattaacaggtaaagtcaaastgttggttaagtaagtggcttagtttgatgtgaaaggattgattgtgatttcatgttttattcatggaggtttaattgatagaaccccgggaacartggtttaggctcctttgtcctctaatgcagtttcagtattccatgaaaacttaaactaacttagcctaaaaccaggttggatcagtgagatttgtaagaatgagaatgacccgtttgtggcagacatgcagggcttctcttgacttcttgtgaggattggtcttgtgtctgggtgggtctggttctaccattgagcagtgtgtgtgtgtgtgtgtgtgtgtgtattgtgtgtatgtgcatggggtctgtgtgatcttgtagctacgtgtgagtaacttggtctcttttgaataccgtaagcaggtggtacacgcagtgtgttcatgtagtcggccttgaaatgtgaataatatggaacctcctgcttcattatctgtcaactcaaaaacttacagtgtcactgtttcatgcacaacccacttttacctcttctttgcaggatcaatgtatgtgtcggccaaaaaatcatagccctcccccatgacaaccgacaagtgagactgtttgatatgtcaggagtgcgcctggcgcggcttccccggagcagccgacaggtaacagcacggtcggtgaacatatgcagggcacagtggaggaggacgggtagagatattttacattctcattttcttactaagtctttgcatgctaagttttccttggaaatgcttgagctgtatttagagttcataaaatttaaaattgaagaagtagagttgtacactcaagttattccacacctacttcagtgttttttttttttgagacagagttttgctcttgttgcccaggctggagtgcagtggcatgatctcacggcaacctctgtctcccaggttcaagcaattcttctgcctcagcctcagcctcaatctcccgagtagctgagattacaggcatgcgccaccacgcctggctaattttgttagtcaggctggttagttagtcaggctggtcttgaactcctgacctcaggtgatctgccctcctccgcctcccaaagtgctaggattacaggcgtgagccaccgtgcccagcccagtgttcttaataccatgatcggcttttcagtttacaaataaagaaaacatgcagctcctctgtttcacaggcatgcggaacgagctctttggtgcacgtgttagtggtggtggctctgtggggaagccgtcttagatgtctgcagttgtgtctgtgcagattggaagtgttgagtgggcattgtggccaggcagaagctgggttggttgtaggctgggggtctttaaggtgggacctcttccacctccagccagaagaacacgtttctatggcaggctgttgcgacaggaagaaatatatttaaatgttagtttcttgttagtgaagggttgctccttgctaacttcagaagacggcggagggagtttctcgctatgtgctgttcagcccacccgtcctggttgcctggaaggcgcaaagagaatcgagactccatggcacccgcacagatgcagaggcccagggggcctgggggcccgtgttcagattccctggcggctctgctgtgctctgcagccgggcctcactataatgtgggtggcgtttgctgttggctctcccctgggaggtcacagggtcagctgcgatgcacagaaactccccggggtcagtggctggtcgcagtggctgacgcctgtaatcgtagcactttgggaggctgaggcgggcagatcacgaggtcaggagatcgagaccatcctgactaacacggtgaaaccctgtctctaataaaaatacaaaaaaatcagccaggcgtggtggcgggcgtctgtagtcccagctactcgggaggctgargcaggagaatggcgtgaacccrggaggyggagcttgcagtgagcygagatcgcgccactgcactccagcctgggcgacagagcgagactctgtctcaaaaaaaaaaaaaagaaactccccgtggtcgaggcagcgtctgcccagccttgtgcgtaatggaggcccccccagaggatccctctttcctgtcttcttttgattttgttggagtactgtctggatacctgtgtgagtaaatggatttgttccccgaggcctcctgtggctgcacagggccacacgcctgccggcagcttgggtggccccctcagtgcctctgtggctccttctgtggacaccagctcatggctcgtgggccgcagctgctctgcacggggtgtgagcctcagaacctgcaggcaggccgggtggtcagggaggcacgtgcgaaagtgggggttctctcagcgcagcaacaccttttcttccggtagcacagactttctggaaatgagcttccctgagaccgggtgtctcttcagtccccttcctggcatgagagtgcactgtttgaagttaattattgagtttttactcctcgatacacatcmaaatagtggagcagaaaaatttcatgaaattagagtgactaaaatatgcttcacaacccttaacacagccataaattgcttgtcctggggaagcttttcatgttttgttaacagctgagcatcactcatgtgtcctcacagctgcatcttagacacagtagaatgttctcttttcaatgtgcccatgcggattttaaaatttctgtgcagcatgtaaagtttgcattttgaaacacaaattcatgaaaactatttgtttatgactgtgaactatgactttattactttgagagtattttccctcagaaaaacggaattctgaatggttcttcttggccttaattctgtgtagacagttttattttcagttatctgtgaacattcaactttgttgatgttgtaggattctgttgtgcctgggtttattccctcctaaagtggtatgtgaaatagatttatttttaagattaatgaatgtgatttaactttatttagaacttgtaacacctcttcagataaataaatgtggttttcagtgtcacagaaccctgctggaaatcactgacttatattgtccttacttcttcagctgactgacttgaaaaagagaaaacaaaacacttatttgagcctttaagtagtggagtgaaagggactgattgaaaatatttccctgtagtgctggagtaggtgtcacttcccagcatgagttttgggaaagcgagcttggtggagagtcaggaggtccggggtcagggttcctgtgaagagcaggctcattgggcgtgagggtccctgcgcragggtctctgtgacgtggaggctcacggrgygtgagggtccctgtgaygtggaggcccgtggggccccgtgctgagcgtcctggagcacatcacgtgcactggggctcatgacggcatggggcgtcttccgggtgcatctgcttcctgggtggcaatgctgtgggcgcatgagagatggaaatcccatgggagctctgccggaggtgaaagcctggctggctttcttctggaagctctttggcacttctgcagcgaatgccttgagtttcactgtgcagagctcttgcccacagccttggttttgcctccagttagtggatgcattgctgcttccttttttgtgccttttgtaaccctttgttatgtggtctttcttataattattttatttttctggccttttgtggatgtctttccagatgtataaatagctattgtggttctctctccagatgtataaatagcatatttatgggggaatattttcaggagaactttatgccattctttgagtgtttcttaatctgtcaactttacttaatactgactcactcttgtacctgatgctgtaacagcaacgtatcagagctgttgtgtagtttagaaaatgcagatgggtgctaaggcactgcttacagatattctaagtgttggctaagagcctgcatctgctatgtacatacacaccgatatgctattgctctgtcacatattttgcagtaacttttccagcatgctgatatttaactggaattgctgaagatggcaggaatctacctaaaaggccatttatttatccttgttttatatgacaccaaatgtatttttgtagttccattattactgaagccagttatttgttaaaatgcaatttgaagtctttgagtgaatatcatttaatttacctctaaatatctcctagcttcatttattcaaaaatttcacattgatcatttatttttttgtctgactgtaatcttactcattttcttaaagaaggactcatacagtgcttttgggcgggttccaccaaccctcgtgctcactggtgtctcggcatcactcattctggcctggctgcacgtcctggcggctctgccgtgctcggcggtccatgctcggcggtccatgctcggtggtcctgctcagtggtccatgctcggcggtccatgctcggtggtcctgctcagtggtccatgcttggcggtccatgctctatggtccatggggtgctcggtggtccgtgctcggcggtggttggtgctcggcagtccatgatctgtggcccatgcacggtggtccatgatctgtggcccatgcacggtggtccatgatctgtggtccatgcttggtggtccgtgctcggtggtccatgggactgatcctgcacaccatgttgttttcctataacttaygtactttgagtgatgtggttattcatttcgctgaggtcttgtaatcttactttcgggaataatgcactgattttggtttgtttgatcatcactagggccacaggagaatggtatgctgctcggcatggagtgaagaccaccccgtgtgcaatctgttcacctgtgggtttgaccggcaagccattggttggaacatcaacatccctgcattgctacaagaaaaataaggacaccggcagcccttagtttcactgtttgccagcacagacctttgatgggtgcaggcttttctgcgtattaatcagccatttttgtgagagtttgaccctggaaagggtgctttgtatatgttcttttcacatagtgcccagcttgcatgaaatgtacagagaaatgtgtggtcgtattttttacttttgtcttgtatatgtatgtatattgggtcctctgggcagtagaggcaaagctcacctcccatgtagcacatgraatgcttgtgagttgttgacattggacaggtgaacagtagggcattacatttgtgtgaattaaatgtgaacttctgtattacgttgcggcgtcggcagtcctgcgttccctggagtaactgtacgtatctgcctttgctgggaagactgtggggctgcctgtgttggctggcgaccagcaggattgctccaggattttgtgtttacctcgcgtgaagttcagcacgtgctgtcgtgtagtcagcttctactctaatttctgttacagttctgcaaaggtaacctggagtttagaagttaaaaaaaagcatgggatgttggatttgcaccatttggagtttctttaggaaagaaaagttttctgcttttttatagaaaatcatttcagtctcccgaggtctcatgctagcaaattttgaaataggattctaatcactgatttcaaatattaagcaaaatgtaaagcactttaatttatagctatggttataaacaggttttagatgtttcaaatgacttgtccactgaatgtcacttgaccttgataagaggccgcctgcacacagagcccagttaattctccgcacctcggttgtgtgcttccgaatgggctcactcccgtggtggtgtttgagagccaacaacactacctcagagacgggtctttgggaaactttgggtctcactgttgcctggctggagcactttggtttatagctggaatactgagttcagttcagaaggcaggaaagacagtcacaccgacgtgtcctgaaggtgtaggctctccacttaggcgcacaagctgacggctgcagccagcaggccccggtgacgagacacttccaggtcttgtggtggggacgcctctcagtgccagtcccgccactgctgagtgagcctggtgttcttgccttcttggaaattactgctcacctggtatctgtacgttaatgtttcttgctgagttacagttttgataaagaggctctcatttcctgtgtcttgtatattcagtcctttcaatacgtccacctggaggctcaccacttggagagacacaggaaggtaatatttacagctgtcatgtgacatccccaggtctttgtgttttgccctgttttacggtgaggtaggagggaacccatctggggaccggtaggtgcaggtgcagtaggacgtgggacttttggacccgtcctttggtgcagctcgccagggatgagaggcacctccctacttgggtcttcaggagctggtccaaggagcttcgaatctaagtcatctagaatgaccctgaaatgactgacagccccgggcccaagaaaaacccataaccacctcagatggatctgacgtggctaagggacaaacagcaaatatttcagtcattttgattttacaaataaaaaatgtgttgtgtttttgtccgacattatttcctgactgcactgttctgagaatggagtccacctggtccctctggttgattagaatctcaggtttcagctcctgctgtcctgagcgaacttgcctgatgcagggctgtgctgtgtccagatgttgctggggcctcactttttctcttggctggaggtccaattgccagagcctcccacactgcacatacaaaggtctgagcccagggcagcttctggggccactgcacaggccacctgcttgggttcctcggagtttaatttgaaagtctgggtgtcttaggatgatggttaggaacattgaaaaatggctgcaaatagccaaatcaaacttaagaaccagatctctgccagattaaacatttttgaagcttttaaaagtcaatattcctagtggccactgagttccaggcacactggtgccctttactgccacagctgctcaccttgtctggcaaactggagggacctcagaaactggactcctgcatgtccttgggggcgcagccctgtggtgctcaggcagagctctcaggagccggggcaccttgctgttcgctgctgtgtcgtcttctaatgtgagctcatccactgctgctgcagcgtggtgatcaggagtcacagacaagatcggggatggtgtgtgtgtstgtgtgtgtgtgtgtgtgcacgtgtgtgtggctaaattaagtcatactgtcaaccacacgtgatctcgtctgaaacagtgtttggaagtgggaacagttttgtcctgtatgctgatgtgtccagaatttcatttaatgatagacggaaaatgtgtggttactgaaaactgtatatgatacagaatttcataagagccatgctgttgggcaaagcaactctttttcaaccactgctcatyagtttctgtagagacaaaaactctgtacatattttggaatctgaagaatcctatgtaaatcatttgttacttaagtctgtgaaaaacatatttctttggaggaaaatgtatgcatttataagtgttccatggaatcagtttttattgtatcgatataattgtctctaagtgttgactgtcttcattgcaatatgaaattcattaaaatgtccatgttccataattactattataaaagctttgtgttattgggagtcttattatttttatagtttttcatgttttgctttggtgaaacattgtgaatgactatataaacatcacgatgagctagaaattgaacaaatataatactggtcactcgaaaaatttttagacttaaaaagtcagttgtgttttgtgtctgtctcttatgctaacattaaacaatacataattatgttgcttcatccctcatcaggagcctgaaaacttccaaaagcgttaacagtttgacataatttttggtaaagttcctcagtataataaaatgctcataccgttctcattgcagtaagcttgtttgaaagttaaaaaaaaatacagttacagaaagtaggtgccattttctgtgggagaatgcaaaccagactgggagtggctcctgggggctcctggtgcatggccatgtctgacccacgcgtggaggctgaggctgtggctgaggccatggctgaagctgaggccgaggctgagaccaggactggtgctgtggctgtggctgaggctgaggcctaggttggggctgaggctggggctggggctgaggctggggcggaggctttggttgaggctgtggccgaggctgagaccagggctgtggctgtggtggtggctgaggctgaggctgaggcccaggccgtggctgtggctgaggctgaggctgctgcggtctcagcaggtggagagtctgggagggttcttgcttgagcagatagtggctccttcacgctggcgaggccactgcctaagctgcattggtgctgggagtatcttcacacccagaaaggcagaccatttctccactggttacttaactttctcaccttcctccttaaatagcctgcgattattgtctaaatttcataatgttacatcttcagtgaatttaaaagttcatgctctattagtatcaagaatccagatagaaatgcttacacattgctgtgatttcaccaaaacgccagggcactggtctcccttactatccataggtttactgtttttccctaataacttagaatttaaaaaactatgctaaaatttgggaacacctgaatttattatatgtaacatatacaattcatcttatagtgggaagaagctgaaaatgaaattagccaaaagtcttgtgtgattttttttttttaattaaaaaatttttttttgtgacagggtctcactgtgttgtctaggctggtctcgaacttctaagctaaagcagttgctcacctttgcctcccaaagtgctaggattataggcttgagccaccgcgcctggccaaaagtcttgtgtaatttaaaattaattttagtagaatatcttttattaagcagcttttggtcaaaatgaaaatgaactaagcaggtctttggagatgcaggagctctgtgtggaagtcaagctagagtttcctggggcctgttggtttgtgggctgagtggagaatagtgaggagcttccttgggtatctggtcatggaggcttctctgaggttagtcaaggcaccaggaagtggtggggagagtttccagtgagcagagtgccataagcaaaaacaaggtgagcttggcacacttcaggtgctgagatcagagtgaccagagtgcaggtgaaatgtggtggccccggggggctggggtgacatgcaggcaccgtcccacccagaagctctggggaagagtgtggatttcatcctctgcacctgaaagggtgaagatcagaagtggggagactgcccagtcatccaggtgaaggatgttggttgcccgggctgttgttggcagtaggatggagaaagaggatggattgagatctaagggttagaacaggcagttcttgctggaaagaagtgttcttcattctacagttcagaataggaaaggtattgactgtgcaggcatttcttagtgtactcaaaagatgtttcaagcactgacaacctaaaatatatgatcaggattttccccttaaagagttgatgatgagttaggaaatgtcagtcacaacttggagacaccattatcttagctaagttcatctgtcacccatgctgatgagcaccttgccccccccccactccacagactctgcctccctctcacctgggcaccacgtctacctctcacatggatgctgtcggagtggtcatgccctggtatgtgacaccctgtctaggcatgattgattgggggtgggagggtctcaggccttcagacttggcttggaacaccaccactagctctcttgggcctgtagtttgcagatgacagactgcaggacttctcagcctccataatcacatgagccagtccctcatcacaagtctttgtgtatctatatacatcctattggttctgtttctctggagaaccctgactaatacagtgacctatttagttaatggttctagtactgtttgttttccacatgaaatgaagtaatctatttggatccatacctcacaccaaacaaaaatgaattccagcattaactgttaaattttaaaggagaaacatcaaaattaaaattgtttttataactttagatttattaaagttctttaaaaatgcattaagcatactagaaaagatggatgaattcagctacattaaaattaaaagattctgttcattataagacaccgttagggtgaaatgataaaccacaagtggtagttgcaacatatataattcacaaaggactgctatccaggatagtgaacaaaataagattttatatatctataggagaattggaaattgaacagcagacctgaataggtatgtaacaaaagagaaaatatgagtagccaataacaaaatacagaaattgagaacttgaaaattaaggccaaaatgaaatgccatttcacagtcattagattggagggaaaatctgtggagcatatatagactattggaactttgcaccctgttggttggggcctaaagtaatacagcaactttggaaacattatcttggaagtctggctgtgtgcatacctctgtgcccagcacactaggtgtgtgtttagaatacggttgattatgctgtaatgtctagagcatttgcattagaatcgtcttgagtgtttgttaaaatggagacctctgggtctctagaagctactgactcagaatctctggggaatggtgacctgccttttataataaacatgctctcacgtgggattctgctgtccagtttgagaaccactcttctaaagaacttgaacatgtgttgggagactgtgcagggtgatagcatcaaactagaaacaacacaaacatccacaggggtaaactggcaaatctacacagagttagcacagagcggtaaaatcggagaacaccacgctacactcaatccttgatcttaggaacataatgtggaatgaaaacataggcactgaagaccacagacatatgaaaccattttcataaagtacaaaaacaagcaaaaccaaaccacgtctgccagtccgtctatctaatccgtggtcacctattttgggggcagagggtaggattgggaagagctcagaattggcagtgtttggttctcaatttggatggtgggaacatgtttttttgttttttgtttctttttttttttgagacagtgtctcactgtgtcacccaggctggagcgcactggctcaatcatggctcactgcagcctcgacctcctgggctcaatcgatcctcccacatcagcctccctagtagctgggactacagatgcatgccaccacacctgggtaatttttgtatgtttttgtagagtcagggtttcgccatgttgcccaggctggtcttgaactcctgggctcaagcaatctgagtattcatactttataatactttacaattagaaggaattttttatactattccttcagtgtacctaatattatataattaaaagagtaagaaattctaaagagaaagtgtgtgttattccaaagatggataaagtgagtgctgataagatgggggatttataccaatattttttgatagcatcagttttaaactcatcattgaagagccatattttattcacttcacatattagtactttttccatttataaacatgtagttttattattctaagctatctgatattcaggcagtgtgcacatttcataggaggaaacacaaagccaattttgctccaagataatgtccttgagaaaatggtcactgaggaagttgttgaaaggcagtgtgttacactgtgtcaaaactgggctgctttcaaatacattttagaaatcccagctttaaagtaggaaatgtaataaggatttcatttgccaggtgtgatcataaaacaataaaagtagttttctaatgttgctcataaactgggactgaaaatcatttcaaatccaggagacagtccaaaaatggttattgagcaatggccacatattggaataaaaatttttattttcagtctgtgttttgggaaaacagcatttcattgcataggtggataagttctagaatattggctaaacatataatcattttctataatgcatatgcattacaaaagttttctagctcctgaagtattatggagttttctagctccataatacaaaaatgttctactgataaacgttattttctttctttttcagtaataaaattaattgtatatgttctctgaccactccctgtctgaaggagctaattttagttttcctctcttttgaaacagctttgttctggtattctggtgtaacagacaacacaccagacatatttaaggtataaaacgtgatttcctttgacaggcatttaccatgaaatcatccccacaatcgaaatcatgcacaatcccccaaggaagtcacccgggcccttccgtgttccctgcactgcccctcctcacccccactccacccttggggaagcactggtctaccctctgtcactagagattaatttgcattttctataattttgtataaatgcagttatacagtatgtattttttggtttctttcacttagaaaaattattttgaaagattaattttattgcatatcccaatctatttcttctcattgtgagtaggattttgtcgtgtggataaaccacattcatctgtttacctgccgatggacatttagattgtttccagtttttggctatttcaaataaagctggtatgaacacttgtgtgcaagtctctgtggtgacatgttttcattctcctgggcgaattcctgtaaatgctgattttgaactttgagagcctgccatacctttcccagtgtgaccattctagagacctctggtttccattccaacatgtgaaagagcttggaagtcgtttctctctccctcaccataaaaaggcaaaaaacagaaaacagtgatttttcttagatcacaacagagagttgtggtcacagggcaaactggtgacccaaaaccggagaaacaggcagatacagagaatgatggcttccggaagagcagctgctgcagccagaaatggctcgggaccccacatggggccatggaggcattgacagaggctggggctggctgcggacggagggctcccagatgtctggtctgctggctgcctcagtttcatgggttctctttccaggagcaccaccaagttcctatggtgaagacgggagaaggaccccctcctgtgtggtgaggggagggaaggtgactgtggattcagctagcgctttctccctacagacccactctgcaagggcaaggccttcaccagcacatctgacctggggggagggaaaatcactcggctccagcctcttagccttcctgtctcagggggcagtaccttgaggatcatttgtgaaggtcacagccacagacgtgtgcaggccccctgaaaacacaagaccaaatcatgggactacagacccctcccctcccctttccctcccctgccttcctttttcctcccctccccttcccctccccttccctttccctcccctcccctccctcttctacctggcctcacaactacacagctcctgaataaggacagtcaagggggccacagctctgactctacttaagaaggagtttcaag

SEQ ID NO: 6945 - DNA, 66025 bp, Homo sapiens
  misc_feature (1)...(66025): n = A,T,C or G, or insertion/deletion polymorphism (see Tables 1-2)
ctagctaatgtctttatcttacatagacacaaagtctcctcactatgttacctaggctggtctcacactcctgggctcaagtgatctttttgccttggcctcccaaagtgctgggattaataggcttcagctactgttcctggcctgatattgcatatcttatttttgaaacttctataaagtctgtcatgtttagtatttcaggaagtcgatcacttccacctttcttttgaaatccacccctgacaccatctcctcatgtctgttgtccttttttttttttttcatgagctcctttgacatatgactcctgggcattttaaagtctctctcttttattataacatggagggcagctctgagcctggttccattgattactttgtatcttcacaggatgttgttgtcatcttcttcttcttttgatacaacttgtaatttttcattgattgccaaacatcttgtgtagaacaggagagatttaaataaatagtatttgtgactagaaatggacacacctcttctcaggcagttagcttggtggattgagttaatctagttaaaaggtgaactgtgcaggttttgtaattgccaagtttactttcggtacatcataggcttcaaattccttttgtgatgccttatgcttagggtggcatctggagtgctggctatttctcagtgtttgtgccccaccctcagctctcgttctcctctgtacaccacacagcagaccccacagaggtcgtctctctgcacgttcatgccctctgccagtggcggactgcttagttacttggtgctcttgctcgggtaatggtgaggggacagggtgcttctctgttgccctcttcatcttctatcttaggtaggtttatatgcctgggccctgggggatgagtatttctgccccactccttatgccaggctgccaaaccctgctttgaatttgtggctggtcttgggtgggaaagatttttttgtgctcctccttcagtttcaggagacctctaaaagtattagcttagaactctgggctcacaattgctccttgtccctccctcggactagggtcctccctgctcttcccttggtaacacctgtgccctgggagcaacagtatttgccagtcctccccagggtcttaaggctttcgagagaggagcatgggcagctggggccttttctgcaatgatagcaaatacggtccttgatgcccatagtactgagggggctctttgtagtctcccacttggcccccagtatttcctgtgaacacctggtagaggtcatggaaaggagcctgtgggtaagtaaagccctccttgcttctgtgacacccagaggctccttatagtcactctagtctgcactaggcctctagcaatttatgaaaaatgtagctgctttcttcttgcatgcttgtatgatggcccaaatacctcccatactctggcactgatgagacactccacccatctggtctctgctcatgaggattgcatgtccttgaatttcaggctacttagcttacctgcaacctcagctcagctgttttgttttcttttgttttgttttgtgatggagtcttgctctgtcactcaggctggagtgcaatggcgtgatctcagctcactgcaacctccacctcctgggttcaagcaattctcctgcctcagcctcccgagtagctgggattacaggcatgcaccaccatgcctggctaatttttttgtatttttagtaaagacagggtttcaccatattggccaggcgggtctcgaactcctgaccttgtgatctgcttgcctcagcctcccaaagtgctgggattacagacgtgagccaccgcccccggcccagctcagcatttaggttcaacttttggtttaagaaaagtgattttgcagtttgtctggctttttcatattgtcagagagggggcaatgcactttccagcttatttttattttttattcttagagacagggtcttgctctgttgcccaggctggagtgcagtggcacaatcatggctcactgcagacttgaagtcctgggctctagtgatcttcctgcctcagcctcccaagtagctgggcatgtgacaccacacctagctaacttttaatttttttttttggtagagatggggtcttactatactgcccaggttgatctcgaactcctggcctcaaacaaccctcccaccttgccttcccaaagtgttgagatcacaggctcgagccaccaagccacactctttctagcctttcaaattccaagttaaagtggaacttgccacatgtcgttttgtatcactttccccaacccctttcttttcttttttttttttttttttgagacggaatttcgctcttgttgcccaggctggagtgcaatgttatgctctcagctcactgcagcctccacctccccagttcaagtgattttcctgcctcagcctcccgagtagctgagattataggcgcccaccaccatgcctggctaatttttgtatttttggtagagacagggtttcgccatgttgactaggctggtctcgagctcctacggatcggcctcccaaagtgctgggattacaggtgtgagccgctgcaccagccccaacccctttcaattagcattgcaaataattccccttatcatgaaaacattatttttaatggcagcagagtattgctttatattaacatgacagtttattcaaccgaactctttatggggcattgcaatagacttaatgttttatgtttgcagctctttacaccaacacttttcctactgtagtgatttctttgaacaatttcccctccccaactccctgtggttctaaaggggtggccaatcacagtaccccatcaccctggcctttaggtgggagaatgacccaggccctgcctatcataccctcctgactacagtgactgattcagaggtgagccagcgagagagggaggaacacagtccttcttcgggaatttctataacataggtgaaaaattttgtcagttggggtcgtggagctgaacgaatatggcttgagggctcccagctgccgtcctccctacgacttgaagaaaagcttgtgtgcagtaggagaaaatgaaccaatcagagacaagtacacaagagagaaggactgggaggagtcggccctggctgcaccacgtctccactcctgggctgtcaagtttttcaaggtgctctggttccataagctcattcttcctgttggatccattccagttaccaaaaacacttttttgtttaggctggtttgatataggatgatcattggtcccagagagcatcctggctaatctattttattattttattttatgagacaagttctcactgttgcccaggctggagtgcagtggtgctatcatggctcattgcagccttgaacccctgggctcaagcaaatcctaccatctcagcctccagagtagctgggactacaggcgtgcaccaccacactcagctaattttaaagaaatgttttatacagactgaaactgcctttgcaaaattgtaacaggaaattatgacagtgcaagaagtcagacctaaccgactctatcttgcttctaacccttaagctgtccttgtttattcctgggcataggccgaagtaactttgggaaggaattcagttcatggtttgactctgaaacaaaattgataacagccctttcccaaaaagacccccttcttgcccggggtccagtctgcctttgtaggactaacagattagctacaagattagaaattacagtttagaggccgggtgcagtggctcgcgcctgtaatcccagcactttgggaggccaaggcgggcggatcacgaggtcaggagatcgagaccatcctggctgacacggtgaaaccccgtctctactaaaaatacaaaaaattagccgggcgtggtggcgggcgcctgtagtcccagctactcgggaggctgaggcaggagaatggcgtgaacccgggaggcggagcttgcagtgagccgagatcgcgccattgcactccagcctgggcggtagagccagactctgtctcaaaaaaaaaaaaaaagaaattacagtttagaggtcatgcagcctctggctccaagagtctgaacctccccaaattgctcctggggataacatcactgctgtaaaacctaagatcagtaattgagttattttgcaggccctgcactccatgggatcagctgacaccacacagaccagtcatctggcccaaccagttctgccatctcacccaggaacagaagacattaagaaaatctaacttcgaccctctatgattccatctccaacctgagcaatcagcactccccacttcccaagcccctacctgccaaattatctttaaaaactctgatccacgaaggctcaaggatttaagtaataataaaactccagtctcccacacagccggctctgcgtgaattactcttttgccattgcagttcccctgtcttgataaatcggctctgtctaggcagcaagcaaggtgaatccattgggtggttacaaaacggggtctcactatgttgcccaggctggtctcaaactcttgggctcaagcaatcctccagcttctgactcccaaaagctgggattataggcatgagccactgcacttagactaatttatattttaggtgacttctaagtattaccatcataaagaacactgtgggctgggcacggtggctcatacctgtaatcccagcactttgggaggctgaggtggtccctggagctcaggagttcgagactagcctgggcaacatggtgaaaccctgtctctattaaaaatacaaaacaattagccaggagtgttggtgcctacctgtggtcccagctactcaggaggtggaggtgggaggatcgcttgagcccaggaggtcaaagctgcagtgggctgagattgtgccactgcactccagcctgggtgataaagtgagactctacttcaaaaaaataaaaaataaagaaaagaaaaaaaagaaagaacagtgtgaaaaaactcagtgttacacttgtgcatacatgcatgctgtcctttttttcctcattaagaaacatttccagagtaggagttgctgagtgaaagaatatgcaaatctcaaaggctttggtgtgtattacaaaattgccatgagaaagttatccacattctattttctctaggactgtgtgtgtccctatttccatacagtcacaacaatactgagtagtattaattttttttttttttttgagacagagtctcgttgtgtcacccacgctggagtaaagtggcatgatctcggctcactgcaacctccacctcccgggttcaagcgattctcctgcctcagcctcccaagtagctgggactataggcacccaccactatgcccagctgatttttttttctttgtatttttagtagagacagggtttcactatgttggccaggctggtcttgaactcctgacctggtgatctgcccacctcaaccccccaaagtgctgggattacaggcgtgagccactgtgaccggccaagtttaccgcttttctattgaaactgttctcatacccgtgttcccaactacaccttaattgaataataaaagaaaataaggacattaaatgagaacaggaattggaatgagaccagaaaaaaagggaggagttcaaaatatgttctgagagctttaccattatgaatactcagctctggttttcccccaaaactggctgaaccagtatggatgttccaggcagaaacaactttaaagaagtgaatagtggccctaccctggtccaccacctaacctggtggttacagaaggaggaacacagtcctcctgtgttccaggtgccaggaggtgactgactatagcatcagtcatcactgcacaccctacctggaattagtatataaagctacgcggagcgatctctgcccctgaccctggaaaaatctgtctcacccacaaagatgtgggctcagctccttctaggaatgttggccctatcaccagccattgcagaagaacttccgtgagtgcttggtgtcagaattggtttattagggcagcggcttcttcgcctaactttctcaaacatttatatggagatggggagatcaactttggtttatcttaatttcctcctccttttttctcttctttggttccactgatcctttacccagagagggaggctgacgcatgaagaggaagctttaaaaaagataaatattaaaatgtgccctgttttctgaaataggcctaatttcctccttggtgctctaggcatgtgtgctcggtgagggcctcctgatggcggaagttgargactgtgcactgagtcgttgcccctctgcttcttgtagaaaatgaggtgcataaggaaggcaggggcttggtctgtctaattcactgctacttgctgagcgcttaggagagtgctggatttttcgagtgaatgaatcattattgccctgaaatccttctgctcctttaatagaaactacctggtgacattaccagcccggctaaatttcccctccgttcagaaggtttgtttggacctgagccctgggtacagtgatgttaaattcacggttactctggagaccaaggacaagacycagaagttgctagaatactctggactgaagaagaggcacttacattgtatctcctttcttgtaagcacagactcagccctcactcgaatcccttacttgcctattctcctccctaggctcactataatctactttaagtataatttctgttatcttttgccacggcctctaaacctattttttctcaacttaacctcaatccccggctataactcacccacggtttcctcgacctaggatttctccctttagttcctgaccttaattcttcctcgtggtaatttgttttatgtctctatccttgctacccccatctaactcagctctttcctttaactcactgttgggttgagaccagttgattctgttcccccaatcccttacccctccccagaagtcccctttcttggtcaggtaccacctcctgctggtggcacagaagaagtggccacaatccgggtgtcgggagttggaaataacatcagctttgaggagaagaaaaaggttctaattcagaggcaggggaacggcacctttgtacagactgacaaacctctctacaccccagggcagcaaggtaagagtcacatatttggggttcgactaaaacctggggaaaccgctgtgcacaggggtaaagaggggatttgtggtttgacagtaggctttggaaaaaaaggagtgcagaggagaggaaaatctggggggattaagtagtgcaagtgttgaatacatgctgcgctacacaagcaagagaagtaggtgggggttgctactgagtttgtgtatctaaaacaaaagtacacatttcttctggaatagaatttggcaagtataactgggttgctgggccttacaacaaactgcttgtaaatggctaagaaagcactgagggcatttggcttgagctactggggttttttttttttttttttttttttttggatttgttcattcgtccttacaggggcacttcattctgagatttcaaagtcaggcaccctgaaaagaaactatgtttgggttttttttatttttttatttaaaatttttgtgggtacatagctggtgtatatatatttatggggtagatgagatatttttatacacacacacaatgtgtaatcattacatcagggtacatgtgtatccatcacytcaagcatttatcatttccttgtattacaaacaatccaattatactctcttagtaatttttaaatgtgcaataaattattgttgactgtagtcactctttgtgctaaaaactacaagatccctagatcttattcattctagctaaatatatttttgtacccattaaccattcccaccccacccctcatcctgcccaccattacccttcccagcatctggtaaccatcattctgttctctctctctctttcaaaaaaatttttttccttttaccttatttttttccacacacttaaaaattattattctattctctatctccacgacttcaattgttttaatttttagctcccacaaataaatgagaacatggaaagtttgtctttctgtgtctggtttattttacttaacataatgacctcctgttccattcaggctgttgcaaaggatggggtctcattcttttttatggctgaatagtactccattatgtatgtgtaccacattttttaatccattttttatcatctgttcatagacacttaggttgcttccatatcttggctattgtgaatactgatgccataaacatggcagcacagatagtctttgatatactgatttcctttcttttgtatatatacttagcagtgggcttgcaggattatatggaagctctatttttagtttttttcagaaacctccaaactgttctccatagtggttgtactaatttacattcccaccaacagtgtatgagggttctcttttctccrcatcctcaccagcatttattattgtttgtcttttggaaaaaagccattttaactggggtgagataatatctcattgtagttttgatttacatttctctgacagtcaatgatttgagcaccttttttatatacctgtttgccatttgtatgtcttcttttgagaaatgtctattcagatctttttgcccgttctttaatctgattactagatgttttcctatacagctgtctgagctccttatatattctggttattaatcccttgtcagatgggtagtttgcaaatattttctttcattctgtgggttgtctctttgttgattgtttcctttgctgtgcagaagctttttaacttgatgtgatcctgtttgtccatttttgctttggtttcttgtgctccttgggtattactcaagaaatctttgcccagaccaatgttctggagagtttccccaaagttttcttatatataatagtttcatagattgaggtattagatttaaatctttcatccattttgacttgatttttctatatggagagagatgagggtctagtttcattcttctgcatatggatatccaattttcccagaaccatttattgaagagcctgtgctttctccagtgtatacacttgtcacctttgtcaaaaatgagttcaccctagacatgtttctgggttctctattctgttccattggtctatgtatttgtttttatgacagtaccatgctgttttggttactatagctttgcagtataatttgaagtcatgtaatgtgattcttccagctttgttctttttgttcagaatagatttggctattttaggtcttttatggttccataaaaattttatgattttttttacaaaagtcctaagatttaggatgtagaatttctgtgaagaatgtcattagtattctgatagggattgcaatgaacctgtagattgccttaggtagtacggaattttaacaatatcaattcttccaatccagaaacatgaaatctcttttcatgtttttgtgtgtcctcttcaatttctttcatcagtattttatagtttttattgttgagatctttcacttctttggtaaagtttattcctaggtattttatattatttatagctattgtaaatggaattatctttcttaatttctttttcagattgttccctgttggcatatagaaatgttactgaattttttttgtttttgagacagagtctccctctgttgcccaggctgtggagtgcagtggcgggatcactgcttactgcaacctctgcctcctgggttcaagtgattcttgtgcttcagcatcccaagtagctgggagtacaggcatgcgccaccatgcccagctaatttttgtttttgtttttttgttttttgagatggagtctcattctgccgcgcaggctggaatgcaataaatggttgctcattgcagcctctgcctcctgggttcaagtgattctcctgcctcagcctcccgagtagctgggtttacaggtgagcgccaccacccctggctaatttttgtatttttggtagagatggagtttcgccatgttggccaggctggtctccaactcctgacctcaagttatcctccccactcagcctcccaaagtgctggggttacacgcgtaagccaccacgtctgtcttcttgcacttttaggattcttttttgttttttattccttgatgtttgggagtttgattattaaatgtcttgaggtagactcatttgggctaaatctgcttggtgttctataatcttgtaattaatattgatatctttctcagctgggctcagtggctcatgcttgtaatcccagcactttgggaggctgaggtgggcaaatcacctgagatgagtatttcgagaccagcctggccaacatggcaaaaccctgtctctactaaaaataccaaattagccaagcaaggtggcctgtgcctgtaatcccagctactggggaggctgaggcaggagaatcacttgaaccagggaggcggaggtcacatgagccaagatcacattactgcactccagcctgggcaacagagcgagactgtctcaaataataataatattgatatctttctctaggtttggaaagttctctgttattttcactttgaataaactttccatctcattttctctctcaacctcctctttaaagtcaatacctctttttttttctctttgttaaatttatctgataagattctgmattctttctctgtgttatctaaaattttgttgagtttcctcaaaacagctattttgaattctcgatctgaaagatcactatctttgtttctgggagattggttgctggtgccttatttagttcatctggtgaggtaattttttccaacatggtcttgatgtggatgttcattggtgtctgggcattgaagagttaggtatttattgtagtcttggcattctggacttgtttgtacctgtcctccttgggcagactttccaggtatttgaagggacttgggtgtcgtaatctaagtgtttggactctgcagttcatctgcattagggaggaccccatgctcagtatctctgtggctcttgaagcctcatagaggtacctccttgatggtcttggataagatctggaagaattccagattaccaggaggagactcctgttctcttcccttactttctccaaaacaaacagagtttctctctttgtgctgagctgcctggagagaggggtgacacaagcacccctgtggccaccagcattgggactgcactgggtcagatctgaagccagcaccgtactgtgtctcacccaaggcctgtggtaaccagtacctggctactgcccatgtttgctcaaggccctagggctctacagtcagcaggtgacaaagccagccaggcttgtgtcctccccttcagggtggtgagttccccatgaccctggaaggtccagagatgtaatctgcgagccagggcctggagtcagaaaccttaggaatctacctggtgttctgttctactgcagctgagttggcacccaagccataagacaaagtccttcccactcttccttccccttttcacagaggagtctctctctgtggccaccactactccaggcccagaggagtactgcctggatacttccagtattctctcgaggcccaaagtctcctttcaccagcttgtggtgaatggtgcctggcctgggactctcttttcagggcagtgagctctcctctgacaaacagcaggtccagaaatggcatccaagagccacagcccataactggggaccccaagggcctgcttggtgctgtaccccactgtggctgagctggtacctaagctgcaagacaaagtccccttgactcttccctctccttttctcaagtagaaggagtctctccccatagtcaccacagctgggaatgtgctgaatcactggaagccagcatgtctctgagtctcacccaaggcccacgacaagtactgcccagctatcactgctgagtatttagagccccaggggctaatcggaactcagcttccaaccgctgggatgggcagttcacccctggctaacgctggtctaaatgctccctccatgggcactggctgagttctgccctgtgtgctttcccctgtgattgggcagcaytgcrttctaaagccaagtcccacagtcactgtgctctcccgccctcaagctcatcgattctgtctctgtaccacagtcactgctgggggatggcggggagggggtgaatcagcaattsaagtgtgtcttttctaccctcttcagtgcctctttcagtgatataaagttaaaaccaggcactgtgatcactcttctgatttttggttcttatgacagtgctgttttgcgtgggcagttgttcagtttggtgttactgtgggggatgaggagggtggtcaatggaggcttctattctgcctcttgctctgcctcctgagctccaggcctgygtttggactttaccttactctcagagcaggttttgtaaaaaagtaaaacctgttggggttttgctgactcagmgcatgtgtgaggaaggaggagggatagaggaaagattctgagcaggaggcsgagcgcggtggctcacgcctataatcccagcactttgggaggscaaggcaggtggatcacctgaggtcaggagttcatagaccagcctggccaacatggtgaaaccctgtctctacaaaaattagccaagtgtggtggcacctgcctgtggtcccagctactccggaggctggggtgggagaatcacttgagcccaggagtttgaggctgaagtgagccacggttgtgccactgcactccaacctgggtgacagagtgagaccctgtatcaaaaaaaaaaaaaaaaaaaaaattctgagccaggaaacatcccctttgctaatgatgcctgttcctttccagtgtatttccgcattgtcaccatggatagcaacttcgttccagtgaatgacaaggtgagttgggaggaggaraaggagtggcgcagggagaacagggaaaaggatgagagattctctagggtggaagtcctctcagcctgggcgtggcaaggcgaggccctctgggttggagactgctgtgtgcgtgggactggaagtgctgggcgagcttcagggagctagcctaaatcagcctaggaacaagcagaggtaaccagttctcagcttcagtatctacacattcatcaggttcttgagagatggttatgctccttgtcattttattttatttatttgtttatttagagacagagtctcgctctgtggcccaggctggagtgcaatggtgtgacctcagctcactacaacctctgcctcctgggtttaagcaattctcctgcctcggcctcccaaatagttggaattacaggcgcgcaccatcacgcctggctaatttttgtatttttagtaaaaacagggttacatcatgttggccaagctggtctcaaactcctgacctcaagtgttccacccacctcggcctcccaaagtgctgggattacagacaagagccaccatgctcagccccctttcattttaagagttttcgcaaacttcaagaccttttcttcaggactgacaaaagcattttttttttaaggcagaaaggagaatgtccgcttccactctgtttctatgaggcaaaataatttacaaagtaggtaattctcttagggcaacattaaataaatacatgccaaagcttaaaatgtagcaacattttgcgaatatttgatttttccttggactccccatccctagaatcataagccttaccacaggtttgatttcaagttggagcatgtgtcatttctacatgcttctgagacacttacctcccggacacccctgctttcttcctcttccgtctgtcccagcctgtgtattcaaatgaaacttttagagataaacatagagaaagcatgatttccattttccatctccgtgttctcagagctgctgtttcctttccctatgtgcaggggagttattagcttgttatgattggtaatgccctacccgctactctctttcccaatatagatttccttttacttcctccttcccatcacctatggcttttctttggtaggtataacgttgagtacttcttactttttttttttttttttaacattttaagacaaggtctcattctgtcacctaggctggagtgcagtggcagtcatggctcactgcagctttgaccctgccccgggctcaagtaatcttcccatctcagtctccccagtagctgggaccacaggtgtgcactaccacacctggctaattattttatttttttgtagagttgtggggggcgggggtctcaccttgttgcgcaggccggtcttgagatcctggcctctctcgctttggtctcccaaagtgttgggattataggcctgagccactgcacccggcctgagtgcttacttcttaacagactgttttctctagagctgcaacaaggaagtgctgggttcaaagcgtggcccgcagcagcactattttagactcacttaccctcagggttgatctcattaactacccctgttacgattcaaatgaagcgggattacttccaggtgttctgttttctgcagttaggctctttctcttgtgaaattactccttcctccccactctatttctccagccaaactctccctccaaattcagttgaaacactgagattaacaaaaggaattttaccaagaaagctaggataaaaattgtgtttatgtaaccacccaatgggttcaccttgcctgctgcttagacagggttgatttatcgagacaggggaattgcaatgaagaaagagtaactcacccagagccggctgtgtgggagactggagttttactgttactcaaatcagtctccctgagcatttggaaatcgagtttttttttgtttttgtttttgtttttttttgagacggagtttcattcttgttgcccaggctggagtgcaatggcgcgatctcggctcgccgcaacctctgcctcccaggttcaagtgattctcctgcctcagcctcccaagtagctgggattacaggcatgcgccaacacgcccggctaattttggtacttttagtagagacggggtttcttcatgttggtcaggctgttcttgaactcccgacctcaagtgatccgcccgcctcggcctcccaaagtgctgggattacaggcgtgagccaccgcgcctggccaggaaatcgagtttttaaagataatttggcaggtaggggcttgggaagtggggagtgctgattggtcaggttggagatggagtcatagatggtcaaagtgaggttttcttgctgttttcctcctcctgggtgggatggcagaactggttgagccagattactggtctgggtggtgtcagctgatccactgaatgcagggtctgcagaacatctcaggcgctgatcttgggttttacaacagtgatgttctccccaggagcaatttgaagaggttcagactcttggagtcagaggctgcatgacccctaaagtgtaatttctaatcttgtagctaatttgttagtcctgcaaaggcagactggtccccgggcaagaagggggtctttttgggaaagggctgttatcaattttgtttcagagtcaaaccatgaactgaattccttcccaaagttagtctggcttacacccaggaatccacaaggacagcttacaagttagaagcaagatggagtcggttaggtctgacatctttcactttcatagtttcctcagttataattttgcaaaggcggcttcagtccctccctttgggttttataacaccttaatcttcaggtgtgggctaggaagatgggaaaaggctgtcgattgttctggcttcttcctgctgagagggggcgtagtgagggtacctaaggtgagaggagtggaactgcttagaagcaagatagcgttggttaggtctgatttctttcactgtcatcgtttcctcagttttaattttgcaaagtcagtttcatttacacagcacaatatttaatccccaaacaagtaaagtaagcctgatattaactgaccctgtctaacttgattgctatactcagttattcagaaactccaggcaacttccagtcggaaatgctactttccttttttttttttttttttgagacggagtttcgctgcgttgcccaggttggagtgcagtagcgggatctcagctcactgcaacctccccctcctgggttcaaaggattctcccgcctcagcctcccgagtagttgggtttacaggaatgtaccaccacatctggctaattttgtatttttagtagaaatgtggttttaccatgttggtcaggctggtctcaaactcctgacctcaggtgatctgcccacctcagcctcccaaagtgctgggattatgggcgtgagccaccatgcctggcctcagcaatgctactttcctagtgaaacacttattttcttccagagcctatttctggccaactgatgtctttcctgattcttgatccctgtgtgagaaaagtactttgttatcgaagtgttttttgttgttgttgttttgtattttgtttttgagttactttgtcacccaggctggagtgcagtggcatgatcccggctcaagcaacctccgctgtccgggttcaagtgattcttctgcctcagcctccggagtagctggggttacaggcatgtgccaccatgtccggctaatttttgtatttttagtagagaggggtttcaccatgttggccaggctggtcttgaactcctaacctcaggtgatccaaccgccgcagcctcccaaagtgctgggattacaggtgtgagccaccgtgtctggcctaaagaagtgtttgtttgttttgttttgttttgactttatggaaatttatagcaatcttagtgatattctcctcctgatgtttatatrgcccaggtttgtggaagtcctagctcatcgtgatccttagatctccttattttttgctttttttgaagaattgccattatccctactatcaaggctgatatttgtatttagtggttcagcttcttcactggttggcatcacatgacacttggcccaagaataaaaaaatcaagcactgtcttgatttcattttcttctttccaagttagatccaaactggtcttctcttttgaatacctttgcagtctctctgagcccctctcctgctattcactgaattccagctttcaatctcatctagttgcaagcacaatgacctgttcctcacaaacttaatggtttcacatctatttagcaactactgtcttgaggaaagtgatacatgattctccaatggaactatttcaaacaattttaaaaataattatttgcaatgcttgaaagtaagcttcctgcccacaagcattcagatggtaaaggaagaagccaggagatggttggctaccaagaagaggtttaaacattgaggaaccccctggtgctaatacttcttttagggcatgtttcttgtgcaagagctcagtcacagggtactgagactggtctgacgctccagttcttcaaatcttttggagactggcaattcctttgagattcctgcccccactcttaccctcctcctgccttgtttccctcccaagaagtctgtgcccccattgttattcttttcagggcacaaaagagccatttagaaaggaagaaatgaagaaatgggcaagagggaaaggaagaattctttgtgaacttttgctttcagcaaacttattcttattgctgtcaaccttctttaacccgcattatctggttttscttttcagtactccatggtggaactacaggtaagcggaagtttctttctcttctctgtcagttgtggaagaggaagaatgagaatttggtggtacaccttgaagacagaagcaactctgagatcttggcccagagccccatgactctgcccagcaccgagcgcccacatccacctaagctgtgcctgctttcttgcctctgccctcctagtctctcacacctacatttcagtagacaaggacaccagcctctgtaatgactacaccgctctctcattcccctaacttctctgtgcccagaygacttaaccaggcttggttccatactccccttagtgtaaggtaatagcccttgccataggcattctcaacaggtacgtgataacataaacacctgtgagaagtattttaaaggaaaggctctagaaggtgatttctccacaatatcttctccatttttccattaaatcacccatgttttaggtatcttacaatcaatctcctcagccttgtcccctaatagtgaccagaaacagagtaaacattctttgtaaatgacatcctgggtcctactttctaaaactggagataacactttagagggctcagtctgatcattaaaatccacaagatttcctaccaaatgggggctggatctatagaaatatttacctcattccgccataaagaaagttataaataacacagggagctgctcttcctggacacagaccacaggggtcatgaacaatgggtggggttttttacctgccttttgcttctttacctgctttttgcaatgcagagtgggaagcaaacgggcaggcacatcatgcagtttctctattggacaggatccaaatagcaacaggattgcacagtggctggaagtggtacctgagcaaggcattgtagacctgtccttccaactggcaccagaggcaatgctgggcacctacaytgtggcagtggctgagggcaagacctttsgtactttcagtgtggaggaatatggtaggkggggaaatggacaggccaaagtattgggcataatctcatcttaaaatcagcaaaggtggagccgggcgcagtggctcacgcctgtaatcccaggactttgggaggccgaggcgggcagatcatgaggtcaggagmtcgagaccaccctggctaacacagtgaaaccctgtctccactaacaawacaaaaaattagccgggcrtggtggcaggtgcctgtagtctcagctactcgggaggctgaggcaggagaatggcgtgaacctgggaggtgsagcttgcagtgagctgacatcacgccactgcactccagcctgggtgacagagcaagactccgtctcaaaaaaaaaaaaaaaaaaaaaatcagcaaaggtggagtaaaatgtactctgggaaaggattatttactcatttttgaatcgatgctgaaccagctaattacttcaggaacatgctacctaaataatgcctccttcattagatccattaatttaattctcactgtttatrcccctctgctcactgcctgtctgactgattcctcctccagtgctttctccatttctccttttactctcttcagtgctgccgaagtttaaggtggaagtggtggaacccaaggagttatcaacggtgcaggaatctttcttagtaaaaatttgttgtaggtaagagcagaagcttgggatctggtggagattaaagatgcatcgagagacatgatgaggggatgacatgggatgtgggattatgggtgggccaaaacttggggcattttatgtaattcagagtcatggcttatccaagacctttttttttttttttttttgagacaaagtctcactcttgtttcccaggctggagtgcaatcacgtgatctcggctcactgcaacctccgcctcatgggttcaagcgattctcctgcctcaacctctagagtagctgggatcacaggcgcgcgccaccatgcctggctaatgtttgtatttttagtagagatggggtttcgccgtgttggccaggctggtctcggactcctgacctcaggtgatccgcccaccttggcctcccaaagtgttggattacagacgtgagccaccgcgcccagccaagaacatattttatagttgtgtttctgctgtttttttccattgctcactcagatagtattattgatttagtctttacaagacacaatattgaatcccatagataaatatggatcaggagaaagaaagatrctgtttccgtccttagtatggtgctaattgtggaaktgggtctactctaagactctgagtaaagtagggaaggggaagagagctagagaaaggtaggattgtcagagcttgctttcttcttttttttgagacagagtctctgtcacgcaggctggggtgcagtggggagatctcagctcactgcaacctctgtctcccaggttcaagcgattctcctgcctcttcctcccggagaagctgggattacaggtgtgagccaccatgcccagcaaatttttgtatttttagtagagacaggatcttgccatgttgcctaggctggtcttgaacccctggcctcaagtaatacacctgtctcggcctcccaaagtgctgggattacaggcgtgagccactgcactggcccrgattgtcagagctttctttcagaggctggagtgtgagagggaagaagtggtgtttgagggaagagttggatctcaagtggaatttcccaactctgactccttatgcttttcttggttaggtacacctatggaaagcccatgctaggggcagtgcaggtatctgtgtgtcagaaggcaaatacttactggtatcgagaggtggaacgggaacagcttcctgacaaatgcaggaacctctctggacaggtgagtaaatgacaggttaaaaaggaacctatcggccaggcacggtggctcacgcctgtcatccyagcactttgggaggccgagatgggcggatcacgaggtcaggagtttgagaccagcctgaccaatatggggaaaccccgtctctattaaaaattcaaaaaattggctgggcatggtggtgtgcacctgaaatcccagctacttggaggctgagacaggagaatcacttgaacycgggaggcggaggttgcaatgagccgagatggtgccactgcactccagcgtgggtgacagagcaacactcagtccccctcccccaccgaaaaaaaaaaaaaaaagaacgtatccacatgtcctaaagcgtaaggaagcaacaatctagaaaagagctaaacagcccaaagtagaaagcatttcccagaattatcatcccagttccaaagaacaaagcagggatctttatcctaaacagggagtgttttagagtctgccttggaaccaagaaattgacctaaaccccagtaaggtacaattttccagttttgaaggcatttctttttccctttcccaaatcttggagcttcaaagtcatttcatgattatctatgtgcaagtgtatacttcatgttgtaggagagtttttctrtattagaaactgaagtgtggagatgagaaattatttccttctacagaacattataaaatggatgtagagattagattcctcatctgctctctatctctgtctctgatcacctcactagactgacaaaacaggatgtttctcagcacctgtggacatggccacctttgacctcattggatatgcgtacagccatcaaatcaatattgtggctactgttgtggaggaagggwcaggtaagtagggtgctccttggctcattaagaaaagagaaagaaaaagggctggtcccagggacagatttactccaagtatacaagacctaccctcttgagtgtttggatggtaccttgttcctagttcatagtcaaggggaaataccagatcccatcttgccatctataagaaatactacgggccgggcatggtggctcatgcctgtaatgccagcactttgggaggccgagacgggcagatcacgaggtcaggagatcgagaccatcctggctaacacggtgaaaccctgtctctactaaaaatacaaaaaattagccgggcatggtgacgggggcgcctgtagtcccagctactcggggaggctgaggcaggagaatggcgtgaacccaggaggtggagcttgcagtgagccgagatcgtgccactgcactccagcctgggcaacagagcgagactccatcttaaaaaaaaaaaaaaaaaaaaaagaagaaatactacatacttctccaaaagattggggaggtgaggttggtttggatctttggccagaaatacattcaacttcatccctctgccaccattctctcagagacttgacattaaacgtgaagatgagaatatcaggtgcctagatctttatacatctggtttccctctgcaggtgtggaggccaatgccactcagaatatctacatttctccacaaatgggatcaatgacctttgaagacaccagcaatttttaccatccaaatttccccttcagtgggaaggtatgttaaaacttttctctgcatagacaaaaaaatgcataaccatctactttgcctccttcctgcagccatagccacatagctaacttagtgctgttccaagtactttatgtgtattcattttaatctttagaataatgcaatgaggcagacactgtattggccccattttatggatamtgagacaggcaacagaggctaagtgatttttccaaggtgatcacaaatagatgggaactatgaccaaatccaggaagcctgcctcccgggtatacactctccactccctgtactctgctgcccctaatcccatagaagtgccttgaatattaatgacaccttaggggtctttctaatgccaggggctgatcttctaatgtctaaatcttcatatttaagagctgcagggtttctagagaaatcatccagcctggtctcctgcatctaggcaaggttaatatgaaactttccttgacagccatgtatagctctgtaagcaattttgtttttctttctgtttttgttttgttttgttttgttttgagacagtctcgctcttgttgcccagcctgaagtgcaatggcgcgatctctgttcaccgcaacctccacctcccaggttcaagcgattctcctgtctcagcctcctgagtagctgggattacagacatgtgtccccatgcctggctaattttgtatttttagtagagatggggtttctccatgttggtcaggctggtcttgaactcccgacctcaggtgatccgtccacctgggcctcccaaagtgctgggattacaggagtgagccactgtgcctgactagcaattttctttagagattttaaaatttccggcagggcgtggtggctcacgtctgcagtcctagcactttgggaggctgaggtgggcagatcacttgaggccaagagttcgagaccagcctggccaacatggcgaaaacttgtctctgctaaaaatacaaaaattagccaggcatggtggcgcatgcctataatcccagctactcgggagtctgaggcacgagagtggcttgaacacaggaggcagggggtgcagtgagctaagatcatgccactgcactccagcctgggcgatagagcgagactgtctcaaaaaaaaaaaaaaagataaatacataattaaattttctttgctagtgttttctttctgatatctaactgaatttctctcttgttcagcttatctttctttacttcttgtacagctggtccacacaataatattgcacacatagagatgcatttattcctcagttatcatttctctagaccaagggtgggtgcaaattatttttagagcctaaggattacacartttgggagggtaggggattcgctttaagaaaaagaaagcaaaataggctgggcacaatggctcatgcctgtaatctcagcactttgggaggctgaggcgggcgaatcacgaggtcaggagttcgaaaccagcctgaccaacatggtgaaaacccgtccctgctaaaaatacaaaaattagccaggtatggtggcacgggcctatagtcccactacttgggaggctgaggcaggagaatcgcttgaacccaggaggtagaggttgcagtgagctgagctcgtcccactgcactccagcctgggcgacagactgagactccatctcaaaaaaaaaaagaaagaaaggaaggaagaaaggaaggaaagaaggaaggaaggaaggaaagaaggaaggaaagaaggaaggaaggaaggaaggaaggaaggaaggaaggamggaacggaaggaaggaaggaaagaaaaaagaaagcaaaacaacgtgcagaacctttgaaggagcctgtgcatatgaagagccctgaagcttcattagccaccgggcaaatctagctctgctctgggctgttacttctgtttgtttttcggttcctcacagatcctagttcaaaagcttgaatcacatttatctttttcaggactctttcctgaaatgtattcttagaaattctgttattacttttagtgccaaaaaccacaattagtttgcaccaacctaatatttcactttacctcatactcaagcttactccaaacctaattctaatccgtaatgatctttgtccttcagataagagttaggggccatgaygactcctycctcaagaaccatctagtgtttctggtgatttatggcacaaatggaaccttcaaccagaccctggttactgataacaatggcctagctccctttaccttggagacatccggttggaatgggacagacgtttctctggaggtaagcatggacggaggaccagcttcctagaaaggaaggcttccctgaaggaaaacttcagaattttcctgtttcctatyctcccctctgcttggaattacatctttctcactcacaagtcctgctctcccgttgacaaaaagttttccttagatgctttctgtttttaatatcaatcaaataaatagtccttacttggatgaaaactactatttctactaatacatcttttaacttacccccatctctatctgatcctatctatatatgaagttagagcagggaggaataggtgactcagagtctttttctttctctttccccttcccatcccctcattacttaataaaaacagcaaacaagagaactctagattctagataacttataagtatcaattatcaactgccacaacaatgcttcttatcaaacagctacaaacttcagtatcgtgcagcagaaagcattcactgcttgtgcatctggggcattcagtcaggcagctctgctgatttcgatttccagaactgtctgcagatcggctggccataagctgctgctccgcatgcctctcatgcaggagccrgctagcccaggtatattcttatggcagtgatgaggtgcaagtgcaaaagctgatgttcagggcttttcyaaacctctgtatattgcatatgtttttttcttttttttttttttgagacagagtctcactctgtcacccaggctggagtgcagtggcgtgatctcggctcactgcaagctccgcctccccggttcacgccattctcctgcctcagcctccccgagtagctgggactacaggcgcctgccaccacgcccggctaattttttgtattttttagtagagatggggtttcactgtgttrgccaggatggtctcgayctcctgacctcgtgatccgcccgccttggcctcccaaagtgctgggattacaggcgtgagccaccgcgcccggcccctgttgcatatgttaacaccccwttcccaacaaatcgaacagtgggcacagactaggagggtactggaagaccacatgctcaaggatgctgatctyggagggggcrgggtgcgtgtgaggaattggagccattaatgagatcgttcaacctcaggacttaagcaaacacatactacttgccttgtggctaatttgactatttctttactctaggcatgactcagttactcagaaataattatttttcaatcttagtgtcttctgtgcctagttttcttatccctgaaatataatctttgatttctatataatctaagtcacgttcatctatcccaggaatatctgtgaagatacatcacccacaatttcctctcatttagtaactataattcagcccttctgtcgctstcctacataccaaaatattgctgtacacagctacgtttatggattctttatccatccttggctggaccgctaatgaaatacccacatgccattctcaggcagtgaagatttgagagaaagagctctatttgaaaaccgtaacaagtccgtggggtttccatggttggagcrcatgctaaaattctctctctctcttttattctcagggaaagtttcaaatggaagacttagtrtataatccggaacaagtgccacgttactaccaaaatgcctacctgcacctgcgacccttctacagcacaacccgcagcttccttggcatccaccggctaaacggccccttgaaatgtggccagccccaggaagtgctggtggattattacatcgacccggccgatgcaagccctgaccaagagatcagcttctcctactatgtgagaccrggaaacggggacgggtgagagtatgctgggaaggaaagagaatgagaagagtcagccagagggtgcacctaggctatctgaattgcagatgcacatctaattaaaaacaattttaaagccacactaaaaaagtaaaagaacagttgacattaattttaaatgtattttttatttaacccattatatccaaaatattaacattttaacacgaaagccatataaaaagttttaatagatattttacattcttgtttcaacggtgtctttgaaactcagtatgtattttacacttaaagcgtatctcagtttggactgagcacatttcaagtattcaatattcctttttttttctttttttttttttttgagacacagtctcgctcagttgcccaggctggagtgcagtggtgtgttcttggctcactgcaagctccacctcccaggttcacgccattctcctgtctcagcctcccaagtagctgggactacaggcgcccgccaccacgcccagctaattttttttgtatttttagtagagacggggtttcaccatgttaactaggatggtctcgatctcctgacctcgtgatccacctgcctcagtctcccagagtgctgggattacaggcatgagccaccgcgcccggcctcaagtattcaatattcctatgtggctatgagatactgcatggcccagtataggtgtaagagatggaaaacattgggggaagaaagagattctgagcaggaacacaggaaaattgtgtgggaaaataaaatgaggaattacctgagaaaatagtgctggccaggaccaaaaaaaacaaaaacaaaaacaaaaccagctgggtggttgggagggagagtggggagggatgggactcaggatactttttttttttttttaatttatatgagacagggtttcgccatgttggccaggctggtcttgaactcctgacctcaggtgatctgcccaccttggcctcccaaagtgctgggactgcaggcatgagccaccgagcccagccaggatacatttcattctgtgttccattggtcaatattatcaaatagatgatatggggttaaattcacatcgatagcagcctcattggggaaataaaatcataacttggtagcctgaaagcaatgtataaggataagcagctttcctgtcaccttggtgacagtcaggaagtagaatggaaacctcaggtttgatggctcggagcctctttgttccgttatcctcctgtcagtctatgagagactttctcccctctggatcattgcagtagcttccatggtttcagtgttgtcgttaagtgaaaaaaaaaaaatcatcctaatacaacgaaaagagaaaagataggtggaaaataacaagtccagtgataaagcgggctctgtcttcaggaccgaagtgtggggaggtgtaggacaaaagtgaagttagggccgagccacgtggaatggctaatgctgggcaggcgtccaaggaaccgaccttggagccctgcaggagcgtgggatgagagcctgcttgcaaacaagatcaccgagttctgtttcaagtgagagtggacgggaagggggagttagaagaggagatttctcctctagagggttcaatgtcagaagggctcagggtggtttaggatgaaattatttccactgaattttaaattgagctgtaattaaaaaacacttatgaggatagattttcgctgactttctgttacaaagattataagaaaataaaatttggagatcttcaagaaatggcagacagttatctatggtgaggaacaatttctatgctgtcagactcctcccatccacctgcgtggttctcagccagacctccaactgcaggaggagccaccaggacccgttggcagcatcctgcatttgtcaagctagtggatgctgggtgaggtattgacccggactctgaactgtgaaaggaacctctcctcatgaagggatgcagagatgctctggaagttggtccaaggtgaaattactgtaacttctgtgcagttgattcttttcttttcttctttagttaatagggaaaggaagtttggtgatggaggggcagaaacacctgaactctaagaagaaaggtgagtgtacatgcttttcccggaagcaaacaggatatttttaaattccagaaaacaattcttggccaggcgcggtggctcatgcctgtaatcccagcactttgggaggccgaggtgggcggatcacgatgtcgggagatcgagaccatcttggctaacatggtgaaaccccgtctctactaaaaatacaaaaaaaaattagccggacgtcggggcgggcccctgtagtcccagctactcgggaggctgaggcaggagaatggcgtgaacccgggaggcggagcttgcagtgagccgagatcatgccactgcgctccagcctgggcgacagagcgagactccgtctcaaaaaaaaaaaaaaataaataaaataaaataaaataaaataaaataaaaaaattcttatccacagaagtaatggaattggagcactaacagttatcacaggagaagagaaaaatgagaagtaacttgcaccatggtgcctgcactggctcagtgaaaagtacatatggttagatgccgttggcaggtgaatgtgcattctgattttcctgtatattccctcttctctttcaggactgaaagcctccttctctctctcactgaccttcacttcgagactggcccctgatccttccctggtgatctatgccatttttcccagtggaggtgttgtagctgacaaaattcagttctcagtcgagatgtgctttgacaatcaggtaaaatgatagcggagaagggtgaagataaaagttgggcatagagaaagatcttgtgtgtgctgcggttggaaacaagacaagtcagggaaagaagatagtgttgacgttggatgttgtattatatttatatctttagtgtttggggtttgtgttgaaatccatctctctcctactttttattttaagaagtcatgctggctgaggtgcagtggctcactcctgtaatcccagtgctttgggaggccaaggcagagggatttctttaggtcaagggttcaagaccagcctggacaacatagcaagatcctgtctgtacaaaaaaatttttaattagctgggtgtgcagcactttgggaggccgaggtgggtggatcacctgatgccaggagttcaagaccagcctggtgaaaccgtgtctctactaaaaatacaaaaattagccaagcatggtggtggatgcctgcaatcccagctacttgggaggctgaggcaggagaattgcatgaacccaggagacggaggttgcagtgagcaaagaacacaccattacactccagcctgagtgacagagtgagactctgtctcaaaaaaaaaaaaaaaaattagttgagtgtggtgatgcatacctgtagtcccagctagtcggaaggctgaagcaggtgtatcgcttgagccccaggagttcaacggctgcagagcgagaccctgtctattttttttatttttaaaaaacagagttttctttttgttgccaaggttgaagcgcaatgggggaatttcggttaattgcagcctttgctttttgggttaaagggatttttttgcttaaaactcccgagtagctgggtttacaagtttgccccaccatgccgggtttttttttttttttttttttgggtttttaaaaagggggggggcttccccatgaaaccccggggggcttggaccctcgtcacagggataccccccggtttggcccccaaaggggggggaatacacgggaagcccctttttttttaaaaaaaaaaaaaaaaaaacccctttggggggaccccctgtttttatatttttttcccacggggtctccttttttttggttttaaaaattttttttttttttttgggggggggcggggttccccactttttttgggggaacccccctttggggagggggtgttttttaaaaaaagaatgttcccacggannnnnnnnnnnnnnnnnnnntacttggtgtaatccatcaccccccaaacccctatggggagtccagtcacttcataggattaaatcccttgcaattccaaagtttgattttcatatgtaggaggtatctcatgtgcctggccagaatattgtaaaacttaagtgtcataaaagggcaaacatttatctaacaggtttctatgggtcattaatctgggtgcagcttagctgggtgcctctggctcaaggtatctcatgaggttgcaatcaagctgtcagtcaggactctggtgtcatttgaagactcgactaggagaggattgatttttcaagctcatcccaaagtctctgatccttacaggctgctagactgaaggacacagttcttgacctcagcttttggctaggggcctcactcagtatctcatcacatgaatctctctggtggggtgcctcatcacacaacagctgtttttcccagagcaagcagtttgagaaaaggggtgcrcccaagatggaagctgcagtcttttagtagctgggattacaagtatgcccccccatgcctggcttttttttttttttttttttttgtatttttagtagagacggggtttcaccatgttaggccaggctggtcttgaactcctgacctcaggtcatccacctgccttggcctcccaatgtgctgggattacaggcatgaccctgtctctattaaaaaaaaaaaaaaaaaaaagccatactgggaagccacatgttctatatagttattccacatgttctctctactttttgtcttctaaactttctctatccttctactgtgctgctcacgtttcccaactctatcacggcatacacgtcctgaagagctagactttacaaagaaagataagtacaaaagtgaaagaatgggttggatgtcatagctggggcatatttgctgatgacccaaattatgttgtttcccttcctttccaggctgacctgatccccaagttatacctttcccttccccaggtktcccttggcttctccccctcccagcagcttccaggagcagaagtggagctgcagctgcaggcagctcccggatccctgtgtgcgctccgggcggtggatgagagtgtcttactgcttaggccagacagagagctgagcaaccgctctgtgagtaactgtctgctgacagagtgggaggagggagttgatggagaagacaattaagaggtaggtttcaggcaggggagagaaagtcttagggaaataatgcactgccataaggcggtaaaaaggctggtgtgaaaatgaagttagaaagtgtaagagggctgggcacggtggctcacgcctgtaatcccagtgctttgtgaggccgaggctggcagatcacctgaggtcgggagttcgagaccagcctgaccaacatggagaaactctgtctctactaaaaatccagaaaaaaaaaaaaaaaattaactgggcatgggcccatgcctgtaatcctggggaggctgaggcaggagaatcacttgaacctgggaggcggaggttgtatcattgccctccagcctgggcaacaagagcaaaactctgtctcaaaaacaaaaaaaaaaaaacaaaaacaaaaaaagaaaggataagagaaaggcatggttagtatgaatgcagagacaagaaaagagaatgagcctgtaatcccagaactttaggagaccaaggcaggcagatcacctgaggtctggggttcaagaccagcctgaccaacatggtgaaaccctgtctctactaaaaatacaaaaattagccaggcatggtggcgcatgcctgtaatcccaactactcaggaggctgaggcaggagaattgcgtgaacccgggaggcagaggttgcagtgagccgagatcgtcccactgcacttcaatctgggcgacagagcaagactccgtctcaaaaaaaaaacaagaaagagaacgaaataggggataggattatgaaaaaataggtgagatagaggttaaagttttagacagtgagaaaggtaattatgacagaatgaatataaaaataattctgaagtaataaagagaaatgatacaggagtagtgaactgagcaccagaatctgagagaagtttctcaactgatatcactatatcaatgctttatttcctctccccctcttgtcccaggtctatgggatgtttccattctggtatggtcactacccctatcaagtggctgagtatgatcagtgtccagtgtctggcccatgggactttcctcagcccctcattgacccaatgccccaagggcattcgagccagcgttccattatctggaggccctcgttctctgaaggcacggaccttttcagctttttccgggtaggtcttcttacccattttgttcttatgggaaagatggtggtgggaatgggcaaaggaaagttcatatctaagaaagcagagagactcatatgggcactgatgggaacaaaatcttgaaagaagcttctgacgtgtaaggtcgcctctgttggcccttatgcttgaagaagatgtccaacctagtcttcctctttttgttgtcctcaaacactgatttccatgagatcaatcaggagggaaaattagagaaggtagaccagaggtctcttatcattattataaaaaataatttgcacctattctatgagcaggatttgggatgctgtgtgacccaagtctgaccaggaggtccctgaggtcaggaactaggtcttgttcatctttgtattctctctaatgcctgacccttcataaggctcattgtatttttgttgaattgagtacgctgatatggtccctaccctcagcatgtttacagcgtaagtcaaatagtaaggacatagcgaataatatttggcagaaccattacatgtatgtaatgatgaaataagtttaactgaaagcctttcatgctagctggaacagaagccaaccagcctcagtggctgagtttcaggtaagaacacccaggttcaccattaattcaaaaagaatgttttgtttcaactctttgatggtggaattcctgggcagtagcccttgtagttggggaagggaccaccttaatacttatttctctgatgcctatcaggacgtgggcctgaaaatactgtccaatgccaaaatcaagaagccagtagattgcagtcacagatctccagaatacagcactgctatgggtggtaagccacctctgtggtctgtggattctctgagatgttaacagtcctggaactctgcagatttcctcttgcctcctgttcttgcactgagcctctagcccgagaatgctaatgggttgtgggtcacagatgcaggacagtttcccaagtgttctctctctggggagagcttttgaagcctgaagcttatgtatccattccccggccaaacctccttggctatcacttccctcgatggcctttgtgactagttagttcctctttggtccttcctccttgcctctgactggatgttctctgcttccctctaaatttctttctagtaatccctccatcccaatttatgtcacaacaagaagtctcctgtttcctaaagttttcgtattctcaatttcatcagcaggcggtggtcatccagaggcttttgagtcatcaactcctttacatcaagcagaggattctcaggtccgccagtacttcccagagacctggctctgggatctgtttcctattgggtaagtgatgactcaaaagtacagtaaagggccaggtgcatggctcacgcctgtaatcccarcactttgggaggcttaggagggaggatcacttgagaccaggagttcaagaccagcctgggcaacataatgagcttctgtctctacaaaagaaatwaaaaaaatagccagatggtagttgtgtcctacttggaaggcygaggtggaaggatcacttgagtctgggaggtggaggctgcagtgaagcaagatcacattgcttcactcctgcttgggtgacagagcaaaacccttctcaaaatcaacaacgacaacgacaacaacaaacccagaaaaaaaacagtaagattctgcaatgtagagcctgtagaaaactcagaatcagacgcattcctaatggatctaaatcttaagcaaagaaagcttgatggggtgtgggaatttatttattttccggaattctttttttctttttatttttaagacagagtcttgctctgtcacccaggctggagtgcagtggcatgattttggctcactgtaggcctcaacctcctaggttcaagcaattcttgtgcctcagcctcccaagtagctgggactataggcacatgccaccacacctggctaagttttgtatttttagtagaggcagggttttgctatgttggccaggctagtcttgaactcctggcctcaagtgatccacccgccttggcctcccaaagtgttgggattacaggtgtgagccactgcgcccggcctacctgaattcttcatgcattcatatacaaccactcaaaacaaatccacacaattccacactcacacattgcaggccctgtgttctcactacagaaccacacacatttaaaggtatatattgacatcaatttttgctcactgcttgcatatccattttgacaagccctgagaccacacatcctcagactcagagggcaccagcctctctgtcagatgtgcttgcacagagatgcccaccccgactccccaccatagtccccctcctccgtatgagtgcagcctcactcacactgagactcacctgttcagttgcctctttacttctccccatacaataacaataacaattttacttctgcagatgaatttgtagctttttttttttggacagggtcttgccctgtcacccaggctggagtgcagtggtgcaatcatagctcactgcagcctcaaactcctgggctcaagcaatcctcctgcctcagcctcctaagtagctgggactataggcatgcaccaccacacctggctaatttttaaatttttggtagaaatagggtcttgctatgtttcccaggctggcctcaaactgctgggctgaagctatctgctcacctcagcctctcaaagagctgggattacaagtgtaagccagcacaccccaccgaatttgtggcttaattcacaaatgttctccttgccccacgctacctctgcctcatgttggtccttgtgttttcacagtaactcggggaaggaggyggtccacgtcacagttcctgacgccatcaccgagtggaaggcgatgagtttctgcacttcccagtcaagaggcttcgggctttcacccactgttggactaactgctttcaagccrttctttgttgacctgactctcccttactcagtagtccgtggggaatcctttcgtcttactgccaccatcttcaattacctaaaggattgcatcagggtgagagctggggatacaggaatcaggtgtcagccctggaatcacacctcccccataastttgtctctaaattggaagcatcccaattttccctgggaaagagaggagatgtcggcgtctcagcccccaggtttccccaggcctctatgcactacctcctttgtttgtaccctttgtctcttaaacatcctccgtaggttcagactgacctggctaaatcgcatgagtaccagctagaatcatgggcagattctcagacctccagttgtctctgtgctgatgamgcaaaaacccaccactggaacatcacagctgtcaaattgggtaagagagggaagtggtagacgggcgaggaaagccagcagcagaagaccagtgactgagcactcagtcttttcctctgccacatctgctttgcttcctcctccattttccactatttttctccctcctaaggctgttataagtcaatacacaaacactctttgataggtgaccaaacaaatttgttcaaaccggaatattttgagtgtgaaagggagagcttttaatatttatagctggacaaggaatacatggtcatgtaactaatcaaggacttactataagagtccctgggccaggcactattctaactgctttacatatattaactcattaaattgattgactaattaatttttattttatttatttatttttgagaggaagtctcgctctgttgcgcaggctggagtgcagtggtgcaatctgtgcttactgcaacctccacctcctgggttcaagtgattctcctgccaagcctcccaagtagctaggattacagtcgcgtgccaccctacccggctaatttttgtacttttagtagaggtggggttttgccatgttggccaggctggtctcaaactcctgacctcaggtgacctgcctgcctcggcctcccaaagtgctgggattacaggcgtgagccgctgcgcctggccttttatttttttttagagagacaagatcttactctgtcacctaagctggagtacagtggtgtggtcattgctcactgcagcctcaacctcccaggctcaagcgatcctctcacctaggcctccggagtagctgggactataggctcatgccaccaccatgcctggctaattcagttggcagagaagcggtcttgctctgttgcccaggctgttctcaaactcctgggttcaagtgattctcccgcctcacccttccaaagtactgggattacaagaatgagtcacygcacctttaacttgtttaatcctcacccccaaccctatgggatgtcagtcactcatagattaaatccttgcaactcaaagtttgattttcatatgtatgagttatctcatgttgcttgacaaattattgtaaaacttaagtgtcataaaaggacaaacattatcaaacagattctatgggtcattaatctgggtgcagcttagctgggtacctctggctcaaggtatctcatgaggttgcaatcaagctgtcagtcaggactctggtttcatctgaagactcgactaggagaggattgatttttcaagctcatcccaaagtctctgatccttacaggctgctagactgaaggacacagttcttgacctcagcttttggctaggggcctcactcagtatctcatcacatgaatctctctgctgggctgcctcatcacacaacagctgtcttccccagagcaagcagtttgagaaaaggggtgcrcccaagatggaagctgcagtcttttttgtaacctaatcccagaagagtcattactttcaccctgttctctttaacagaagcgagtcactcaatccagctcacactcaatggatgtaaatatcaggatgcagggatctctgagggcccttagaggttacctaccacactggactagcctctctggcatcacctgggagcttgttagaaatgcagaatatgggccccaccccaggtctatggcagcagagtttgcactgttgcaagatccccattaaagtttcagaaatgctgatccaaatgggaatggacctcactggtacctctggcaatagggctaatggcttcccttcttctttctctcaggtcacattaactttactattagtacaaagattctggacagcaatgaaccatgtgggggccagaaggggtttgttccccaaaagggccgaagtgacacgctcatcaagccagttctcgtcaaagtgagttttcttcagaggtagagacagcaaccaaccgagggatgctcagcatctcgtcttgctgtgagttagtctctcacagcaaccatactccagtccaaccaggcagcttcaactttctccttccctggccccttgaacatttgcctaatccacacccacggcctatgaaagcacctaaaaccsggcacctcataggcactcaacaaatgttagtttacctaattaaaatgtctgtcttcatcaatagctgcctttttcgtcccatcatgaagcccattgtcaatcttgcctcttagaagttgcctaaatgtgkctttggctctagcacttgcccagaaagaactttacagaaagggcccatccttgggttgacgcagagttckkytgassywsagtgagaagctcttgtctgcagttctgagggaagccctgggggcacagcgaggggcctcccttccctttcctttagtgccatccctcctgatgttcatctttgttgtttttatctgtgtctctcttcatcgcagcctgagggagtcctggtggagaagacacacagctcattgctgtgcccaaaaggtgggtggactcagagcaggattggtggtgagaattcccttagagggcaggagattttcttttcattttttttttttttttgagacggagtctcgctccgtcgtccaggctggattgcagtggcacgatttcagctcattgcaacctctgcctcccgggttcaagtgattctactgccttagtctcctgagtagctgggactacaggtacatgccaccatgcctggctaatttttgtatttttagtagagatggggtttcaccatattggccaggctggtctcgaactcctgaccttgtgatcctcctgccttggcctcccaaagtgctgggattacaggcgtgagcyactgcacccggcagcaggagattttcataggcaaaaggaggaatgcatagtaccagaaggaataggagagtctgaagtgccattcctcatggggctgattaactgggaggcaggaggaagaagagaaagtgtgcagcacgatgatgactctctgtggaatttattttcagcaagatcactatgaatagtacccagtgctttctgcatcccagagaaagcaccgagtacagaaatccctggattatagaaagttcttctaaaattttgtcttgagaacccctgccattccccatcttctattgtgtcacctttttttctgcatctsacaggaaaggtggcatctgaatctgtctccctggagctcccagtggacattgttcctgactcgaccaaggcttatgttacggttctgggtaagcagttagagattcttgactcagaaaggaaaaggckaatggaggctgcaaaggtgtggagtggggcgggacatacggacctatccggagagtgtaactaataacaagtgatgaaggaaaaagagcstattttatataggagggaaatacagtgtaggcaacagtacagatgggattagacttgtactctagttaaaaatggaagagagtcagggtaggaagaaggtaaggtcgctgatgcttgattttaggtttagacagtctataaattgggtgaagggaaaacagaatatttgcagcaaccattttcaaaactgaggaatttgggtatagtttagggaagatacaaccatatttacaataggcagcacacttactgtttggggcaagggaggaagtgggttgaaaagcatgaacktagaaatcatatctaacctgtcatttaatagccatgtgaccctgaacaagttagtgaacagttctgggccttctttcctcttctgtaaaacagtgataataacctacctctcagactggtgtaaagattaaatgcaatataaagtccccagcacaatatctagcatgtagtaggagccctatgaatgttaggctctttctttactccctcaccctctattgagatcctttgcagtcacagtgtctctgttttgtctattttattcgtaagtctgacatagcacttatcttattgtattagagttcactgtctatatctgtcttccacactgtgttgggggctcctgaagaggaagggccacatctttttcttttgtgttcctagtacagttcctgcaacatagttgacattcaggacacatttatagattgaattgagcttgttggctacaatgcagatgttaatgagtcacttatgtcaggttcactggcttgggaagtatatgaaggggtcagtgacaacttggaaaagagtgtcagaactgtgttttagagaaacttggtgatttggagggtgaggaacgtacatgcagtggtagaggagcttaagagattgatcctaagtgttataagttttgtcacatcactcatcagctcagtgacatgtcttcttaaaagccctgaactctcttagatagcttatgtgcctctccgtgtcccctagcacctcgtacatatccagtatgacattgtagtactgtattaaaattgtttataatgaataaaaattgtaatgtgttgtaatggtttgctcctctgtgagtttttttgagggtagagaccgagtttgatttactgtggtcttcccaggacacacagtaggtactttttttttttttttttttgtatttttagtagagacagggtttgtccatgttggtcaggctggtctcgaactcctgacctcaggtgatccaccctcctcggcctcccatactgctggaattacaggcgtgagccaccacgcccggcccatagtaggtacttattaaatgatagctaatacgtgtttgttcagtgaatgatgataactcttagagggtcccttcttctctgtaccccyaccttctctctctccttttggatcccaggagacattatgggcacagcyctgcagaacctggatggtctggtgcagatgcccagtggctrtggcgagcagaacatggtcttgtttgctcccatcatctatgtcttgcagtacctggagaaggcagggctgctgacggaggagatcaggtctcgggcagtgggtttcctggaaataggtaagttggttcagtctttctttcttgaacactctcctccactaggccctatgacagattgatgatacagggaattccagcccctcaagtgtcccatatccttgaacggcatgggggtgttttctgaagttgtcgctgtgatctaaaaccacatttggcttcccagggtaccagaaggagctgatgtacaaacacagcaatggctcatacagtgcctttggggagcgagatggaaatggaaacacatggtaatatcacccaattcccaatgagttctgtactccagagcrtaattcctgagccctctggaactattccactacctctccccttaacccctttccttcttgcactcagtcttctacctctttaatactgtttatttcaccctcatggatggtcaagtccctcgatcttcctgagcttgtgcctcccctgttcttgtcctcattggtgcccattaatgcctctcttttctaggcctgctatggcatatgttccctcagctccccttctggaagtatacacccaaataaatgaagaaatgattgcaccctcacctggaaattcctcttcatgccatattttcctctttacccatgtaggctgacagcgtttgtcacaaaatgctttggccaagctcagaaattcatcttcattgatcccaagaacatccaggatgctctcaagtggatggcaggaaaccagctccccagtggctgctatgccaacgtrggaaatctccttcayacagctatgaaggtgcggatctgtccaggagcctgcagccaaccactgtctcgaaggaccccacacctctgaccgagtagaagcaaaagagcactggcctgggaatcagttttctcctgatctccactgtggctctgggtgaccgtgatcaaaatgcttagctggtctgggcctcagttttcatgtctgtagaatgagaatacagatgaagcctgggtgcagtggctcatgcctgtaatcccagcactttgggaggccgaggcgggcagatcgtttgggcccrggagtttgagaccaccctgggcaacatggtgaaaccccatctctacaaaaaaaatatgaaaaattaatcaggcttgttagtgcatgcctgtagtcccagctacttgggtggttgaggttggaggatcacttgaacccaggaggtcaagcctgcagtgagccgtgattgcaccactgcaccccaacctgggtgaccgagtgagaccctgcctcaaaaagaaaaagagaatgtggactggaacatggttctcaaagcatagttcccagatcaggagcattggcatcacatgggaacttgttggaaacgcagattctgactcccagcccacacctactgaatgagaaactctgggagggtgggccagaaatttgtgttttgacaagccctcctgattattctgatacacactgaaatttgatactactggactaaaagatctctgggcctcttactgtgtcaccaaatccatctgggaaagccatttcctgtggtgaggactagtaggcagcccaacgtcttttgtaagaagtttactctattggkcactattctaggcacgtggtttatttgatattatttcatgtttacaacaaatcaatgagctaggtattggtatgccattattaatcccattttacagatgaagaaactaagccatggagactaagtaaattgcccaaggtgcatgctaataagtggcaggactgagatttgaaccaggcagttgcactccagaggcactgctttcttctgttcactaccttgtctgtacctgtcccaagcagagggcgaggcgtagatcctgcaggataacttgttcaattcaggacacactcagtgcaagaaagacttgtataaacttttctagagagatcacttacattgctattccagggcaaggattaaaaatcttgagtgttaaaaaaaaaatctatttataggattcattagtcttcctctgcaggatcttattagtctcccctaagtttttgtcttcttcttctcttatacactgtatgaaatatgcgtgggggccaggcgcagtggctcatgcttgtaatcccagcattctgggaggctgaggcgagtggatcatgaggtcaggaattagagaccagtctgaaaccctgtctctactaagataaaggacttgactagagcaagatctcagaggtattcttccttctttcccttttttttcttttctttttttcttgagacaagagtcttactctgttgtacaggctggagtgtagttgcgcaatcccagctcactgcaacctctacctcctgggttcaagtgatctcagcctcctgagcagctgggactacaggcatgtgccaccatgcctggctactttttgtatttttagtagagatggggtttcaccatgtttggccaggctggtcttgaactcctggcctcaagtgatccacccgccttgacctcccaaagtgctgggattacaagcgtgacctatgcgtgcccagcctcttcctactttcttttgagagcaggccagtccattgagaaatccatcctctgtgtagmcaaggttagtggtgtggcacatgagctccagagttaaatgtcctgggttcaaattccagtcctgctgcagatgagccatgtaaccgtgagcaagctatttaatctttttatttatttacttattcatttttttgagacagggtctcactctgtcacccaggctgaagtgcagtggcacgatcatggctcactgcagccttgacctccccgggctcagatgatcctcctactttagcttcctgaatagctgggaccacggatccacgtgccacyacacctggctaatttttgcaggttttgtagagttggggttttaccgtgttgcccaggctggcctcaaactcctgagctcaagcgatcctccccaccgacttggcctcaagctgggataataggcataaaccactgtgcgtgaccacaagctatttaatcttgttaagtgtttgttttcttatttatagaatgaggataataatttgagtagatatttttaaaaatttgcttagctctttctgggaaaggcgataagcagggaaggtctcacctaatctctgctggagaagggctgggtattgtgctgcttgaggggagctgcatgtgaggaggctcagatgcggtgatgcggcagattctctccttattcctcccttctttaaagctcttacccttcctaactccttctcttgggtttcttaaatacccactcagctgaagtccacatgctgcctcctgcaggctgtttaaggctgtgcagttatgaagtccaaactgttccctctttgtgtgtcctggaggcttggagctgcaraaagcctgtggaaaaaagagctttcttttcttttttctttttaaaaattattcatctattcagaggggaggctgttttgcaatctgcacataattcttgcagctgctgcctgytgccctgactcactgcctccctgtttgcctctagggtggtgytgatgatgaggtctccttgactgcgtatgtcacagctgcattgctggagatgggaaaggatgtagatgtaagttctcctggctcctgctcttgataccctccttctcatgcgtattcctagagacattcacccatctttgtctctagtcacccttttaaggtcaagaaggataagatgatttcctgattacttgccatttttaaaggaatgccttataagttatagtcttcatcttcactttttaggacccaatggtgagtcagggtctayggtgtctcaagaattyggccacctccaygaccaacctctacacacaggccctgttggcttacattttctccctggctggggaaatggacatcagaaacattctccttaaacagttagatcaacaggctatcatctcaggtatgttggtcctgttgagagttctttgaaattgtgaacataagctgtgagttatctataatctccctagtaacctctgtcccacacatgtactctaggattcattttagtaacagttattaagtcatcaaattattgttgggaggtttgtgagaaacacacgcaagtgctcaaagggcatttttatacttttttttcttttctttttgagacggagtcttgctctgttgcccaggctggagtgcagtggcgtgatctcggctcactccaagttccgcctcccgggttcacgccattctcctgcctcagcctccccagtagctgggactacaggcgcccaccaccacgcccggcgaattttttgtatttttagtagagacggggtttcaccgtgttagccaggatggtctcgatctcctgacctcatgatccacccgcctcggcctcccaaagtgctggtattacaggcatgagccaccacgcccgagtttctctcttcttgcccaagctggagtgcaatggcgtgatctcagctcactgcaacctctgcctcccaggatcaagcaactctcctgcctcagcctcccgagtagatgggattacaggtgtgtgccatcatgcacagctaatttttgtatttttagtagagaaggggtttcgccctgttgaccagggtggtctcgaattcttgacctcaggtgatccacctgcctcggcctcccaaagtgctgggattacaggcgtgagccaccatgcctggccacatttttatacttttaatgtgaagagaaactacattgaagaagctagtcggaaaatatattggcattgtggaatcacccttttggagatctttgaaagtgctttgatgtaggaccactttaaatatttttaaaaatttttattttactttttatttttttgagacggtgtcttgctctgtcacccaggctggagtgcagtggtgcaatcttggctcactgcaacctttgcctcctgggttcaagtgattctcctgcctcagcctcccgagtagctgggattacaggtgcccgccaccacactggctaatctttgtatttttagtagagagggggtttcaccatgttggccaggctggtctcagaatcctgacctcaagtgatctgcccctcttggcctcccaaagtgctgaattacaagcgtgagccattgcacctggcctggaccactttaaatatatttagaatactatttgaagtatgacagatcttgtaaataaaatattaatgcatttcatttatctggctgtgtatttaaaattattcttccaggcagaagtgcagtctcagccttcatttatatgagcgtcatggctgagctgtcctctcacagggggtcaggtagttttttctcttgtgtctaagcaactccagtcatgaaatgttgtccgagacaatgggttaaatacacctgttccaccgtrtattggtttattgtgatgatctcttttccattatcttgtattgcaagctcacatgtttcctgttacgttcttccaattagattgcccttctgtggttacttattatctctaaaattctgtttaattagtcttctaacktacagtcttctcatttcttatttatttttcttcaagttatccattatctgtcatcttggctgtcacagaggtttcttttggtctcattctattggactgccttctaagcatgtttcatatagttrrcctcattagcatttcttcatggtttctcagaattctttcatatactctgccatttttattctacttaaaatgttaaatctttttttttttttgagactgggtttcgctcttgttttgttgcccaggttggagtgcattggygtgatctcagttcaccgcaacctccacctcccgggttcaaatgattctcctgcctcagcctcccaagtagctgggattagaggcacgcgccaccacgcctggctaattttgtatttttagtagagttagggtttctccatgttggtcaggctggtctcaaactcccgacctcaggtgatccacccgcctcggcctcccaaagtgctggattacaggtgtgagccaccgcacccggcctaaatctttgattaaatgaaataaatgctgaaaaattcataaaactgtaagcaaacaaaaattgcccccaaacacagagattcttataagaagcttctatttacctatttccattagcatcaaaactgataaattaacaagggtggttttcatgtaattgctggaggcaggaacatttatcgatgcttctagctttacacacaggcacgcacatgcatccttgcatttacatcaaggtcaattaatcagctaaatctaagaaattttttttctactctgtttaattctcagttggtacttactctgctctaagatgctgcatttacaaagtgaatgtgggaaagccagttccttctaaggacatcctagttatgtttctttttccataggagaatccatttactggagccagaaacctactccatcatcgaacgccagcccttggtctgagcctgcggctgtagatgtggaactcacagcatatgcattgttggcccagcttaccaagcccagcctgactcaaaaggagatagcgaaggccactagcatagtggcttggttggccaagcaacgcaatgcatatgggggcttctcttctactcaggtaaacagcctgttctcccactgccacttatcaggtagaattagatcttgtgtggagatagaggaaaacatattgtccttgccttctcggtccaggggcttagagagaggaaaagcctgtgaacaatatatggaagtattcataaaatgggttataagagcacattaatagtaccagatgtatttaattttctttttttgttgttgaatgtgaaacattggggccgggcatggtggctcatgcctgtaataccagtgctttgggaggccgaggcaggcggatcacctgaggtcgggagttcgagaccagcctgaccaacatggagaaaccccatctctactaaaaatacaaaattagccaggcgtggtggcgggtgcctgtaatcccagctacctgggaggctgaggcaggagaatcgcttgaacccgggaggcagaggttgcggtgagccgagatggcgccattgcactccagcctgggcaacaagagttaaaactccgtctcaacaacaacaacacaacaacaacaacaaaaattttaactttgtttcagaaagattaatcagccacttggtgtgtgagataatttagagaggagaaacattggacttgaagagatcaggagactgtttcctttatctaggttaggggtaaggggaaattgggaaattgaatgagtggtgtggcagtatggaaaaaacagaggggtagaattgtatgataaactcaaatcataaaaaattattttagattataatgaagagagtagtcattaatctatgtattctgaaaatattaaatatctaccatgtccaaatcactttgatgaggctacagaaataactaagaaaatgtatttcttgttctcatgaagattatattctgatttgttgaaattagccaatttcactgaagatataacatgtaaatcagacctgaaagaatgaacatcttttaataggttgcatgtttggtaaaaatgttaaaagcaccaagtttaggccaggtgtggtggctcacgcctgtaatcccagcactttgggaggccgaggcaggtggatcacgaggtcaggagatcgagaccacggtgaaaccccatctctactaaaaatacaaaaaattagccgggcacagtggtgggygcctgtagtcccagctactcgggaggctgaggcaggagaatggcgtgaacccaggaggcggagcttgcagtgagccaagatcgcgccactgcactccagcctgggagacagagcaagactccatctcaaaaaaaaaaaaaaaaaaaaaaaaaaagcaccaagtttaaatatggtaatgacttaattgaaacttaaaaaaattatatggtactatgcctccctgtttcagggaaattcttggccaaagatcacaaaatactccttcttgctcggtcctgaataattataatatataataatatttttggaaagcagtgggtgaaatgtttacaactctcagtgacaggtatatgtcagaatcctttttcaatgaaatccttggctatcacaagaagtcatatatcatatattacccacactggtttttcagctgacagtgaggtccctttctttgaattgtctccatatgttcaagcagtaaaaaacctccctggctccagtccacaaaaggtaaacaaaaattgtttgtagatggtgaagctgcacagatagaacttcttcacagcttcaccagggtgggtgacctgtcttcctgttttgtaggacagtgataatgtcgaaataagaatgtatttttcatttgtgagatgaagaaatcgggtttttttttgtaatagatattttttataatagatattttacacgagtgagatataacaattttgttgaacacttcattcatttttctttccccttgtaatttatatgaattatgttttcagaatgaaacagttcaaatatcactgtaccatgctcacttagtgacagtttatctgtcttattcccagagaaataaaagattgtcacatggtataatggctaagaagccagcctgcagggaaggactttcctagggtcccttatactccttccaactgtcatgtagaagatcattacacagttaaatgacttcatagactgcaatttctagggctatcaagttactactgtttctcccccaaataaggaagctgtaaaatatatactgaacaattatccacttgcttctagcaataactcattctgaaactgttggtttctgaacatgaattgattaggttaaccaagtaatctgtggatgttcagtagtaccttgttgatggtgattttctataaaagcatgctactggctgggtrtggtggctcatgcctgtcatcccagcattttgggaggccaaggcagccggaccacctgaggttgggagttcaagactagcctgaccaacatggagaaaccccttctctactaaaaatacaaaattagccggatgtggtggcacacgcctgtaatcccagctacttgggaggcttagggaggagaatcacttgaacccaggaagcggaggttgcaatgagctgagatcgtgccattgcactccagcctgggcaacaaaagcaaaactccatctgaaaaaaaaaaaaagcaagctactgtgatttctaggccagcttctccagaggaggtgggtatagttctctaaatacttaaagaagtcatcatccaagccaactaacaacaaccagatgtgtgggttatagagttgttcaaggttaattccaatggctcacaaaatggtaagtatacgtttggttgtttccctcaggatactgtagttgctctccaagctcttgccaaatatgccactaccgcctacrtgccatctgaggagatcaacctggttgtaaaatccactgagaatttccagcgcacattcaacatacagtcagtyaacagattggtatttcagcaggataccctgcccaatrtccctggaatgtacacgttggaggcctcaggccagggctgtgtctatgtgcaggtaagtagagatccatgagaatgagcrgacattgggaaggagagtcggagagcatcttccccttaggccttctctctctctttctttctcacttgtaagaaaagtagtttgaactgtacaatctttaaagttctttccaastytgatttggctacctatttcttcctaccagacggtgttgagatacaatattctccctcccacaaatatgaagacctttagtcttagtgtggaaataggaaaagctagatgtgagcarccgacttcacctcgatccttgactctcactattcacaccaggtgattaaagctggggtgctggtggccggcagagcacctggtcataggagctgagctgggacacttgygtgtgtgtgtgkctgtgtatgtgtgtgtgtacgtgtgtgtgtgtgtgtgtgtgttggggatgcagagtgcactgaagtaataggctcacatgtgttttcttcttcctgctctcagttatgtggggagccgtagctcttccaatrtggctattgtggaagtgaagatgctatctgggttcagtcccatggagggcaccaatcagttagtaagttacttctgttttcttcatttatctagytgtgaggggacctaacgttataatttaaaaaactggtaaaatgggcatcatggcgtgtatacacacacacacacaaggcatgtatatacatacatatatatgtatgtatatgtatgtacacttgtaagaaaagtagttttcatatatatatatggcatccatatacacagtatgtgattatatatatgtgtgtgtatacatatgtaggtatatatacatgtatatatgtgcatgtatgtacatatatgtgtgcatatatgtatatattmatacacacaaactcatgattggattatttaaatgggctgcaaggttgtagcagatatatgacatgcaacttgtaatagtcttggttcccttttcctaccttttccacagtatatattgtttccttgatcatggcagagctttggaagactaccccagggaaggctctggctcttagtatcttttttttctccctctcttattcagcttctccagcaacccctggtgaagaaggttgaatttggaactgacacacttaacatttacttggatgaggtaggtattcaggaaccagatcaaagagctggattgcttacggatcttcatgacttcccttctaatctgtatatacgggtgtcacacacatggggatgaggggcctgggagtgagtccacaccatgccatgagttctgcctccatgctggtataccgtaaaacaccccattgtgcctctagaggagccctgtccaacagacctataatgtgagccgtttacgacatttgaagatttctggtagacatttaaaaagtatagaaacagatgaaattaagtttaacggtatattttatgcaagcttatacaccccaaatatttccattttaccatacaattaatatacagacgtattaatgagatatctacattctttttttttttctgtaccacatctttgaaatccagtatgtactttacactgtcagtgcatctcaattctgactgacctcatttcaagtgctcaatagccacaagtgacattgcaactctagagtatgttatagtggttaatagcagaagctctgaagccagactgcctgggctgtgatcttggttctagcattgactgagtaactggacaagctgttgaaagttagctgtaaaatgtgtgtgggtaggggtcaaaatagttcttttagagttatagaaaaaactaaattatttaagacatgtaaaaatatttagaactgtacctggtatagagtaagccctcatcactttatagctattcctatcattttaacataatgttaatattacttaatattaatcagacattgtatgtaacctttcattttaacaaaacaagaagttctcaaggactaacaatgttctaaagattgttacaatgttccttttcatgatattccattccacacaaggaacaaagttatccttattgaatataaccaaaagacaagaatatcccaaatcaaaacatactgttgttagtaacatccatttccaaccccctgcccacccaccaaccccatcatctaactgtgtttcctgtcttccagggagccagggttttttatgttgtgtgagccgtgtatagtttcttttttyttttttttttgagacgcagtctcgctctgtcacccaggctggagtgcagtggcacaatctcagctcactgtaagctctgcctcccgggttcatgccattctcctgcctcagcctcccgagtagctgggaccacatgcgcccgccaccatgcccggctaattttttgtatttttactagagacagggtttcaccgtgttagccaggatggtctcgatctcctgacctcgtgatccacccacctcggcctcccaaagtgttaggattacaggcgtaagccaccgcacccagccgagttgtgtatagtttcttttgagacagctcgggttagcttatctggcactaccctgtaatcatgatgttgctgtttaaaactttgccaagtttatgatgctttcatacatgacttattcaagtcttacagccaccctccttagacataaggagacagagttggagagagagagtgggttgtccaagtcataccatctgtcagtgtctagggtgggagcagaacctggggagtctgatttccatgacaccatgcctgagactgcaatgaactgctcctcagtgtgtcctgccaaatctgccagttggcttctaatttgagttaacaggcctaatgatctaaaagccagtgctaatcattgtatctgtggttatttcctcttttctgtgtgtcttctcccttgtgttcttgatcaatttcaccagaggatgaccttattcacatatatagtcttccttattttttgatgaacttacactataagcgtccctctaggtacatgccatccctctcccacaatctcagacaagmaatgtttttactgtcattcagttctaactatttcttaatttgttgggaaacacatggaatttttaaagccatccttttgttcctgatgtctaattttgttgcattatggtctgagaatacagtcttcatgatcctgattgcctggaatgtgctgaagtttcttccatgacctaatccatgatctgtttttgcaggtgttcagtgtgcactccaaaagaacatctatttcttttctcttgggcttggattctgatctagaagtctgagatcattatttctgttgttcatgtgtttgataactctgcttatttttctgcttgatttaacaatttctgaaaagcatgtgttaaaatatccaattatgatggtttttgtttgtttgtttagtatttttttggtagagacagcgtttcaccatgttggccaggctggtcttgaacttctgacctcaagtgatctgcctgcctaggcctcccaaagtgctggagttataggtgtgagccaccacgcctggcctctaattatgatatttgatttatccatttatccatacatttctgccaattgtttcctgatatatttgagactacataattagatatatatgttatgaacatatcttcttattaaattttccttatattagtacatactatcctttccccattactatatatgtgtatatatttatatcatttacttttgccttagattcttacactcccccaccgccacacacacacacacaatttttttcccttgccttgggtgccatttagtcagatattaaaactgctacctggccgggcgcagtggctcatgcctgtaatcccagcactttgggaggctgagacgggcagatcatgaggtcaggagatcaagaccatcctggctaacacagtgaaaccccgtctgtactaaaggtacaaaaagttagctgggcgtggtggcaggagcctgtagtcccagctactcaggtggctgaggcacaagaatggcgtgaacctgggaggcagagcttgcagtgagccgagattgcgccactgcactccagcctgggcaacggtgcaagactccatctcrgaaaaaagaaaaaaaaaaaaaaactgctaccccagctttcttttggttcatattagtcatttgctttaattcattatggtgaccaaatgatagaaaagaacagtggttctaaaaattctttgtttcagtgtccctttatactcttaatttactgaggacctcaaacagctttcggtgaagtgggttttaactattggtctttatcatattagaaattaaaactgagacaatcttaaaatatttattaattaatttaaaaatgataataaactcactacatcttaatataaataaaatttttgtgaaaataactattttctggccaggcgtggtggctcatgcctgtaatcccagcactttgggaggccgaggcgggtggatcacgagatcaggagttcgagatcaacctggccaatatggtgaaaccccatccatctctactgaaaacacaaaaattagctgggcatggttgtgcgtgccggtagtcccagctacttgagaggctgaggcagaagaatcgcctgaacctggcaggcagaggttgcggtgagccgagatcatgccactatactctagcctgggcaacagagtgagactccatctcaaaaaaaaaaaaaaagaaaaagaaaaagaaaataactattttccaaaacaaaaaaataagaatggtgacattgttttgcatttttgctttaatatctggcttaatcaaagagaatgaaattttcctatttactcctacattcaaaccgttgcaatattacacataaagtagcctctgataactctcctgtatacttgttttgttttttatttttttaaatcactttccccagaaggaaacaatctcctgtatatttgtaagagaatgagagtggaaaaaaaaagtcttaatatcattctaaaaataattctgacctctcagatattctgatgcaatctcggggatccctggagtaggggaggtccctcgaccacactttgagaagcactatacctgaagaactttggaaatcccttccaattaggcgttaatagcgctatatctaaatttataatacgatttttttttttttttgagacagggtctcactctgttgcccaggctggacttcagtggcccgatcttggctcactataatctccacctcctgggttcaaatgatccttccacctcagcttcccaagtagctaggatttatttttttatattaaagtaacttatacaattgccttagattctccatttgctaatttattcaacaaatatttactgaacaaccaacatatgccagtcacttttctaagtgatggagacgtagcaatgaaaacaatagatatgatacctggcctaagagtgctgatattctagtggagagacaacaatattcaggtttttaaaaattacatgtatatgtgtatacacacacattttttttcagtagtaataagtgctatgcagcataaggggataaagagtgctggtggggcaggccagggatgtgactctttttaaataaggtgttcaaggaaagcctctttgaggaggtatcatttgctcagggaccagattgaagaaagcaaaccagtaaggggcatagaactgttggagtaaaatgcaagcctctgtttctctggccactttgactaatttagtggagaagccatgggtcagggtggaccatgaacaaagggaaccagttcacaagagggccagagagctgtaagatcctaagaagaaagagccaggaagtcagcaggaggcaatgtctttaagactcatagggcagtagcggtacatagagggtttcagagaatctttttttaattaaaaaaaaaatttttttttaatttgagatggagtctcgctctgtcgcccaggctggagtgcagtggcgccatctcggctcactgcaacatctgcctcccaggttcaagcgattcttctgcctcagcctcctgagtagctgggattacaggtgccagccaccatgcccgactaatttttgtatttttagtagagatggggtttcaccatgttggccaggctggtctggaactcctgacctctggtgattcacccacttcggcctcccaaagtgctgggattagaggcatgagccaccgtgcctggcggggcttcagaaaatctacatgaagacagcaagggtcttttattccacattgcatacagtgtaattttcattttacttctaaggtactgtttcatctgtcttccccacagctcattaagaacrctcagacttacaccttcaccatcagccaaagtgtgctggtcaccaacttgaaaccagcaaccatcaaggtctatgactactacctaccaggtgagagggctgagctgaaatgagakctgagatcttacctgcatctcccaacttacttctgcctcattcttcatggcttctctcttaattttacaaatactccttcccaagccaagtagcacataattaaattatctaatctcctaaaatattttaattcagttgtgtgccatttttaagttgcgtacactagagacattttatrtgatcggagaacaatgtgaaccattgttctcraagggctatttctattatttttggtatgattaatagtttgtcacaatgtacaaatattagtgattgaarctttcttgtaattctgaatatgctcataacctgtagagattctctggaaggggctcaagcagtagcttttctgaagcattttycctctgaatataggaggccctcaaagtaataatatgwcttatttcatttcacagatgaacaggcaacaattcagtattctgatccctgtgaatgaggtaagtccagcggagaaatgggtggagttatgggttagggtggcagaagttaagaggagcctcttttcgagttactgtcattgtctttttttgagatagagtctcgcggtgttgcccaggctggagggcagtggcggaggttgagtggctcacttcccagcttcaagcgattctcctgcctcagcctcctgagttgctgggattataggcgcccaccatgatgcctggctaatttttgtatttttagtagagacagagtttcaccatgttgaccaggctggtctcgaactcctgacttcaggtgatctgcccacctcggcctcccaaagtgctgagattacaagcatgagccaccacactcagccctgttattgtcttttggaagctattgttgatagaaagtgagctttccttttttgtcttaaactttttttttttttttaaacaggatctggctctgttgcccaggctgyagtgcagtggcgtgatctcagctcactgcagcctctgcctcccaagttcaagcgattcttgtgcctcagcctcctgagtagctgggatgacaggcacgtgccatcacgcccagctaattttttttgtatttttaatagagatggggtttcgccatgttggtcaggctggtctcaaactcctggcctcaggtgatccgcctacttcagcctcccaaagtgctgggattacaggtgtaagccactgtgcccggcctgtcctaaactcttgaaaatagtttacagaagaaaaagctaatgcttggtattaaaacaatacttttttctatcagattgaaaatggattgatttttcctgatatttttacatgatacatctttgttatatgaaaatactaagacaaaagtaaaggttacctgattctacacctgtgagataacactattaataatccaactgtgcatttgtgagatttttttgtatatatakagagaggtcaagtatcctctatgtatgtaatgagcttctgagtatcacagtgtcttctattttttgtttgattgttcgcttttcaggataggagctggaaactcaattagtcctctgtgacatttactggagggtggaacattcttctgtcgcttgaagcagaactcattcaatcaaataatttaatttctctgactagtatatgggtaacaaatgaatatgtctgaacctcagctataatactttctactacctttgcaaggagatgggataggaacaatcactcagaggaggcgttgcatggrcagggtcatagggggaagaaaggtggtttagctgttttatttagccattcagggggctctccagagaggagacggtggtagagggtgaactagagaagataagaatgtcttcctaggccggatgcggtggctcacgcctgtaatcccagcactttgggattgcgaggtgggcggatcacttgaggtcaggagttcaagaccagcctggccaacatggtaaaacccgtctctactaacaatacaaagattagcctggtgtggtggcacgggcctgtaatcgcagccccttggaaggccaaggcaggagaatcgcctcaacactggaggtggaggttgcagtgagctgagattgtgccactgcactccagcctgggcaatgaggcaagaccctgtctcaaaaaataataaataataataataataatgtttttctagagtttcagtctaagggaaaatgtgatttagggctttggaaattggctaaaaaaataaaaatggaaaagaaaatctgtgcatttagttctatgcatatttctttggaaaccaaaagttcttttaaagatgatgatcatcctttcccccaaaactcacaatttggtttcttccttaaaccttttaacccagacttctcaaagaatcatcttaaagatgtgaggacaggttagaatagagaattttaattatggggctctgctcaaccagcccgctactgcagggcaaacagtgatggattacaagaaaagtggctggccagaatgccgtttccatctctctcggtttctcttctgcatgattctcccaacctctccccacatgggctatctatcacctatcaccgtgcaagcacttcctcagaggaatgcttttgttttggaaacaggtttggaggcaaagggataagggaagtaagatgaatgatatttaacagaaaagattctctaggcaattacacccttttatcctgggtatccactggatccattatgctccccttgattgcaaattctgactgaaaagtcagggaaaataagtacattctacaaaaataaaaaatgacagatgggacctacttaaactaaagagcttctgcacagcaaaagaaactatcaacagagtaaacagacagcctaaagaataggagaaaatattaacaaactgcctccagcaaagaactaatatccagaatctataaggaacttaaacaaatcaacaagaaaaaaacaaataatcccattaaaacgtgggcaaggggcatgagcagacacttctcaaaagaagagtacaagtggccaataaacatatgaaaaaatgctaaccatcactaatcatcagagaaatgcaaaatcaaaaccacaatgagataccatccacactagttagaatggctattattaaagtcagaaaataagagatgttggcgaggtagcagagaaaagggaatgctaacacactgttggtgggaaggtaaattagttcagccactgtggaaagcagtttggagttttctcaaagaattaaaaatagaattaacattcaacccagcaatctcactactgggtatatacacaaaggaaatacatctttctaccaaaaggacacatgcacctgtatgtttttcgcagcactattcacaatagcaaagacatggaatcagcctagatgttcatcaatggtagagtggataaagaaaatgtggtccatgtataccatggaatgctatgtagccataaaaaagaatgcaatcggcccagtgcggtggctcatacctgtaaacccagcactttgggaggccgaggtgggtggatcacctgaggtcaggacttcaagaccaacctggccaacatggcaaaaccccatctctactaaaaatacaaaaacctagcagggtgtggtggcaggtgcctataatcccagctactggggaggctgaggcaggagaattgcttgaacctgggaggtggaggttgcaatgagccgagatcatgccatcgcacttcagcctgggcgacaagagcaaaactccgtatctaaataaataaataaataaatagaatgtaatcatgtcctttgcagcagcatggatgcagctggaggccattatcctaagtgaattaatgcagaaacagaaaaccaaatactgcatgttctaacttttaagtgggagctaaacctgttgtacacatagacacaaagatagaaacaataaacactggagattccaaaagggagaagggaggaaagagggcaagagttgaaacctacattcaggtactatgttcactatttgggtaacgggatcactaactcaaaccacagcatcacgcaatatacccatgtaacaaaacctgcatatttaccccctgaatctaaacctgcatatgtatctcctgaatttaaaattgaaaaggccaggcatggtggctcactcctgtaatcccagcactttggtagtccaaggtgggtggatcgcttgagctctgagttcgagatcaacctaggcaacatggcaaaactccatctctaccaaaaatacaaaaattagccaggcatggtggcgtgttcctgtagtcccagctactccggaggctgaggtgggagaatcgcttgaacccaggaggaggaggttgcagtgagcctagtttgcaccactgcactccaacctgggtgatagggtgagaccttgtctcaaaaaaatagaataaaataaaataaataaaagcgtatactgaagagaatattcccccaagcccagggtcacagttgcattaattgttctgtacctttctcctccatccttgtgtctgtcctggtccttctaggagttcctatagtgagggcagatgggggaagatatgcaaaggaggtcattcccaagcttgcctcttgggtatcaaaggaagagagcagagggaactctaaagaaaagaaggtagttgtcaggtgcagcagctcacacctgtaatcccagcagttttggaggcttaggcgggcggatcactagagatcgggcattcaagatcagcctggctaacatggtgaaaccctgtccctactaaatatacaaaattagctgggcgtggtggcatgcgcctgtaatcccagctactcgggaggctgaggcaggagaattgcttgaacccgggaggcggaggttgcagtgagctgggattgcaccactgcactccagcctgggggacagagtgagacttggtgtccaaaaaaaaaaagaaggtagtcatgatcatgaaagccccttccactcactaaaagctccatcccatgtacattttgggtctgcagcacttaccagagcatcccctcttttggaacgaaaggaaatggtgatcctcaagacttaagaggttatgcgggcagaatacatcttaaatgattaggaaaactctttattcttgtatctttgggatttcagataggataaaaagaatattcttatgcttaaattatcaactacgctgaataaaaggatgttaatgagaacatgtacattgtccaactcattgaaatataaatatttgtgcatatttgagaaggtgattgtgaggattaggtggcatttagcattcaagtgacacttggtattacagtacttacagtaaatactgatacatacatttattatatgtcaggtattacaccaggcctgggaatacaaagataaataaaatgaagtttctcttctcaaaaagctcacagactagtggagggaggaaggaaacaaacaaattaacagttataatacagtgtgaccaaaaaaatgatagaagaaagcacaaaaagctacggaaggccaggtgtggtggctcatgcctgtaatcccagcaccttgggaggccgaggcaggcagatcacctgagatcaggagttcgagaccagcctggccaatatggtgaaacctcgtctgtagtaaaaatacaaaaaatcagccgagtgtggtggcaggtgcctataatcccagctaattgggaggctgaggcatgagaattgcttgcatctgagaggtggaggttgcagtgagcggagattgtagcactgcactccaggagcctgggcaacagagcaagactgtctaaaaaaaagaggtggggagaaagcacggtatttcacccaagtaattcagtgtactcatggattatgtgtgtgtatgtgtggggcggggtgggggcgtgggtagtgtctcctcaaagttagactgggaaacagagattggataatgacttgcttttcagaaagatcattctagcagtaatgtgaagaatggggtggagaagaagaaagccgaagtccttgaaaccatttaggagactgctacagttatccaggtaaaagctggtgaacggggagtgggagggggaggaggggacactcagcagctactcagcttagctgatagaatcaggaagacttactgacatcaaagacaaaacgtaccagacaattacacaggtggttttattcgggccattgcaatcaagaacacatgttcattaattaataacatctcagagaaaaggaaggggacctgaggtttcatagaggcagcaaacaaaagagtcatacatggatcttatgggagccataatgaaggatggagatgaggctttttatggaatatgtgtgagcagagtgattctttgcagttagcttttttgttggaacacaaaaggttggagggttttggaaaacaacacgatgggtaaatttcttaactgacctgttttacagaagcacagggttcaggtggttcaccagtgtcagagactaagtgaatgcaagaaaggagagtaagggaagaggctgggaagactgccagaattctagactgtggattacatacaggagaaaaaccttttcctctacctgttaggtttagtatacggggcctgcaaatgaaaccgagaaaagacagatgaaagggaaaggcttatttcacaagcatgtgacaacttcacagggaagaagtgaaaataagagaagcaatgaggaatgggggcttatatgccattttaacaaaggacaagttgtggaaacattaacaagaccaaggaagtgagatctgggcatttggggcagtaagttatgggaaggtaaatatatcggaggcactaatggaagataatgaccattttagtaagatttgtttacgcagattcaagttggtgctgactttctgtctcttgtcatataagttattctccttctcctgatatgggagagggggagagagacactttccttcataaggggaaatttatatcctgcttttaagtgtttcttaattgccttccagcacaaaatcctacttatgccaaagtggcacaatttggactggcatattttgatcccttttaactgggtggatggtgccatccatgcaggtacagatatagaaagagagaaaatagtgtgttcagtttactacattaagtttgagtggctgggtgtggtggctcacacctgtaatcacagcactttgggaggccgaggcgggtggatcacgaggtcaggagatcgagaccatcctggctaacacggtgaaaccccgtctgtactaaaaatacaaaaaattagctgggtgtggtggtgggtgcctgtagtcccagctactcgggaggctgaggcaggagaatggcgtgaacctgggaggtggagcttgcagtgagccgagattgcgccactgcactccagcctgggcgacagagcgagactctgtctcaaaaaaaaaaaagaaaaaagtttgagaatgtgtaagtcctgatggtgaagatgttgagatagtgggatataaagggtcatgtcaaccattaaagaaagaaatctgaagataaagactggcagttagcagcaaataagtagtgagaagccaagagtgttgaggactagctagggaacaggaaatgagaagaggagagactgaaagggagtgccaacatttcaacagcaaaggaagagaagggacttcagaacccaggatctcaccaatatttcttcccataacaatggcctcttgaaggctttcccttctcctacctcccccttgaatccccgccttcatcaaggatttggtaggaagtggaaaggaaccagtatcagaaaagaatcctacttttttttctttctaagaatcctaccttaataagcaaaatatgtcacatttggagcacagagaactttctatccttcttcctgtagccctgttgaaatatttatcatatctcatccagactgttgcaaaaacccagttgctgccccttctatgtcagaacattcctccacccctatgtctattattttattttacatattctctatacacaaggctgcctctattcaactaacccttagaattgtgtcaggtgatgtactgccagctatttaaaatctgggccaggtgcagtggctcccacctgtagtcccagcactttgggaagttgaggaaggaggatcacttgagcccagaagt

SEQ ID NO: 6946 - DNA, 115755 bp, Homo sapiens
ccagctgacagcgtaagaggatttttctcaaatatttactgtgaggacctggtagagctccaggaagtaaatctcacaaaactacgggggcttccttaggactggctctccctggagcttttaggtctcagacttgtccacactgagcctccagcaactcctcaattacagctcagattttcctacccgggtactggttccctcaggggtttctgatcctcggtttctgcttcagtagttgtgattctctgtatccagctgtctgtctctccagttttggaggatgtggtttgccctgtgacttcacttatctgaggaatctaagaagtgttgtctattcttcattttgttcagttatttatttgttgtcaggaccaagtggcaattactgagctccttacatgctacactggaaattggaagtcttcagagattacttcttaatagtttttaagagtgctttgtatatgaagatatatacccaaaaatcagacaaaaaaccctctgtcaggttttacaaattttttcctagtttgtcatctgtcttttaatcttgtttatattggttttggaggcacaggagtttcaattcttgtatactcaaatctatgattatggtttctgattttacgacagaaaggtcctcctgctatcaagaatataatacctttatctatttttttgtacttttatggtactttcagtttttccatttcctacctatcagaattttttttcttcagtttttattaaatggctggctggttgtcacatcgtttactgaataattccatcgtgttccaaaaaccataaaatgctgtctttatcttagactaaatatctattaataattgggtatgtttctggactttgagggaaaaaaaaaaaaaaacctgggaacagagactgcctgtgaaatgaactgagtagctggaaacagggaagaaaaaaagactaatttttcactgttcccttttaaatttattccacgtgctttgaattatcactcaagacatcaacagaaatctgttgaaattctgcttactagacatgatgtcattatcaaatatttcagatttggcaaattataccacaaccccatatgcacctgaatacctgaaatcataagtctatcttgagcttaaaaccctgatttaatctattctattttaaataaatagtaaaagtacctcaattatcttaaactagatgtttctctgccacttaacatggtcaaacacaaaaccatattttaccatgaaggaaaaacaaaagcttctgtctaaatccttaattgttatagttaaggctactactggaaatgtgtaagaatctcagataatgtcaatttcttactgtgtgtgcttcccagatccagccatcacagatgtattttactttttgtgttgtcagctagtcaccatctttttctaccaatacctatagtgaatacttaatcagaacctaatctttttattctattgctatctgatcattgtattttcagtatcatttcattatcattcaatctctgaagccaaactgaacctctgttgtaaccataattccataagcgactgcctgagagaaaagaggtatccatctagcagcagacagaaaaagaacagctttcttctgttatgtcagtcttcttaagatcctctctctccccctattttctaaacaactatgaaagacagactcatttagtaattttagcctttctccaaataaatatattttttagccactgaaaatgctctcttaatagaaatgcgaaggtgacctagtattcagtctcattagcattctcattaataattacagggatcagacattatctttgtaccctctaattctgctctcactacctgctctcctaggtactttcttagtctctgttgctctgctaataaatgaactcttttaacatgcagaagatgcacattccacatatctcctaggaaaactaatatttaaaagagaaaccaatgcttttaacagtctaattacccttagattttaaagcctcttatttttgatcttcataacagtatcatccccatattcaacaggaaacatacagtgtgatttaccaaacatcctattaccggtagtagaactaggtctcctgtgagaatgtcctttgccctaaatacattgccttcctcagagaagaaaagtgtctttgcagaacacaatgaaggatgcgctttatatagcacaatgtatgaatattagtgatatatgtataaaatcaaaattaagttcagtacttaaagaaatcatatcttctatataagaaatgatttcaagcattccaagagaccacactataaaagcttctaggcagaaggtactatatttccttttctcccagtgcccctagcaccttatcttatacagtgaagtacttatctaatggccactttttttttttttttttttttttgagacagagtctcactctgtcacccaagctggagtgcagtggtgcaatctcagctcagtgcaacctccgcctcccaggttcaggtgattctcctgcctcagcctgccaagtagctgggattacaggtgtgcaccatcatgcccagctaatttttgtatttttagtagagatgaggtcttgccacattggccaggatggcctcgaactcttggcctcaagtgatctgcccttgtcggcctcccaaagtgctgggattacaggcatgagccaccgcacccagcataatggccacttatttcttagcaaatctcaactatctgctaataaatttggcagatttctgtgtatctgagacacagtccaatacacagaaattataaacaccctccactaaaatctgggcacttttcatgagagactcttctcagatgaagttactcttactttagatcaacagttctcaaccacatcagattcaatgtgccccttgcataaaatattttccaacttctgctttaccaccctgaaacaaaataacaatattcctacaatttcaaacaaatccatataccctaaataagagtggaaaagagacatgaaaatgatttataataacatatatttcgacgtggggcaaaactacactagaagacttaaagaagtaactagtagctgaatatatctatgaatgcagagctgtttgtgatacaattttccaaaactgtaaacaattcttggtcaagttgtgaacaaaacaatcttccttcaattcacataaccgttgcatgtggaaacagactcagttaaaattcagtctcagttaaaatcatgatgcaagatggaggttccaggctttgataattacaaatactacatgaaagtcaggcagatattcttaaatcatgcaagacatggggacactttgttcaggactgtcccacacctctctagccttcactcaacaaatgcaagttgttagctccaatcattacaacaatctaaaaaatgccttccagtttccccttggagggcaacaccaagctggacccaccgccttaaacacagttccgctatctatcccagtataatgtaaacaagcttgggaagcatgaattagatctccagttctgttaccaatgacctatgtgatcacccgccagttgagttaacttctctaaacctcactttccatggtaccaaaagggaataaacgctatatggctttttaagttgtcagaatgactcaatgacacgtgtatagcacatagtaggtggtttccaacccatggcctattgagatgtgaaaaaaggcactgttccaggtaaacagaaagaaagcagcaaaaagtaatctaaatgtggaagaggcagaagatataataagcatacaaaatgaaacttaacgcacagcagtctagggacatttcagagagcagccagccatcctacctaggttgccttcagcaacccctgaaggcattaatgtactaggattagctgaaataattaatattcacaatgatgacctccaaagtaaaaaggcaagaaagacatttttaagagacttccaatgtacgtggctgaaattttttaaatctgatgcctaaagagtgactgtatttcacaaacattattcaaatttttattggacgtttaccctatctgaggctagatagttggaaaacacaaagaaatctaatacaccatgtctgttctcaaacattttaccattcagtacattagacatggtagaggcagaatgacacagataagaaatagaaattcaagtaataaattatgagagcacagacaaaattaggaataattgtccctgaggaaaaccaaggatgtcttcatggcacaggccactgaaaaatgagagttctgataggtacagaatggggagcaaagtgttaagggaaaaacgaaatctgggcaaaagcactgagcatgaaaatacaggttggctgaaagaagagaggtagggaacgggtacattaggagttgggggtgaaagtagtaaaagtaaaggctgtaaagctatttcaggacctttcatgaagggatctgaatgatattcaaattcatttgagttttattgaacaagagagttcgccaaaaaactggtgcttatgcagcacacctgatcctcaaataatgctgaataatggccaaaaataaaagattcagagttaaatgcaaattattactcaaattcctgaaataaaaagtcttgacatgaattaataagcgaaaagaacctaacccaagagtagaaagtagcttctgagcttgtttcttaaataatgaaatattacccaatttattgactgagaactgaaaataatttaggataatctgttgtgtcctttgattgtcttccatgcaagtcagagtatttcctaaacatattatttagcagtgcctcatatcacccttgaaaggcaagagacagactacagtattattaccccctttttatcacagggaaactgaggaacaagaagacaaaattacagtatggtcacaaaagccatcatattttctaggactttaattaaaggctccaagcctacatttcatcttttattcttcgcaccatctgaatactagaattatcttttactatcgtcttaactggaaaaaataaaaatatctaaactttaacatcattttctcaatttggtactgtcacaaaaaaaaaaaaaaaacagttttaaaagtctgcccttgaaatgatatttgcaagaacagcaaggtgtaagcagtaacccaacctccaaaaaatacagttgtaaatcttacagctgtaatatagttgtaaatcttaagacaggtcaggaatcctagacccagcctttactttgaacatctggcaggcctcagggaaataatggagattcgtgtctgtaaacagtctttgcagatgctctgatgaaaaggtgccctaagaggcccagaacagtggtatcactgcacccactactgcaaacatgaaatcctcctctgtccctccctgcattgcaccacgagactcgtggcacacacggaggcctgtgcaagaacctctcgacgattcctttaaaatgtggtaatataaggacgcctttggtgctgggcctccgtaaacactgaggataccggatgtggccaggcacacctcaaagtcttggctctccaaaaccagggcctggtcgagagttttattggacaccgagttcctgcgaatatctcacttttcacacaggcactgccaatccctaccctccagtacccttcctcagcctcctgccccactctcgccgcgaggtgggcgtcccaaagagctaaggagggtaaggttggttagagcgcaggggccaaggccgcggcagcgaggccgtccagcgcgggctaggatcccgccagcccagccctggagcccggccgcctggccccagccctggcccgggccaacgcgccgccgccaccgcctatcagcggagcgcaggggcggggctgtccggactaggctgccgggccggcgggcgggggcgggcggggacgggcgggggaccgaccgccgcgcagcccaggccgccgcgcgcacacaccgggcccggctcctgagggcgccagcgcggccccggggagcgcgaggagccggcgaagcgcgcggcctgccgttggcggcctggtccgcagcgccctgcgcccacccgccccggacgtggggcccaagcccccgtgaagatggtgtcctggatgatctccagagccgtggtgtaagtgcctctcactgcgccctgcagccggcgcgaggcccaggggagctgtgggaaggggaaggagccgagaggaaagggaaggcctgggcctgggcggggacggggtagcccggcctcgggcctgccgagggtctgggggagccctcggcttcctcaccttggtccacgtcgctgcggagctccctgcgacggccgagggcctagctgcggcgactgcggctgcgacggcggcggcggctgtggcgctgctcggctgcgtgcggtgcggcgcggcgcccctgctccggcggcgctgggtgggcaggcgctcagggcaggcggcgcgcgctccccgctcctgctccccgcgcagcgcggcaccgccctgcgggcccgggagcggcgcgcctcgcagctgctccctgcgcaggctccgcagacgccgagcgcgggaggctccgcgatcctcccgaggatgcgacggcagtgccgagcctttgtatcccgcggctgatgcgttgcggtgtctctcttggcggctgattgccattcggtcacgtgtggtaggaggagagatttgtctaaaaaccggagaccgctcccagcccaggatccctgggaagggtcctagttttcccaagatttgcagcttaccgagaaaggtgacaccggctgctcgcccagatccccgaattcggccctgtctcggcggaaatatttgctaagtgattgaaaggctgcaggtgcctgttgcctttgttcaaattatgggttcatttcattgttctcctaccaacaagtgctacaggtctgtaagaaaaagaaattccttgagttggtggtgttaatcgtgtaaatgtatttgaatacagtttaaactgattttctctcatctccattttacccctctccccgattaaaaaaaaagtcaccaagtaaacaatgacgtagttacagctagggcctatgaattcattattcacctctgtagtagtgttatctcagaaggtttcataaaggtatatgaaaaaatgtttatgtgagggggcaggcttctctgataagctttagaatttaggaaaaataacattaccagactttttgttaaaaggagctagattttctgagtttggggtttattttgtttggaagtgaattactagccctatttaatcagatttgcagcacagcattcaaaatttttcatttgattaaatcgcaaagtttctagttttaaagcctcagagcttcctgtgttcccctgtacgaaactaaaaatcaagatataaacaaaaggataccacagatgccttcagattgtttttcagccttttcctggcctctcttttgagtctgtcatttatctaattcaggcatacctttcttgacctagtagatgtctatcaactgttgtgtccacacctagaaaatcaagtgccctattaagaagctgtactttacaaaaaaaaaaaaaaagcctctggatttctttgaccagttcttcagctgacagaaaattgtgaagcacttttagacttttgtttttcataattgccaatgaatatgaatgtctgttctaggtgctacctataacacaaaggtcagtaacacgtagttgatcatgggaattgacagtttgggtgcacagatatctgcagtacaggtccaaatgtcaactcttgtaaaagttacacccactctaatacccagtgttggacaaggaagggatatctggttggagaatcagaaaaggcaagggagattacgtttcagatgggccttaaagaataggcccagtagagtggctcacacctgtaatcctagcactttgggaggccaaggagggaagattgtttgatcacaagagttagagaccagcctgggcaacatagcgagaccttgtctccacaaaaaaagaaaaatttaattagctagtcacagtagctcacacctgtaatcccagctactcagggactgaggtaggaggatcgctcaaattcaggaggtcaaggctgcagtgagccgtgatcgtgccactgcactccagcctgggccacagagtgagactgtgcctcagaaaaaaaacaaaaaagaatggacagaatctaggcagccaaagatgaaaaaggaaaggattccagatatagggaccggcgtgagccaaagcccagaggaggaaaagcccagattagttacagtgggcgtgagggactcgggtggggaaaaagcaagctggaaaggtagcctggggcctgttttcaagaaagaaggggtaaatgttataaggcagcaacagctttgctttggaagattctctgcccttctgtgaaatgattggcaatggagacctggaagacaaggagactccttaggaggctccctaactggagagaggggattaaagcctctctccagttaaagtacttgagctacagaatgtaaggtttgaggctaacgacagggagcaataatgtgaggaagaaaatgtcatgaaaagaaatgtatttctcaagtgtcaggaactgttattttgtgagccgtgaacacattagcacattagaaagcacacttgtagagaatataaacatcattctatttttcctctttactcagtttctctctctaaacatgaaagagcaatcacaggatctacacaaacttggaaacctttttcacaccaggaggtagaatttacttgattctttctaacctactgagacaaccacctcctcctgagcaagatcagacccttctctcaacatgaacctctggtagcatgggcagggaacctccataaccaaagcaccctgtatgtagaagcactttgtcccaagatcctgcactttaacaccagagaaattagccctggacaccactcttttttttttcttttttgagacagagtctctctctgtcgcccacgctggagtgcggtggtgtgatctcaactcactgcaacctccacctcccaattcaagcaattctcatgtctcatgactcaacctcccaagtagctgggactataggtgcacgccaccacacccggctaatttttttgtatttttagtagagacagggtttcaccatattggccaggctggccttgaactcctagcctcaagtgatccgcccaccttcctcgctaagtgctagaattacagccatgagccaccgcacctggccctggataccactgtttacagctgcgtggtcttgggcagcatgctaaacccttctgagcttcagtcttcttgcctttaagtcattataataaataccacatgaaaccgttgtaaagaaaattagccgggcgtgatggcgcacacctgtagtcctggctactagggaagctgaggcactagaatcacttgaaccctggaggcaaaggttgcagtgagctgagatcgtgccactgcactccagcctgggcaacagagcaagactctgtctcaaaaaaaaaaaaagactgttgtaaagattaaattagtttaactaaaacgtggaagtgtggtgcttggcattgagtgtgcacttaaaacgtaatagatatatagatagcttttttatgagggaagtgagtaaaatggtgtaggaagaaatatcactggattgttaccaagaaacttggaattcagaactggctttggttaccttaaccagctgaatgaccctgaggcagtctcttgctgattatagaccttggttctatttcttagaagaggcaaagggacctgataaccgccaagctcttttgtccagccttagcattctgtgatgatatgaaagtatttttccattacttacagtctgttcaatctcagcttactttaacatcacaggcaagattgacagattagttactttttttttttttgagacggagtttttctcttggtgtacaggctagagtgcagtggcacaatcttggcttactgcaatttccgcctcccgggttcaagcagttctcctgcctcagcctcccaagtggctgggattacagacatgtgctaccatgcccagctaatttttgtatttttagtagagacggggtttcaccacgttggccaggctggacttgaactcctgacctcaggtgatcctcccacctcagcctcccaaagtgctgggattacaggcatgaatagttaccaatttttaagggatagtagtttgagattaccaatgatgttccattcatatatgatatccacacctcaccttttgaaacatgactctcataagttgagggaaattccatttttttccctaacttttcttaatttgtttttatgatctagcattgtgattaagatcaagataaaagccagattgccaaattcaactattaactctgccatttatgcgtcataacctaccccatgggattaaatacattactatatgtaatgtccatagtccagcatctggcacatagtaagcattcagtaaatgctagtagtagttatcagaaaaaggaaaaacatgctctcctaaaatcccagcatgctgaatgtttgaagtatcttcaatatacattttttgtttgaatcactttgtgtgtaggtaacataattttaattagagtatagtaaaaatgttatactagtctttattatattgtaagcatcttctatgttgctctgaaatcttataagcatcttctatgttgctctgaaatcctatttagtatcttctgtttgatcaggccagtattattttcttagccattcatctatttgtatttaattttacatttagataatttttaatatttcattattataagtaatgctgaaatgcaattataatgctataatggacattatatatacttcttttgaagtacatacttctttgggataaaaatacaagaggaatatttctgagtcaaacactgaatatttttatgatcattgatatgaattgccaaattgctttccaaaagaatattaatattttacatgctagcagcaatgtgtgagtactttctttatcacaatgtagccagaatcggaagttttaattttttaatactttaccaataaatataacatatctcattgttttcttttgtattttatttatcagcacagttgaatgcttgtccagatttttattaattatatatattatgcatacagtatgtatatactttgcccatttatctcttggttacttgataatttacttgttttgtctgagctttttacataataaaggaattaaccttatgtgatatttcatgcaaatgtgtttctcaatctaatttcagttttcttttagatattttattcttggttgcatagagagtttatagttttaatatagttcgccttctttgttttytattttgtgatttcttgatcatttctaaatgtaaaattagatactacagatatttgataagtactactttcctatgtagaagtggattaatttggagacttccttttcaattctatatatcgatatttcccttttttacaatgataatacatttttgttttaccttagtttaattgtctggcagtactcttaaaacccgcaattatttttctctgattctcttcatttatattgggtgctataatggatgtcttcaaaggctaaattatacaccttaaaaaccatacttcagcagctttcccccttcttttcagcttcatctcttttttcttctctactagatctttctcgacagcataccaacatgctattacttctcccatcttaaaaaaaaaarctcttttaatctactatacttttcatcttatcaccccatttccctctgtctctttagagcaaaaattcctcagaagaatagtccaagccgggcacagtggctcttgcttgtaatcccaacactttgggaggctgatgcgtatagattacctcagctcaggagttccagaccaatccaggcaacctggtgaaaccccatctctacaaaaaatacaaaaaacaaaaaaattagctgggcgtggtggtacatgcctgtaatcccggctactgtggatgctgaagtgggagaatcacttgagcctgggatgttgaggctgcagtgagccatgagcatgccactgcactccagcctgggcaacagagtgagaccttgtctcaaaaaaaaaagaaaaataatttttttaaaaaaaggatagtctatacaccatcttcactttctttccttcagggtactctggaacccatacgtttgtttagacttttctctccttccactccactgaaattgcccttctcagatcaatagtgaccgccacttggccaaactgtttgatcctcatctgacttatcagcagcttttgatacaattgctcactttctccttgaagtattttcttcacttggtttccaagaaaccttgcttttttttgtttttttttttttgtttttgtaactcaacggccactcccttctcagcctacctggcacatttctccatgttccttgacttcttaaagttgttaaagttggcatgtcatggggatcagtccttagaccattttctcttttctatttgtagtcctttaaggattcccattaatttacatctccaacccagatctctctgctgaactctgtgatcatattttcagctgcgttctttgctccacgtggaaacatctgaaagtcagactgaacttaagacatccaaaactaggctcttgagcttccttccccatctggctcctctggcagctttcccccactctgttaatgccagctccacctactagcagctcargccaaagaccttgggatcataccatccttgattcctctctttctctagttccctacattgaatccgcaaatcttgttgactctgctttcaaaatacatcctgtactcaccacctttacatacaccattctagtccaagccagcatcatctctgaaatgtgttgtagtggcatagtgtcctgtgtctgcccttgtccctcctcaacagcagccaaaatagtcctgttgaaacccaagtcaagtcatgtgactcgtctgctcacaaccctcagatgacttcctgcctcactcaggaaagccaggtccttatgatggtctacaaacaggacatgatctggacttttttccatctcaaacctttgtctctacctgcccgctgccattataactccagccacagtgatctccaacacagtggagatctgtgatctccaggtaagacctgagagcctgggcacttgatggcccctgcctcagtgcacttcccacagataccctcctgcctcattccctcgcttccttcaggtgttcactttctcagtgaccccagcactcctgctttccttccccgctccgttgtctgtagtatttggtacttcacttctttaatctatcatctgtcctctccaactagaaaatagtctccatgagagaagtcttttctctaatatgttcattgcacacaaaagaagctcaataaatattttccgcagtaagagaatgaaaaaaatgaatgtgaactataaatcacagaactattgatagtaaatattatgcctcatgaatttggggactgcctttttttccctcctccagagcttatttcacaattaatttttctcatgaaagctgcagtgaatgaattatttggaaagagagactgaaaggatctcagcattgaataaagtttttttcactaatgagcctctttccagacacacttattccagatagggaaaagagaaaaggctctgcatttgtactgttactaaaaacaatctctttaaaccttggtaacctagctaaaattgttctggagatagatagggaagtaggattggataccttaacaaatataggaaagaaaacagaataatatgactggaagtgaatgtcattcttttatttattttatttatttatttattttagagacagggtttcactctgtcatccaggctggagtacagtgcagtgacatgatcctggttcactggagcctcaaactcctgagctcaagcaatcctcctacctcagcctcccaggtagccaggactagaggcatgcactaccacacccagctaatttttttattttacttttgtagagatgagggtcttgccatattgcccaggctggtctccaactcctggcctcaagcattcctaccaccttggcctcccaaagtgctgggattacagctgtgagccactgccccggccatgaatgtgattcttttttttttttkgagactgaggagttttgctcttgttgcccaggctggagtgcaatggcgcaatctcggctcartgcaacctccacctcctgggttcaagcaattctcctacctcagcctcccgagtagctgggattacaggtggccaccaccatgccctgctaatttctgtatttttagtagagacagcgtttcaccatgttggccaggctggtcttcaactcctgacctcaggtgatccacctgccttggcctcctcaagtgctgggattactagcatgagccactgcgccctgatgaatgtcatttttatattcatctttgctataatatagcaagagaatgtaccatttgttagggtatrtgtttgttaagtttatgataggattaatgaaaaacatcctcatttttaaatccttatggaagtttgaaggcagtcacaattatatgagtgatatttttcttcctttatatgtgctttaaattttttaactggttgtaaaatctcaatgatagctaaaatattttctttcaattaggttaaggtagattttgtctttatttaccattttttatgagatccattgtgaatagcttacatgttcatgagttgtatctaagaataagatacattgctattagacaatgagaaatcaggtaaataggaacaatgatgttttcaagaaaattaaaaggttgacattttaaaaatatatgtaggaaatgccctgtaagaggtcatcttttctgtcttctttcattaagaaagaaaacacattctaaactattgggtcttgttttcactgcatgggctagaacttccaacaagattcctttattagcctgcatttcaaaaacaatttgcttttgtccattttttgttactgttgctctgttagctatttctttttccactatattttaaacccttttaggatggagatttttatattatgtactttaagtatagatgaaactgttcaaataaatggtacattacaacaatagtggcataaatgggtattttaaatatcttaaaagatgttattgttttgatcatttcatggaaaaaggttactgttgattcataacaacatgaacttatttttatgtcattgattacacatttgcactaaactaatcctttcatacaacttttgaggtaaatgagaggttaaagataaaaatttttgttataaaattgttcatgtttacaaaactaactgttaagggtttatgcatacttacccctattactgaagtaaatttaccagtttcgttcatgttgttatatttacagaggccactatgactgaaaatcaggcgagatggcatactcactaaaacactgtgaacagggaaaacagtagcaatcaggatggaattatccaacagtggttagagattattttatgtaatgagcagaccagctaacgttagaatgttatatagccattcataattattttcaaagtacttttcatttcatttgaagatgttttaatatatcacagtttcttaacctcagcattattcatatttttaagtggataattctctgttgtgggagactctcctgtgcattgtgggatgtttagcagcatccaccagttgtgacagccaaaaatggctccagatatggaattgacatatgtcacctagtgggcaaaactgccactggttgggaaccactgtgttaagtaaaaagggaagaaaaatatatatggagagggcatgaggctaaaaactgtgctatctcatatggttatgtgtggctatttaaatgtaaattaattaaaaattaaatttctcaatacactagccacatttcaagtgctcagtagctatgtgaatgcttatcttattctgtgctaccttactgggcagcataaaaatagaacatttttatcatcgcagagttctgttgaagtgatcctttacgagatatagtccgctcagcatctccacctgaaaatggctgtgctattttctatttgctgcttctatgtattttatgagagaaattctataatgatatttggaaattcacaagtatcttaggatagctctggcttaagaatattctatataaaaatactgttgctacttgtagaaaagaaattactgttgctgatcaatctgtcacaatctttattatttcaaaattcctatgtttacagagaatttctaaaaattgatgaaaaatactgatatagtacactttgcaaatatttttatactcacgtattctgcacatcaggtgttataatccatattttttagcctgtaaatgaagtatgacttacaagttatagtttttcctggtcttagaattgattaagacattaggattagaatacagagctgaaggttatcactatgttgcttttcctaactattaacagtgtcattgactctgcagaatcaaaactatcaaggaaatcataaaagtaaaagtcataggacaaatctaaacaaaataggtttatgctaaccaataattcaaaacataatcttaggaaatattcagatatattaataccgagagcattaacactttcaagtaatgatgtgttcattttaggaaagaattattctcacctataaataaagaaataaagtgctgtaatcccagcactttgggaggccgaggtgggtggatcatgaggccaggagatcaagaccaccctggctaacacggtgaaaccctgtctctactaaaaatacaaaaaattatccgggcgtgttggcgggcgcctgtaatcccagctactcgaagggaggcagaatggcgtgaacccaggaggcggagctcgcagtgagccaagatcgcgccactgcactccagcctgggcgatagagcgagactccgtcaaaaaaaaaaaaagaaaaggagaaaaaaaaattcaggagttccacaccagcctgggcaacatggtgaaaccctgtctctacaaaaagtacaaaaattagccgggcatgatggcatgcgcctgcagtcccagctactcagtactcagaaggctgaggtggaaggatcccttgagcccaggaggtaaaggctgcagtgagctaggatcgtgccactgtactccagcctgggcgacagagcgagaccctgtctcataaaaaagaagaggagaaaaaatgtcgaacaaactaactgtcttagagtcatcacatggggaagggggacagatttttctgttattgtgaatccaaggttaaaggtaggtcttataaggaagccagttttattccatatattgaggaaaactttataacgtctaaaattgttcaactttgaaactgccaacatcatgagtgcagtgtgtataccatcactagaggcataaaggcagggtagaaccctagttgaagatcttaaactatactgcttgtatgcttcctgtggaggatcagatagaaaatgtggaatgcactttcaccaaaactgtgaagtgggcaaactgactcttggagaggcccacaggaacaacaagcctagtcgttcttgagtgttgacatgaagaaagtgcagatatggaaataaaatagaatatttggtgatatttgcctaatggataccgttattgtcatgatcagttcttcactggtttgtggctgtggtctttattttctgcttaggaagctgatcaatctcactattgctgaacacacttccaagttgttcattcagtcctttttatttgcattatatttttggttattaattttcatcaaccgtagtttttttctggttttctgaaatatagggactttctgttttaactttgtatacctaagttaattttgtaaatagaaatgataatggttttaggatgtttaatggatcgtgagtgaatgaaagtactctttaaagatatacctatataagtccacatgaaagagccttggaagtatgtaaatctttttttttttttttgagacggagtctcgctctgtctcccaggctggagtgcagtggcgcgatctcagctcactgcaagctccgcctcccgggttcaagcaattctcctacctcagcctcccaggtagatggggttacaggcgcccaccaccatgccagctaatttttggtattattggtagagacaaggtttcaccatgttggccgggctggtctcaaagtcctgacctcaggtgatctgcccacctyggcctctcaaagtgctgggattgcagacatgacccaccgcgcttgccctggaagtatgtaaatcttaaagaacctgaaaatattaaggtgtgaaataaagttatatgagaaaaatagtcagaaagttctgtgtagagataytctaaaaaaaacctgatctttccttgctaagtaaaaatgagaaatttaaattggaaataaactkttttgtccacaaagattatgcttattatgatgaaataattcttaagaatttctagatgttatatcttgaagtattattattttttattttttttttgttttttagagacagggtctccctctgttgctcaggctagagtgcagtggcacagtcatagttcactgtaacctcaaatccctgggctccagcgatcttcctgcttccacctcctaagtagctagaactataagcacacaccaccacayccagctaattttttatattttgtagagatagggccttgttatgttgcccagactgttcttaaacttctggcctcaagtgatcctccttccttggtctcccaaagtgayggaattacaggcgtgagccactacaaccagttttgaatattttatgtggtaaataggatgcaaatactgccttgtttcaattggtttcctataagtttaagatacagatgtattgtctctgtgtaaatctgtacccaattgcctcagatttttgctggtgacaaagtcttacagtgctttaactaaaatagctcacctaaaactaggatcagaaaaatataggatagtaagccattttaaaagtaatggttacaatagagaccttgagttcctgaatgactgataaatataaaggaaatactgaaaatgaaatgacctataaccctacaagtgacactgcctagacacactttttaagtgtatgatgagggcaggaactgtatgagaaaggaaagcagtcagtttttcctttgaggtctaaaattatgctctcccactgcaaagtatgccatcactgtcacttggcttctcttttattctttcctcacctttatctctgggtttttctttttccttcattctcaataaaagtaggaagagaatggtatggtctctgtcatgtgaagagaaataataatttttaaagattagaaatataatctattgtttcaaaactaacagaagagaggaaaggaggctaaagagatacagaaggccaaaataaaggggtcaagtaggtgagagagacataaggggaaaaaaagatggtagaaatgggttcaaatatatcaataataacaataaatatcaacaaattttatcttcctgttaaaagacagactaaaatactggaaggaaaagaactataaagtataaaacatgattgaaagatraaaggatatctgaataaatgtatagtttatgttaatgggtcaatattaattaatgattatcagttcatctcctaaaaagtctataaatttaatggaattccaacaggatttttattgttgttttcatggaacctgataggctaattacctataaagttcatatgaaagagcaaaagccccagaatcaagaagacaactgtgaagaaaaaggaataaaaactttcactattacatgtcatgatttattataatgtaggaattacaaccttgtagtattgttgctgtgattgacagtagacttaatagaacatgtaacaaatccagaaattaacccaagcttgcaaagaatctgatatgacagtggtagaattcaaaatcaatgggaaagtatacctaacttaataaatagtgttgtgataattggttatctctcagaaaaaaaaattaaaaaataaagatctttactacacagcagactcaaaaataaatcgtaaatgtattatctgcccaagtgtaaaaagtacagcacttaaacttttggaagaaaaggtaggagaatatcacaatttggtagagaagaatttttcagaccctacaacaaaccatagaggaagcaacagataacatttgtctacatgttttatagcctaccatgtatctgatgctcattctgcatcaggcattattctaagcagtttcaaactaatttgtttctgtttcacaaccatcttcatgacacaggtactgctgttatgttcatttcaccaatgagaaacctcaggcttagaaatgtgaaataacttcccaaagtggtcacacagctgccaagtagcaaagctatatggcagttgagctccggacatagaccttaatgtgctataatttacacctgttattttaaatcctccttgttgagatagaatttatatataataatttctatgtgtttcatcagatgtgtacactcacatatcatcaccctatcaagattcagttattatccacagtggtggttgaatgtccatttctattacattcaccattcctgataataattttatctctctctatgtgaaaagtatctaaattatttaaaatatcctcaggatatagaattttaaaagctaattagaaactcatattgctgttttctcaattcctttctaacttggggcaaggaaggagggtgcaatgggagaagccagcactaggattgttgcccagtgagagtaaaaaacgtcaacagttacattgcttagataactaataaagtataataatcagaagataaaaagaattctttaaaatcagtaagaaaaaaaattaacctaaaaagaaaagtggacaaatgaactggtatctcatagaagaggaaaccaatggcaactagacatataaaaagatagacaaaactcattagttttcaagaaaatgtaaattacaaccacattgaaattccatttcacacttactagattgcaaaaattaagaagtctgaaaataccaagtgttggcaaagatgtgtacagcaacaggatccttttcatgatgccagtaggagagtaagatgctggaactgctttggaaaacaatttggccctaacttatagtgttaatcactcacataccctataacccagcaatcccacaactagctatgtaccatcaaagaaatttggcatatgcatcaaaagacatttgcaaggatatttataggaaaatccttaaagcaaaagtctatgaaaaataatagtttacgtggacagaagaattggtaagtaaacattggtttatgtacaaaatggaatattatacaacaggaactactacttagaagcctcaacttggatgaccgttaggaaagttatagtgtttgtgttttgttttttttaaagcaagccagatatgattacctatggtatgatagcattttaaaggccctaccataggcaaaactgaacaatgtatagtttagtaatgtatacatacacacatatatatatttagcaagtctatttttcagaaaagacaataatgataaattataggataggggttagctctgagagtctgggagaggagagggatctggaacaatgatatttgatattctgcttcttaagttggatgccggattcactgggctcattttactgtgtgtgcttcataacttagaagtgtgtgtcatatattcttttcctttaatcaatgattacattaaaaacatgtttaacacttgcagtgagtcaggaccaagatatctacagtaactaaaggggcgagcttagagaagcagggagcaggtagcaacggaaaggagaggctgatcctgtcccagcccatatgcttcttcctggtgtagaggccagtttcagtgctgagccaggccacagatggaggcagggaaggggctgcacctgtcatgatgagtatgtgaacagaaggccagaacctctatgaaatcgccaggcaggctgtctcttgtcctttctttttctcaaagctggtatgaatccaaagaagaatgtccaatttcttatttacccaagggatttttgaggttctggaggtacatacatagatagccacttaaaagctttcttccccccmccacccccattgatttcttgtctattcagataacagttgttttcttgtctattcatttgatacatgggatattgctataaaaagaaaatgtctaaaaaatgtgtaaattaatgtgcctgcactatagctccttccagtttaagacaggcctaagagatagtgttgatattgaaatgtagaataatattcttcactccacagcttctgcttcttatttttcatgatatttcttgcctattttgttagtttagcctatcaaaaatgtcacattgcttgaaactccctaatacctacataagagtaatttaaatttttgagtgatatttcacagcaattccccataattagtaagaaaataacattagcccagaatctggatggttctaaacctatcagtgggagataacatctaatattaacattttatacttgatgtgcagctctgattcttgatgcacacagagtgtcatttatataagacgaggaaaacgggccgggtgcggtggctcacatgtataatcctggcactttgggaggccaaggcgggcggatcacctgatgtcaggagttcaagatcagcctggccaacatggcaaaaccctgtctctactaaaaatacaaaaattagctggatgtggtggcacgtgcctgtaatcccagatactcgggaggctgaggcaggagaatcgcttgaacccaggaagcagaggttgccgtgagccaagatcaagccactacactccagcctgggcgacagagcgagactccatctcaaaaaaataaataaataaataaagatgaggaaaatgaacattattaaatggtgaattttccatgtgtgttttccatgtggtcaacattgctgtgggggtgatctggctaagacatctgtcacctactgatagccaggatttatttggcctgtgagactatccccttgcttccttgtcattccatgtgctgtgctcacttgatcagtagaggacattcacagcctcactgcccctcaagaacataaccgtgagacattagctagtagatttgcagatctgttcacaaagatttctagttaaagaatgcaaagtaactaaatttactagatttcacttcaaaagttatctatacctatactgcactcctacagttgcccgaaataccaacagattgccaactttaggttaaataacactttttttttttgtatgaagaatgctagtctacagatgggccctgaaatcagtggccatttacttcttttactcctaaccagattcttgtttaactataggtttattagggtcttatgttttggtaacatttaatctgtcaaaccaatcctaaaactttctgataaacaggcaaaattttctaaccatactgaccctttgaattttgtaagatggggtaatttaaaattatagctttgagccagaagagcagttttatagctttaccaatgttggaaattgatgctgtcatttaatttgagaaacatggttgatagaccatatatttttcatgtaactttaagctcttagaaaatcttaagaatccaggtacagtggtgtgtacctatggtcacagctactcaggaggctgaggtgggagtatttcttgagcctagcagttcgagatcagcctgggcaacatagcaagaccccatctctttaaaaaaatgttaaaattatgttcactgttactgaacacatgataaattaagattatccattgtcatagagacgctttgggttcttcatttagaattagagcttacaaagtattataccatatttaaaagctttaaaaaccctttctcagacttcattgccaaagattctgatttaactgatttgggatggcacctggacatactttttttcttaaaaaaactctccaggtgattgggtttgaaaaacattacactagaggatatgagagaaaacctggtgatgattttttgagaaatagtagtgtagtgtcaggaaacggtcacagagctgagctgccaaatactgttaccattttaaaacgcaacaaaaattgtaaaatattctcagttcgattttcagtgactttatgatattaaaacaagaaaatttgagtatctaaaaattatctgaagcttaacagtaagcaacattagtggcctataaggaagtgatttttctagacaaacttgattggtcttttaagattgaattacagaagtattaggagaaaagaatgtaatagagggactgtctggattttattacaacattctctacagtacctcatgaaattcaacttggaaatgcaatttatatttccagttagtatgagaacaaagtctagcaaacagcaaaataacatatttgtgagatggctgtacagcacatttgtagcaatacacatttaagctgccttgaaaagatcatttgtaaaatttgtcagtgtggagctttatgtttgtttttaattaaaatcatttcatgccttttaatgtatccacagtattaagactgtaaactagaatgtgttctacatcttggttaaaaaataatatgtaataaaaatctgaaaaggatggggaagggagaagggaggaaggaagcttgagggcaaattttatctaccatagcagaaagacagatgctttttagaattggaacaccagcctttcataatccttttcttaaaagattatgttggaccctgacatttctaccggttaagtacaatttatttattccttcagttttacttatcacctgttaaatttaagcaaaatgtaatttaaaggttttttgttttgttttgtttttttaaatagacaaggtctcactctgtctcctaggctgatggcaaactcctggtttctagccatcctcccacctcagcctcccaaagtgctgagacaacaggcatacaccaccatgcccagcttaaggatttttattttaagtgacatatatttttaagatcccatttctatgtagtctatcaatcttctttctctactaataatatgaaattagataatcaaatgttatcattgattatttctgggcagtggatctaggggagagttttagatttctttattctttctggcagtgtttctataataaatatgaatcatctctactaaaagcatttattttaagccataaaacatgttactttttaaacaaataaaataatttaaattgaagactagttctaattcatcttccctcagaattatcaatacctttattttatagtctcaatttttcatatcaaccatgattaaaatctttaagtgctggccgtagaatggcgtatgtctacaaaacaagctgaaatattagcatgtgtctaaccgtatgaccttaacctttaaaagttatttctaggaggataggggtgtgattgactcttttcagatggttcatatagttctagattttccataraaccctagaatttgcttactaggtacaattcatttttcttaaataatcagatgaaaatgagacagtacaaaaggataaagtttccatctattctatattaggacaaaaacaaagtggtagcatttaaacccaaataagcagtgtatattagctacagaagtataaccatctaccagtatacaatttgctgaacagaaattgatgacctttgttctaacatacttattctatccagagaagttttttttttgaaggttaataaactctccagttatattaacgaaagaactgagtacttagtttgttatttaaaggtcaaccagtagcattttacgtgcagtttaaattcttcaaaatctgataataaagatatctcaacaaaggataggcaatatttcttttttccatttaaagtggccctgcccgtagcaatgggataaaagcaatattaaattccttcttccagccaactttgaaattgtttttatgaaattataacaacttttagaattcacatttttccatttttatgcataaggtaaaacttactaatatttctatgtcataytacttctagtttacagaattgagagcttcataaaatgcaaaacacatcattatcctaattcattatcctaattagagttggtataagtgacatcactacttctttttgtttttgtttttgttttttttttttgagacagagtctcactctgttgcccaggctggggtgcagtggcatgatttcagctcactgcaacctccacctcccaggttcaagcgatcctcctgcttcagccccactagtagctgggattacaggcatgcacaccatgcctggctaatttttgtatttttaatagagacagggttcccatgctggccagttggtctcgaactcctgacctcaggtgatccacccgcctctgtctcccaaagtgctgggattacaggcgtgagccaccacacccacccaacatcactaattctaagtagttgtatgactttactgcatctctaaaatgaggacacatctgttcttcattaactcacagacattgctgaaaggcacaaatgtgatattctgtataaatatcctttatatccttatgatacaaagaactatattatctacaaagaagtatattatctatataaattttgtatcaactatacaaatacagcactatattaccactccttgttcctttaaaacaatccatttgcattacagcaaggcactaatcagtatttcagactcgcaacccttttgtaagaacattattagaattataaagaaatgaaagatgatgaaaaataagcttctggaatttttatattttggagttttttcacatcttaatatcatgtagatgccaatttgtggaccttaagtaaggtgactttaacagtttgaccgtaagtctaatagattaataattctaacatgtctaacttaggtacgacctcagctctttactatgtctctctgggcacgttcaaggtacaggatgccacaggtatcatcagagtagcatygtgcagccctgcagttctctcctctagctattcctcatgccatattgctgccacgtttctctatgttttattataccccagtgctcctccccagccattcatccagcagtaatgattcacccctggctttctgtgacctcaggagtctgtgttcactgccaccaaggccacctggagtttcttgctgctttcagttatctaatactgtgtaacaaaccacccrataacttagtgacttaaaataataatcattttattatttcccacaaatctgttcacatgaaaattctgttctacattggttttctttaatctttctcatgttttaataacatggaaaacttgtattgtttggaattatttatttattttctgacacagggtctcrctgtgttgcccaggctaaagtacagtggcacagtcatgactcactacagccaccatctcctgggctcaagccatccttctgactcaaactgccaagtagctgggattacagacttgcaccaccatgccccattaagtttttttttttttttttagagacaaggtctaactattgtgttttaaaaccataaaagcaagtcaaagaactgtcagaatatttagcagtttgtccatttcttttgtcacattttcattttctagtctcaacttacgtaaattgtgtgtacagaagattcagttctgccttcctatccacagtaaagaaagggatttttttcttttattctttctgcaaatatttattgaatacctactacgtatcaggcctggggatgcagagctaagcatgacacagtttccgttttaaagcaatacccaacacagagaccacaaacgggaaagtcagtgaacataatatcgtctgatgacagtaatactagtaatacttacaaaatgtgtaccgtgtgcctggcattattatatggtttaactcatttaatgttcacagcaagatgtgtactattattgttacgtttttagagaaaagcaaacagacacagaaaggttaacaacttgcccaaagtcacactgctacttcaagtatgtacaaaatgttatgagaacatggagaaagggttcctcacctagaggaggcaaagatattttcccagagaaaatgaactttcaatttcatctttgaaattatcttccttgtaaaaaggccccagtcagagagaacaaaatatgccaaggcagaaaaaaataatatgactctcttcagaaatcaagcagttcaatatcagtggggcacagagatgcaaaagataaaactggagaagtcaaaggagttagatcaatttggtctaacctgcatagcctatgaggggatttttctttaatgagaaagcaaggaaaggttgttgaaatattttaagtgatgattgatattaacagggggtgtaaggaaagtgaatgagggcagacagttcccatgaaaaataagaaaggtcagaattaaggctgaagtgagtatttgggacatgggaacagatatgaaagagatttaggggaggtgggagaatttgacaaaacttgacgattgggtgtgaggaggaggaaggaatttcagatttctggcttggatccttgagtgggaggtgtcaaacatgagaggaagaaaaggtttagagaaggaatgatgagcttaaacaacagcaagtgtgttgttggggaaagggtgaacagagcactttagataaggaaggtacacagaagcagatgggatgttagggcaatgctttcattttaatttggatactgggtttgcatgtgttcattttgttgttagacttcataacttgcacatattacatatattttctagtatggataatatgtagtaagtttttaaagtaacatttggtaaaactgctattggaaaaaaataccctatgttaagattttgagaagacgacccaattctccccgtatgtatatgcattagggattagttaaatgtcaccaaagcaaagactatttgatttatatagctcttcttcatatgttaaaaatgcaaaatacaaaggaacagtgatttctatgaccagcagaaaaagttatcatctgcaactctggggtatttattgtgattagattaatttctgtggctatcttattttttaataaatacaaagaagacagaattagctatttgaagcaaatgaaaaactttgctttttaaattgtttgtggtgattatgggtacttgtttctttgttttaaatttaatttttaaaatttacataatatatttagacatacatataacatacagtgaacagattaatgtaattagcatacccatcatctcaaatgtttaccatttatttgtgctgggaatattcaatattctggttctacctatttgaaactgtgtattactgttaactatagccatcctacagcgttatagaacatktgaacttctttttatttatttattttttttgatggagtctcgctctgttgccaggctggagtgcagtggtgyggtctcggctcactgcaacctccgcctcccaagttcaagtgattcttctgcctcygcctcccaaatagctgggactacaggcayccgccaccatgcccagctaatttttgcatttttagtagagacagggtttcaccacgttggccaggatggtctcgatctcttgacctcgtgatccacccacctcggcctcccaaagtgctaggattataggcatgagccactgcgcctggccaacttctgtttttttttttttttttttttttttgagatggagtcttgctctgttgcccacgctggagtgcagtggcacgatctcagctcactgcaacctctgcctccggggttcgagtgattcttacaggcgtaagccactgcgcccagcctcatcttctttatggtgttacatttctgttgaaggtaaaacattttgtttggaatcaaattttcatttagtctcggggtaacttgcaattttaaataaggtagttggggaaagcctctgagaagtggatatttgaacagagttaaaggtgaaggcattagccacacagattctggggaagagtgtcccaggaaggaagccaaccgggtgtaaaccctaagtcaggtctgtactcatcacatggaggtcaatgtggctggagcagagtagtgtgaccagaggtgtaggccattgttaaagacactggaactggctctgagtgaggtgggaagctgttggagggttctgagcagagaagtgatattatcagattttgtgttttaaaagctctactacagagaacagcctgtatcgaagcaaagatggaagcttggaaacgagttaagaggctgtattaataaaccagcgagtagtggtgagtagtgggtggtgacttggaccaggctggtagcagtggtcagatgctagattcattttaaagatagaacccataggattgtttgacagattggctgtgaatattcaaagtgaagaaacctcatgagttcatgaagtagggagtaagtatacctagagaagagaagaaaatggacaagttatttataaaatgtatatggaaatgcagagggccaagaatagtcaagacaatcttgaagtagaagagcaaagaacaaaatactgggatgccgtatagatattagtagtggaataagttacttatatcaagattgattataaagctacagtaattacaacaacatggtattgggtcaaagatggacacatagatcaataaaaaacacagagtctagaaagtgacccatacatatataggcatttgtcttatcacaaaggtagcactacacagcattggggaaagatggctattcgcaattatgattgtatgccaattggatatccatcacttgcagaatcatagtcacctatctcagaccaaacacaaaaaataaattccagttggatcacagataaaaataaaacagtaaagcttctcaaagataatatagaaaacttcttcgtgactttttttttttttgagacagagtttcactctttcacccaggctggagtgcagtggtgcaatctcagctcactacaacctccgcctctcagtttcaagcaattctcctgcctcagcctcccaagtagctgggattacaggcgcccgccaccatgcccagctaatttttgtatttttagtagaggcggggtttcaccatgttggccaggctgatctcaaactcctgacctcgtgatctgcctgcctcagcctcccaaagtgctgggattacaggcgtgagccaccatgcctggccaattcttcacgactttaagataaccaaaaacaaccttaaacatgatacagaaaagcattaatcatgaaagaaaaggctgataatgacaaatgggaaaacactaaaattaagcacttctcttcatcaaagacaccattgagagtgaaaaaagaagccaaaatgggagaaaatcacatgtaaatgcaaaaaatggctcatattcaaaatatacaaagaaaaatggacaagatacttcacaccaaaaaaggggtggggtgcatgcaagtagccaagaaacataggaaaaggtgctctcacttcttttcctggagtggtggcaacattatgtaatgctggaccacatttctatcctctttttatatctttggggaaaaaactagagattcctgggcctttatttgtaccatcacacctttaggattgcataggaatcaagattgttcaaatttagcctaaaatgtgaatggttgtacatttaaagagaataaaaatgtattcttgaagatgagattactattttaagaaaagctcttctaccatttgcatcagataatattgggcacactcacactcatgcataacctctttattaagagttggatgcctcagccttgcagctaaaacctgtggaatggagaatgaggtcagaaaaataccactacaaacactaacarctcatattttaaaagaaatatcaccagggaaggagaacactgagacaattctgtacaaagaatgcctattttcttctaatgcttcaaaatctattttgacgtttttcccaaggatgtaacctaaaggtagaggctgccctgagtgtcacttattgattgtcataagaagattttcatgagatggcactgggatccaaggtaaccagcctgtgttcagcggggactggaagtgataaggatagaaaagcatctgtgtttagaatgctccaatgagcaatcagcactctcctgagatgaccctttactgttgctaggcactcatttctgtttctggagtgggtggcaacattatgtaatgctgtaccacatttccattctctttatatatctttggggaaagaattagagcttcctgagtttttattttgtgctattaaatctttagaattgaatagaaattgagattgttcaaatttggcctaaaaattgaatgatggtacatttaaagaaaaaaaaatctattcttgaacatgcaattaccatttaaagaaragcttttttaccataagcatcaaagaacattagacactcccctgcataagcagtagtttaggtgcttaatttacataattcacatcaagtatagggaactcctatacctctgttttatttatctattcccagaagtgcctaatgagaaactgattttcttttatggatatttctgattgtccttttttagaacaaagctgctgaaaatttaaagatcaggttttagggttttattttcagcaaaatgaacaaaaatgtaactgcgatgggccctcccattgaaaaaaaaaatgctagctaaaatatttatttaattacgctttctcaatgcaccagtcagggaagccattcagaccacgagtttttgtataaacaaaatgataatcaaatactacttgataacatggtcaaccaaaaactttagaaccaatgaatattgtataaagaatatactactgttacatgtaagttctcagaactggaaatgtttgatggtgatctcttgtaagagtcaaaataagtgccctttgagttttttttttttwaatgcaccattgagtttattaaaaagtacagcttactcagaggccagaggccaagaaaggtaaagagagaactaaagccacctttcacctaaggacatttcctgaaacctgataaccttgacattttggttttcatgttctcatggggcatgttgggcaaaaagcaacaccaaggactgacctagtgtaggtagtctaatagcataaagctagaaaccaaagaaataaagaactatgtctcatttattccatagaaggcagaggtgtggagtggggagagagataaagaaagaacagccaggtgtggtggctcatgcctgtaatcccaacactttcggaggccacggctggtggatgacttgagcccaggagttggagaccagcctggataacatagtgagaccccatctttacaaaaaatttgaaagttagctagccatggtggccctcgcctgtcatcctagttgttcaggaggctgaggcaggaggatcccttgagcccagattttgaggctgcaataagctgtgatgacaccactgtactccagtttgggtgacgttgtcgaagggaatagagagaaaagctgctgatctaagtaactttggaaatgattggaatcagtaagactgaactcaaaaagactcgtacatgatactactgtagttgataaagttgtataccatgaatgtgtatggttagcaattctgaaaccaccatatatgtttactggaattaaacagttaagtaaatgtttctcattgttggaatgttagggtacagataagaaaggggaggaagctagaatgatccacgtggggaagaggaaagatgaggagggaaggaggcattccagctaagaatcataacccaggattgaagttgaaatacaagaggcatattgaggaaaccatgctggaacagatggtttatatagggcagtgcttttcaaattatgttctgatgcactcccacagaggctggccagcaaggggtgaggaggcctgctagtgaagtctttaagtgagkcagtgctgcaggtgtattagaaagatttatctgacagtggacacagaggaatgtgttgggaagctgttcagtaaatccgatgagatggcrtgagcccaaatgtgttattggccacgagtttgaaaataaaacaagaggatggatgcatgtattctcaccaagggagaaccaccaggactgggttacagatgggagaaatattataccatgggaaggaggtatcaaagccccatccagtgatagaagtgaagaatctcatgttggatgtaaatctgatggtactagattgtttgggaatatggaagttaatactttgattgtatccaarttctaaagggaattacaaagtgaattacaataattagcttgaatatatmaaatataactagatggcttactatgggattatatctagtgtcagcagtgtggatgaacacacagcagacctgggaattcttatttacagctcagttcttaaggttaattttcttagaagtctctaaatttctgagtttaggtaggggtggggataagttaaattgaaaagccccaagtactaaaaatcccatatccagagtctaggagttggcacttctggtaaggtagcattcacagggtagtattgttaaggatggcagagatttggtaaggatggaatccccaacagaggaagagttggcattcctccttgggcccaataagccacaaacctagagctccaggttaaggaaggataaggatgtcaaggctaaggacctcaggtagtatctactatcctctccatcaaaagaaaataaataagctataaatgaactaaaaatatatagagatacaggtatttgcttgctttcaatgtaggaaagtcttaatgcaaagttatttaatacaagggttcacagatatacaatatatacacttcagcaaaattcataaaatcaaaaggtaacaataatctataaaaataacaacatataaaacagacaattaacatataaaactaacactagaatcaacaacactccagtagtacaagaatagctagtgtccagatcttggtttcaaataccattttccaataaaaggaataaaggctccttagagacatgttgattctaggaatgggcaggaaatatacatgatgagcctgcagcatcttgtagtgccagaaagtaaagaaagtgctcaaacaaaaacaatgtaggtatgtcgtagggacacaggacattgagaaagatcccagtgacccaaggagatctggaacaatttaagcagcaaaataaagtagtattggattataccatccaaagcataaaataaatatcatgagtccatactcatataaataaatgaatacaggagaataggtaaatctctcctggagaagaatccatataatttatgtagatactctgccctcaaggaaatggagcatcactccccactccttaaggctgtacatagtgactttctgccaaaaaacgtggtatgtaaatctggggaggggcgccagtaactttacctaacatatactacctcagccacatcatctttgtgatattactcccaaaaacccatgacctgagtctaatcttgagaaaaatttcagacaaatgtccctaattgagggacattctaaaaaatacttaagtagcactcctcaaaactatcaaggctatcaaaactcaggcttgagaaacttagtgaggagcttgggaaaacatgatgagtaaacatgatatggtaaatggatgggatcccagatgggatcctggaaaagaaatgagaccttaggaaaaaccaggaaaatttgaataaagtatggacttcaattaataacgatatattattattagtttcttaattgtggcaaatgtgtcataccaatgtaaaattttaagaataagagaaatcagttgtggagtttatgggaactatctgtactatcttcacactttttctgcaaaactgttctaaaattaaaattttattttaaaagagtaagtggccaacattatggcatttctgtcttaattattatatctcctaaataaggcattatcttatatagtcacaagacaaatatcacttaagaaatacagcactggggccgggcacagtggctcacgcctgtaatcccagcactttgggaggccgaggcaggtggatcacgaggtcaggagatcaagaccatcctggctaacacggtgaaaccctgtctttactaaaaatacaaaaaaaaaaaaattagctgggtgtggtggcacatacctgtagttccagctactcgggaggctgaagcaggagaatggcatgaattcaggaggcggagcctgcagtgagccgagattttgcccctgcactccagcctggaccacagagcaagactccgtctcaaaaaaaaaagaaagaaatataacattgatgaactattaatacctaaagtagttcatatccaaaatacccaagttgcccaagtagtgccttatgtagctacctggttattgtttttaatacagaatccaatcaaatagcattgcatcttattgtcatttctcttttttctccctagcagaacagtgccctcatgatgaggaattttaacaccccttcttttcagttgatagatggactgcccttcatttaatcacttgtatatgtttctttagggaggaaaaaagtagtaaagttaggattggtggagattataccatttctcaagtaggatcatcccagactgcctttgagtgacgtttcattagacacagggggcttgctagtgccaagcagccagtctgctggttttgtgctgtaattactgatgtcagaattaaattaggtggtagtgtagttcttgtggcacatgtttgtttctttttctgtcaggttgtcccagatagaaataaagttcccacctctctgattttcttgtagtaagaaagtacttagacattgtctttgtcagttgaccatctcaagagaacatggagaatactcacaaatgcttttacaatgacttaatttttatgttctggttgttacttctgtaatgtaacttctgttattgttcacttactttacaaaataagaagaccaaacctttttttaaagccccgttaatgaaagacagtaaacaggcagtgtggctctgagaggagggagagctcacaacatgaagagcgagattgttctagctacagggagtggcatgggaaaaaattactgtgttggagatgctggaggtattagagtgatttgaataaatggaatgaaggaagtggtttaagaaatatgaaaatagaatgttttggtttccaaatcatcacaaatttaattttcattaaaaagcgatagcaagttcactgatgtatccctagtgatagaaaaacacagtgccttgacatgtagtatgccgtcagtgatacctgttattgtttaatggagacttaaaagattgtttgaaagcaaaatattaaattaacctggtgaagcgttttcatgctcattggtgaagtgcctgtaggtgactgtagcttagactgtacattaggtatgaatgttctatgggagggcttggccagaattttatatctgagttcagtttagagaagttcactttgtggtcatgtgatactgaatgaattgcacagaatagggtagaatttgtgtttatggctttccttactcatcctcctttaatttgtagagacggatgtatttcaggagaggaaattttttgcaatgttttcacaattgtttgtacatgttttttcttcaccagaagctttttaaaacttagattggccgggggcggtggctcacgcctatttgtaatcccagcactttgggaggccgaggcggttggatcacaaggtcaggagatcgagaccatcctggctaacacggtaaaaccacgtctctactaaaaatacaaaaaattagctgggcgtggtggcaggcgcctgtagtcccagctactcaggaggctgaggcaggagaatggcgtgaacccgggaggcggagcttgcagtgagtggagatcgcrccactgccctccagcctgggtgacagagcaagactccgtctcaaaaaaaaaaaaaaaccttagattgcaattgaactttcacgttatctttaagtcagtgggcctaatggtaagttcaaattttacacatcctgtgcttaaggggctaaataaagtaaacaactcctctgagtcaagagttactcaggaatcaggaattggtcagatcatgagtaatcatttgataggaattaaagggtgtgatgattgttgattaaagacatgcatattcctttatgtagacttagtatacaatcagaaaatgggtctcagatattttttttatatgacagtagtatgcctgtggaattacaattgtttagagaacttcggaatattgacatcatcgaactgttaatattggggatctgctatgagctatacattgtatgaaatacaggttttctttgggggasagttttttggtatagaggaaagagcacaggtcttcaaattagaagttctatgttttggctttaacacttgctatgtgcttaattcataagatcattaatctctctaagccttacttttatcatctgtagaactagaacaatagcacctacctcgcctatgaattttctgtgtgtaatgacaatcaggatggaaaaattgcagctggaaaactgtggagtgctgtagattgtagggaccattgtcttctttcagccctatgagccattctgtggtactctacccacaggatgctgagttactggagtgcttcaagggtttgtagcccttgattctacagtgtactctgttccaagttcagcattcttctaaacatttttttgttggggtctaccacatggtaggcccttgtggttgtagtggggcgtggctagtgggsagagagtgaggagatgaggaagtttgagtctgagttgctgtagcttgattttttttcccctctagtttcatctttacctttccttttagaatagaaattataggctctggagtaaaattagaaatgtagctccaatttagctaagtttagctctaacatgaaaattccaagtttcatagcttttgatgagtattatgaaaaacataaagtctttcaaaggaatttccactgtctttttctctccttcatggttttaaacrtggggacctttggttatagaattcaggatttggkgctgttgttgtttttttccccatgggtttgactctttctccttgtatggaattttcatatttttctttaaggtttagtcacttaaccattgttttactaaatgggaattctctactgacagagatttttagcaacaaatgtatttttcttaaaatttgtgtaagacaaaaattacatattattttggcagtgatcatgcatgacctttgctacctgatggctgccrtggcagaaaaactcatgtaggaagtttatcacagggagaatatacacaggtaccttggttatcagtagactttgcactacttgtaaccatttagtctactctttgtaactctctcttcttttatcatgatgtcttacatttatttttgcatctaagtgaaggatasagcgtggcaaaagtccagataacctataatgacttycacattactttaaaaaatccagttaaccaacgtactgtactgacaacatattscttaatcataatcagttttaatccaacaccaaactaagcataatattgtcacacattggtttgttgaagatgcagaatttagaaattcagatccttgagccctactgccaaaaatcctccttcccagttgattattttacatagacaggtttgggagctactgaaccatttgtaaggggcacttttcaaataattgtcaagggtttaaaattcatcagaggattctacaatcagtgaaaataagttgtcttaggaacctgttaactgcatttatctctttatttatgaagttcctaagaaacatttcctctgggggaaaaatgctaccttgaaaaaaaaccagaaaaccattcttataaactatttctgggattcctcattgagattaagattctgattttattttattatttatttatttatttgagacagagtcgctctgtcacccactgcaacagagctcactgcaacctccgcttcccaggtttaagcgattctcctgcctcagcctcccaagtagctgggattacaggcgcgggccaccatgcccgactaatttttttttttgtatctttagtagagacagggtttcaccatgttggtcaggctggtctcgaactcctgacctcaaatgatccgcccaccttggcctcccaaagtgctgggattacaggcgtgagccaccatgcctggcctatgattctattttttaaattcattacagtctatattaatattagagaactaatactcaaacagaatttgagtgaactattataaatgacagaaaaatttgccctctctcttaattttacatgaaatcatttttaaaattggtggggtttttgttttgttttgttttgttttgttttgttttctgtttgcttgtttttttttttgttgttttgtttttttttttttttttttgagacggagtctcgctctgtcgcccaggctggagtgcagtggcgggatctcggctcactgcaagctccgcctcccgggttcacgccattctcctgcctcagcctcccaagtagctgggactacaggcgcccgccactacgcccggctaattttttgtatttttagtagagacggggtttcaccgttttagccgggatggtctcgatctcctgacctcgtgatccgcccgcctcggcctcccaaagtgctgggattacaggcgtgagccaccgcgcccggcctttgcttgttttttgatcccagggtcaagccaggaaacttggttgttataatgggctgcctttttgatttcactaaattctgtgaattctccctatgtatagtgttccattgtcctcccaataaaaacatactatagtttcccttggctaaaacccatgtaggcagtggtgtgccggtaatgcttgacaactgagggaaagaggactgattcatacaatttgctaatttctgtgatgtaaagtactgcctacaatagcctagttcaagctcgcagcgtgacctcactgaatgtggagctggaaagaaatgcacacagcacacttagtatttctagtatttccaccatacasatagaatagawgtatataacttgaagagcatagtaaaatgtaaaataattaggaataaatataattagaaaataatgagtttttgactatttccctttgtctttaataaatgttatatgtataacttatcttactgtttggataccaaataaactgtttccatgcttatctttgggaaatgccactgtttcaaaatgggaggtttttgcttagcgttttcttccttattctattgtttaaattaattacctacgttaaatttatcaacaacaaagaagaagctctccaggtgattttgacgtgttgcagggttggggaccagtcttttcttggtttgcctggcaccttagagctgcattttgtgcttaattacactgactactacattttaactgtttatgctctgttatgttctttcaaatgatttgagaattttttttccaaattgatatgttaaattataaagaaaaataacagaattgagactagaaaatagcaatcaaagaaaataaaaatttggtgagtacaaatataaatatgccagttctgaggaccacaagtgttgatatagtagaacaacagatttgattctgagtttcctggcaacccatggagggaagcaaggaataatataattcttttcagatggaaggaaggcatcaatttctcaaagaaagctaagcattgcattgtactgaatttcagagtaaatctctcatatgaaatttcatatgtagggatactgactaataaaatagtgccgtatttctctacttcttatggattttatagagcagattattataatatacttcaaaaaaatcaagaatgtagtatgactttccccccaaaggagacaggtgtaataatttaggaatataacctagtaatcaagttagaataacatcacctagaggaataaagatttacaacaatgttggcaaaagatgacagataggtttacctagctcctgtccttggttagcgtgaggttatggtgctgtgttgacaagaattctgagaccagggtcagcagaaacaaatgtagggaatgcctagcaatctctgacttgatcacaagaaggaggagtagcacagttacctctgcatctttgccatccttacttcacatcttatgtaaatttcatgggttttagatggtatctctagtataaactggattactaatggagtttatactcttcgataagaggctggaggccaggcacagtggttcacacctgcaatcccagcactttgggaggccgaggcagacagattgcttgagaccaggagtttgagcccagcctggccaacatggcaagacccccctctctacaaaaaaatacaaaaattagccaggcatggtggcacttgaacccaggaggcggaggttgcagtgagccaagatcatgccactgcgttccagcctgggcaacagagcaagactctgtgtcaaaaaaaataaaaaatagttttaaaaaagaggctggagtgttgtattttgtattgatttttgagagtgtatatagtgtgtgtgtgtgtgaattgtgactaatttattctaatgagcttgggacatgtcttccatcattccaatttttgatcctctagtttattttgtttgtttaatattagctatcctattttagtttacctctagtctcattgagttgtttttagtcccttagtctaatagtacactgtaattaatttttttkttgttgtttagaagcatgattctgaaagccatgaaataaggggaatttggctaactaattcttgcataagtgtggtcatattacatttaagtaatatgtagattatcagcaataaattatttgttatatttatttttaacaagctacaatttaaattattttgtcatattagagagggaatttgtaatctaaagaaaatttcaggggaaagtatagctagttcagaaattaattattaacactactaactatgatatttatggatttttctccattttagtagtgatttatacactgcataattgttctaatccataccttattaccttagaaatacaattcatttttcaaacagaatgtctgttagctactcttttactttacttaattcatctgttgacttttttcttatttttttaaatagtcctgaaatggatattttcatacattcttggtagtaatatgtataggtgttacccttctaaagagcacgttggcagaggaccttcaaaattgacccagttatttcacttctaggaaaatatcattaggaartagagattttaagtgtgaattctggagtaagagtgcctggctttgaatgcagccgacagacttacaaattatatgaccttgggttagtttcttacctttttaagcctcagtctttgcatctgtaaaattggttttaaaataacacccatctctagttgttgttgtgaaaatcaagtgatataagtaaagtgcttaacattgtggctcttatgaaatgtcaataaataattgctgttgttaataatcatagaaagattgttcgtagcattagttaaaatagaaaacaggtaggaaaggatttgaatgattttcatttatataagggaatactataccatgtagttgttaaataatatttttaaagaatatttaaagacataagaaaatgctgataatgtagcattgagtgaaacagaaggataaaaatctctatatgctctaaggtgttaattatgttttaaattatcttctaatgatgttataaaatattgtttttaaaatgttaattatgtttacaagtaatgattcttaaaaatatagaaaaaatctggaaaagggggctcactgttaataattcttaaaactaggtaataggtaatggagatttattatattcatactattctatttctacatatttttgtttttcataatactttttaaaaagaatgacaagaagaatagwttaaaaacagattaaatccttgatattagtgctttgtaacctgtttaaatgtaaattaactcttgaccagttttgttattaaaccattatttatactttttaatggtttcttaaagcatttgagagatgtatatcagacttgtttggttaaggatgaattgtgtctgaatatctgtctagaaaatagctgttttaagtattttccgtatctgaaaatgatatgaggaccatctcccactactgcattcccataagtggttttatttttcatcttttaaaatggtgcagatttttcaacatagccagcgttcgtacatttccaaagtcaactttacattagtcggggtgaacagtatcttattttgacaaaatttcccctctttagacggaaatgaggcaaagaggaaaggtgtaactatttcttcttgtctctataactgaaacaatattcaatgtaagtgaattttacttgtagcaaatattccctttataagccctccatttatcttgtaggtggccctgtaaaatatactttatttgattttacacactgtgctcatgctttggctttatgcccaacctcccaggctgcagacatctacagtagaccccagtgttaaagaaaacaagcccctcaaaaccctagaaaatattacagttattaataataaattctcagtaatattcacattggagcagtaataaattatattaatagtagcartccttaaaaatggtcccactcttcactaaaacattcaatcttacccatgttccaaatgaaatgattattgttttctactttctactcttacaagaaagaggtgttaagggtattctgtttatttgtttgacttattctctttaatacagaagttaaaaaataaaggcaaagcacatatatgtatagtatcaactagcaccaaatccttcgtatgtgagagaaaatgatctgctttggaagccagttacatacatttaagaaatatgtcaagcaatctaaaatgaatatgttaaatggaaaatgactagtcctgacaaattcttctaaaatgcaaaatagcggtaatttagaagtttatggaggaagggtagatcttgaagaaaaatatgtgttttaattaaggaagaaaataaagaccgggaagaaagaagaggaagaaagatagggagggaggcaatccaggcatgaagcagacgctcctggattgaagtagaaatacaagaggcatattgaggawaccatgttggaacagatggtttatataaggcagtgcttttcaaattatgttctgatgccacccccagaggggctagccagcaaggggtgaagaggcccgctagtgaagtctttaagtgaggcagtgctgcaggtatattagaaaaactgatctgacagtgggcacagaggaatgtgttgggaagctattcagtaagtccgatgagatggcatgagcycagatgtattactggccacgagtttgaaaataaaacaagagaatggatgcatgtactctcaccaagggagaaccaccaggagtaggttacagatgggaagaatgttgtactgggggaaggaggtatcaaagccccatcagtgaaagaagtgaagaatcccacattgaatgtaaatctgatgatactagattgtatgagaatacagaagataatactttgattgtatccaagttctaaagggaaatataaagtgaattaaaataattagcttgaatatgtaaaacataactttgggattatatctagtgtcagcggtgtggatgaacacacagcagatctgggaattgtgttcttgtttacactctagttagtttttccttagatgtctctaaactgaaaagctcctgtgcggtggaggagtggtgggggtgctaagttaaattgaaaagccccaagctttgtggcacagctaaaaatcctgtatccagagcctgggggttggcagttcagtgaagtcgctttcacaggtaatattgttaaataaggcagagttttttttttttttttttagagacggagtcttactctgtcgcccaggctggagtgccagtggcacgatctcggctcattgcagcctccacctcccaggttccagcgattctcctacctcagcctcctgggtagctgggattacaggcatgcatcaccatgcctgctaatttttgtatttttagtagagacagggtttccccacgttggccaagctggtctcgaactcctgacctcaggtaatccatccccctcaacctcccaaggtgctaggattacaggcatgagccactgctcctagccttaaggcagagattgttaatgatgtggcttctagttggtaagtataaaatccccagcaagagaakcgtattcttcctgtgacttgttgacataagccccaaaccaatggataaggaagccaccaggcatgtactgccctctgcagcaatcaatcaattggtaaacaaactaactataaatgaactaaaaatatggagagatgtaaatatttgctccagtgtaagaaagacttatgtaaatgcaaacacttatttactctaaaggttcacaaatatatatgtgttatgggctgaattctgtctccccaaacttcatatattgaagtcctaaccccctgcgcatcagaatgtgactacgtttggagttaagttatttaaaggtgtgattaagttcaagtacggtctttagagagggccttaatccagtatgattggcttccttctaagaagagattaggccacacacacaaactgaggggccattatgtgaggacacagctagaaggctacaagccaaggaaagaggcctcagaagacaccaaatctgccaacgttttggtcttgggcttctagcctccaggactgtgagaaagcaaatttctgtagttgaagccacccagtctgtggtattttgtcagggtagccctagcaaactaatacagtatgcatgcatttctgtaaaatttgtaaattaaaacaaaagataataacctacaaaaatattgattaacatataaaatagacaaggaaggacctagaatcaacaacattccagtagcaatgagcacacttagctcccagatcttggcttcaaatactgttctccaataaaaggaactggggctccttggagaaatagctgattctaggaatggggcaggagatacagtagtccccctttatcagaggggaatatgttccaagattcctggtggatgcctgaaaccacrgataacaccaaagcctatatatactatatttttttaatctgataaccaaaacagctgctaagaataagcgactacagggcaggtaatgtgtacagcatggatacactgaacaaagggatgatttgttatttgtagagaataactccccactcaagcatgggctgtgcatggtgacttctttccaaataatatagtactaaaaagtggacaaaaaagagtaacagcaaaatctgacaaagtcctacttcagcatggtggtcaagattaacagcagtgataagtcacgttgatagactgtgtccttgatataatgtgataagaattgcatttgacctctgtggttttcctcccgaaaacccatatctcactctaatcatgattagagtgaatagagaagcatcgtacaacatacttaaccagcactcctgaaaactgtcaaggtgataaaaaacaaagtctgagaaatttacagccaaaaaagctaagagagtagctgagtgtaatgtgctatcctagaatagagaaaggagactaggtaaaaackaaggaaacctaaataaagtataaagtttaattgataaacaaaaatcarcactggtacattaattgtaataagtgtaccatgccaatataagatgttaataataggggaaactgggtatgtagtatatgggaactatctgtactatctttccaacttttctgtaaaatattctcaaaaaatggccattkaaaacaacagaaaacaaatagacaaagttatcgtatactcatcaaaaggccagtaagcacttgaaaaaatttcaaatttgctggtattcagaaacacacattaggccagatgctgtggcttgtgcctgtaatcccagcactttgggaggctgaggcaggcagattgcttgaggtcaggagttcgagaccagcctgggcaacatggcgaaatcccatctctactaaaaatacaaaaattggcgagacatggtagcacatgcctgtaatcccaggtactcaggaggctgaggcatgagaatcgcttgaacctgggagacggaggctgcagtgagccgatgtcacaccactgcactccagtctgggcgacggcgagaccctgtctcagaaaaaaaaaaagaaatgcgcattaaaatagctataaggttattgtttttcttctgtttagcttgcaatttttttttttcctaacgatgatacctatgatcagcaatgtataggaatgtaaaatggatcagcctttctggagggcattttggttaatagataaaaatgtgtgtaccccttgaagcagcaacatcacaaccaagaagtgaacatcagtgatgacaaagtttttcacagtgttgtgtagaatagtaaaacctcagaaattaatcaaaaggttgtaagcatggaattgtttacataaagtaaaggaacgtcaatgtgtgatgcaatgcagacattgagaataatactggcagggcatggtggctcatgcctataatcccagcactttgggaggccaaggcaggtggatcacttgaggtaaggagtttgagaccagcctggccaacatggcgaaccctgtctctactaaaaatacaaaaaaaattagccgggcatagtggcacacacctgtaatcccagctactcaggagcctgaggcaggagaattgcttgtccccaggagacagaggctgcagtgagctgagatcgcaccactacactctggccttggtggcagagcaacactccatgtcaatcaattggtcaatcaataaataaaaatactgtaggataacatttgaggacaaaaaacttctgtgccatattatgtgaaaatatccattgtaaactgtgtatactrtgtcgtgagatttctgtgtctatcttttcattattcatttgtacatatgtcttggacctgggatttggtgatctttacaaatggcattagattaagtcctattcgtgatttaaagtcaatttgtaaatgcttaaagttattttaatgcatattatagttaatgtatcaagaattgccttacaactctgtcataattagaacccagtgattctaactagtggagtgaaggaccaagttttcattaccacaaattgtgtacgtgtatgtttatgtcttaggtatactacacgtggataaatagtgggatttgtgtgcaataagatattgcctgtgattatctctgactggcagrgttggagcaatttttattttattattggtgatttcctacattttctaaatgttgttcaaggaaccacagaatattttttgcaatgagataaaaagttttagaagtcaattttttcaaaaaataaagtttttattttcatgaaactgctatctaaatatttaaatcatcttttttttttttttttgagacagagtcttgctctgtcacccaggctggagtgcagtggcacgatcttggctcactgcaagctccgtccccygggttcacgccattctcctgcctcagcctccccagcagctgggactacaggcacacccgccacgcccggctaatttttttgtatttttagtagagatggggtttcactgtgttagcctggatggtcttgatctcctgacctcgtgatccacctgcctcgacctcccaaagtgctgggattacaggcgtgagccactgcgcctggctaaattatctttttattaaaaatatatttttactttttctgagcggatttaatttacacacaaatttacagttatttgtttattaggttaaatttttatgagctgtttaaamcattgttgtgtttgaacagtattctcattttttttacttttaggctggtgtttggaatgctttatcctgcatattattcatacaaagctgtgaaaacaaaaaacgtgaaggaatatgtaagtatagttttatgagtgattaatctgagtttaatattttaatgatacacactgaaaaactgctattctcttagaaacggctggagtagtgttttgggttaaaaggtgttatgaatgtgaagtaacaaaactaatcttttttaaaatctttgaagataaccccaaagtggagtttcaataaaaataagtgtatggttcccaagatgagtaattgaataggtcttgatttagtctataaattccagtgtaataaggggttggagaacttttgtttgtttgacttggggaggggagttgtggggctttttgccttataaatttataggtacattgagaatatctctctggcctcaaagcttttttcctcttctgtaggtgtttcatcactttctaatctatataaatatgcagatactccatcaccactgacaactgcagtcttttttccttcttgaatcagactccatttgtaattattttgctttgatttgcgatgagtcctcaatatttctttgtttttagtttcctcttccctattccctaattttctttttctgtcactaacatttattttttaggatttctgaagttctcctcatttctcattttattcatactgtgtaatagtaaatggccttccccacctataaatcctgatatagtttagtatatgtgatggagtgaatttttagagaatagcaaaagcatattgtattggtggtgttaatcaacaggataagcagtcaatactgagataacagcacatcaataactatgcctcttttttttaaattgaggtgacattcacataacataaaattatccatttcagaggcatttgatgcattcacaatattatacatatatataatacaatataatacaactctttctagttccaaaatattttygtcaccccaaataaaaccctgtgcccaagttgctgacaaccaccaacctgctgtctgtatgtatttacctatcctggatatttcatataaatagaatcatataatatgtgaccttttgtgtctggctcctttcactcagcataatgtttttaaggttcatacgtatcttagtatgtatttcattttgaatgtgttacattcctttttatggctgagtaacattctactgtatggatatatgacattttgcttatccattcatctgttgacagacatatgaattgttctgtcttttggctattatgaatagtactgctacaaacattcacatacaaggatttgtttgagcacctgcgtttgattctttgggatatatagctgtggttctttgtaaggaatcttggatgatagtcttgtcatccaattggtcaaatgaacagagattagatcattattctttatattttcagggtttttggggggtgggaggaagggacagactctgaaacttttataactaactcattttattaaacttttacggtcatttttttctcttgtatataaaactaacttctgaagtgaagtatatattaatataagtcaaaatggtggaatacatctggcagaggtaaataagttacatagttgggctctcaaatttttctatccttttattatatgtgtcttttggacctaggattggtgaaattaatcttaagagatggaaccatattaagtcctggtaatttaaattcattttatacatggcttgaaggttcatattctaatataagttggagtaaatactttgcgtattgttttatagtgctggcatacattagtttctagatgccagcgtgtctgttaacagtgcttctcaagctgcctgtggtacaggaccacttttgtttttcgagtaagtcatagactaatccttgtttgtttttttttttttttgagacrgagtcttgctctgtcacccaggccggagtgcactggcgcgatcttggctcactggaagctctacctcccgggttcacgccattctcctgcctcagcctcccaagtagctgggactacaggcgcccgccaccacgccctgctaatttttttgtatttttaatacagatggggtttcaccgtattagccaggacggtctcgatctcccaacctcgtgatccacccgcctcggcctcccaaagtgctgggattacaggcgtgagccactgtgccctgccgactaatacttttataaaatgaaatactaatcactagaaataaagaaatgaaaaaagcccctaaacctgaaatacaacccagaattttttttttttttttttttttgagacagggtcttrctgttatcacccaagctggagtgcagtggcaccatcatagttcactgtagcctggacctcatgggctcaagygatcctcctacctcagccttstcagtagctgggactacagccgtgcaccaccatgcccagctaattttttttttattattttttatagagacagagtcttactatgttgtccaggttgatcttggactcctggcctcaggttatccacctacttcagcctctcaaagtactgggattataggcatgagccacagtgcccaactcccaaattttttattgcwatattcagtaacatgaaattactgtcaaataatgtacttttgcctattgttttcattattgtattattaatatacttacagtaacacagtagtgcttttacagccttgtacaattccatagacaacactctgccctactgtgtaatattttaattggaattctcttttgaaagataaaattaagagttggccatcatttccaaacaccatgaaaatatgagttgaagaatctgcttctggccagtgcttaataaatgggaaccatttccctatttggaatgttttttatattgttattaaattagatctttttttgagtctaattcaatgtacagttgaagtacagggtattatgtctctcaacattgggcccatttcacctagaaagcattcaagaagcccgggatatataataatttggtgtgctgctgtgtgtgtgtgtgcattgtatatatatttgtgcttacggtattctccaatcttttctcccaaatctgcttttttttttttaggaaaagaaagctaagtacaaattttaaatgtttagatgagaagctctaataacttgagaatattatcagtaagcacagaaataccatccytaaaataaacgtcaaaggtaaagggatagcataagaaatataaaaatagttaataaactgtaataaaaaataggcttggccacgtgcagtggctcacaactgtaatctcaacactttgggaggccaaggcaggtggatcacttgaggccaggagtttgagaccagcctggccaacatggtgaaaccccgtctctacaaaaaatataaaaattagccgggtatggtggcatatgcctgtagtcctagctactggaaaggctgaggtgggagaatcacctgcgcctgggagtcgagactacagtgagacatgatcccgccactgcactccaacctggacaacagaatgaaaccctgtctcaaaaaaaatactaacaataataataaaataaaaatcagaaagattaatgcatttataaatgatgtgcatcaattcaattttgttaatattaatttttagagacttaaaaacaacaacaaaaaaagacttaaaaaaaagaatttgtgtgttttattacccctgatacaacactcagattttcattactagattaaaaattggggattgataaggatggtctaaccctgaaatttttattcaactttataaagataattgcttcttggcattttggctaagatcaagtgtgaagataatttaggctatggaagataatccatcagcattcaaactgatgagaaaactataaacatgatatgtattgagatatatgtatatgtgtgtatttagttacatagtgagcatacatacagctttgcacagttgttttcagagaatactcattaataaagctggaattatctgtacataattttgcagtaataccatgtctcwggaaagcatttcyttttatttaactttgattgtaagtttagggtttgtgcaggtttgttaggtaaatttgtgtcatgggggtgtgtggtacagactctttcatcacccaggtattaagcctagtacccggaaaaaagattttcttaaccatccatttgagaagaccagaataatgagtaattgaggagaaattagggaaggtaaaaggcaggtggctggagctggtttgataattacatggtaatcaactctacttcacaaataaaatgagaactaaaagcaaaataaatggccaggcactgaaataaggacaaggcatctgcctttgacagggaaatgtgtcatctctgaagaccctcccagcaaccatattgccttccatcaaggctgctagagaggcctggtgcagtggctcacacctgtaatcccagcactttgggaggctgaagcaggcygatctcttgagcccaggagtttgacaccaacctgggcaacatggtaaaaccccatctctacaaaaaacacaaaaattagcagggcatggtggtgtgtgcctgtagttccagccactcaggaggctgaggtgggaggatcacctgagcctgggaggtcgaggctgcagtaagtcctgattgcaccactgcactccagcctggatgacagacagagtgagaccatcgggtggggtagtgggatcagggggaggctgctagagagactaagttgagatgtcaccttggaatagtaatattttccatttatatgatttcctacgagtttcaaagtacttttgtttattattgttttaatttgctaccctggataattttttgaaacaaattatcacactcttattggcttagaacaacgtaaatttattctcttacagtcctagaggtcagaaacctaaaatgagttcacaggcctcaccccttctggagggtttaggggaaagtctgtttccctgtctactccagcttctacaggctgcccgcattccttggtttatggctttattcttccatcctcaaacccagcaatgttgggctgagacctcttcatgctgccatctctctggttctctctcttctgcctcctcttccacttataaggactcttgtgattacattgggcccacctgattaatccaggataaacttcccatttcaaggtcagctgattagcaaccctaatttcatctgcaaccttatttctcctttacggtgtaacctaacatactcagtttccagagattaagacacagacatctttaggggagagagggcatttttctgcctactccaataatatctcasttgttctaactgcagtcttatgaagtaggcatagaaaatattccagtattacaggcttagagaagtgaatttacctggagtcacatggattgtaaagacagaattggtaccagatcagagatcttctgtttctagtattttattcattctattctaccatgctacctttagaaacacaggtgaagattctagcttcacgtaaaagttgaaacagccttcacaaccagccagtgaatatgcatctgattaattcaaagctggacgttcgggggccacggccatatagatattttccaagaaggacaatcaggcagcttaccagggcgggacccaccagcattgaaatcrcatgtgaacaaagaggttcaaaatgaaatagaaggttttgaaaattctgtaaagttcctcctttaaaaaaaaataaaatcccttaaatcttgacaatcttctaagtatttccaatctaatttcactctgacaaaaattttgaacattatttgcttgcacccagtgcaaggctaagtcctaaacttagccatctaatttaaaccgactttttttttttaattatactttaagttctcggatacatgtgcggaacgtgtaggtttgttacatagatatacatgtgtgacatggtggtttgcacccatcaacctgtcacctaggttttaagccccgcatgcattaggtatttgtcctaatgctctccctctccttgcccctgaccctccaacaggccccagtatgtgatgttcccctccctgtgtccacgtgttctcattgttaaactgactgttaacagttttatcagaactctgtcctcataaagttttcctatacagtaatcctatccaaattttctttgttttatacatggtattttcttagtaaaattaacctttttatattgccctgttatgtttttaatagcaccttatagtatctgatgttatattctttatttgaatatgtttatgttccccaccagaataagctccatggggaatgttttgttgttttattaattgctatattcctgtacctagaacagtacctgctgcataataggtactcaatatttcttgaataaataaatgagaaaagttgacttttaagtaaatatcaaatattgtgcttaatagcttgtacatttcttaagtggattgatctagtttaccagctttgattctgctgggttagggagaatacagtccagtcttaacatttatcccaaaacccagtttctttgtggtatttggttatgacctaaatttcactgctatctacttcaaaattattttcagaaagcaaacattttcggttaatttacttcttcccacccccaactactaccattccccttaagcctgcaaatggtagattgcacctgataaaacagatgctgtgctcaaatcaaaacaaatggaaagtactgtgtattttggcaaccttcctttcttcctttgcctatttttaaaacagagctttcctaggatataatttcctgcatagtgtggctgatatggcctacttaaagactttcagtcttgcagtaattgaaatgtaaacttactgaagaattagtatggttttgcaaattttttcaggctcattccatctcatgacttgaaaatagagtgtttacttccaagtcgtgtgtaattgctgtagcttttctaggaaaccagtgttcttattctaagaatgttggagaaagcagcaatgaaaagattggctaacagcacttacaaatcaaaatcagacatttggttctgagatttactgtgagcaagaacaaagaacaggaaaagctgggagattactctctaaaaggcctagaaatggccctctaaaagtctgctgacttggtttttgaaagtgacctaattttcgactgactatttaggtgatatgaaaatgaacaaatataccacatgccagttctacagatcttattgataatgaaatctgaagttgtctgctaactttagagtggaaatagaaggggaaaaacatactaaagaacttttctttgttctcaagaagtgtttcctaggtatcttttgataattttgataaaaagtattcatttcatttaaaggttttaataatttagaaagtttaaagattagcstactgattatgatgggatttttactgaaaattagttttgtcaggctgcttgcttgtctgtgtattttctattctaatttagtttttatttttatcaaagctgtatttacttataatgtaaaaagtcaattagttttccaaggcttattatggaaaacagtagttccccaggctcccatccctatgtctaactctctagaggcaactagttcaaactcttttatctgaatcttttagcatttattgccatattccaaataacatacttattgtgctatttcttaatttttcagatggacgtcatgagttaacttccttctacgaaagatgatttagcagttacccaatgccactatacacttgcatatttctctgttcttatagcttcccagaatcattgcagtataatttgtttagctcaatattcaatatttatattatttagacaaaattagaagcaatagaatatagaggtaaagtgcacaatgtctggaaacaggcttcctaggtttcatcctagccctacccattactagctctacctttggacaagttatttaacctttctgtgcctcagttttctaatcagtaagtagtagtaaataatgaacatattatttaattatatgaatgcacataaagcatttaaatcagtaccttaaacataacagtacctgtcatataatcattttcattatgtaaacactattcacagctgatctccacagtatcctgccattaccattctttactctggtgttattcactatcttgttgtttcatttgtgtggtgttctctgtgttcttactctgtatccagacccaaactttcctagagttgtgtgcatttcttctcagtgatggttcttgttttggattctctgatttcttaattacttaatttcttcattttgataaaatgcatccttcctgagaaggctataatgagaggtcaatttcttttttttttttttttttttttttttttgagacagagtctcgctctgtcgcccaggctggagtgcagtggcacgacttggctcacggcaacctctgcctcccggattcaagcaattctcctgcctcagtctcccaagtagctgagattataggcatgcgccaccatgcctggctaattttgtatttttagaagagatggggtttcaccatattggccaagctggtctcgaactcctgacctcatgatctgcctgccacggcctcccaaagtgctgagataacaggcattagccaccgcacccagaccccaagaggtcagtttcttgagatgctaggttggaaatcattttctttcagaattttgagagcaattcttcattgtctttaacttctggtgttgctgttgagaaggctgaagccattatgattcttacctgtttttctccccattcaggaagcttgtgggatattttctattttcctgttgttttaaaatttcatgatgatgtactttgttgcgtgagtccgttatagtcaattttgctaaaccctcaggagtcccttttaatctgggaatcctttttccttcagctctgagaaatttagttaaaattatctctttaatactgttctgtactccattttcactgttgttctgtctggaattctttttattcatttgtatttgtaaggcacttggactggttttccaattttttttttaatcttttcccttctctttcccatctctttttgttctactttctgattgagtttctcagttttatcttctaacccttcaatggatcttttaatttctgcacctatgtgcttagttcctgagaatatgactgacagttttttggacacttttttaatttattctattttattttattttttgaggcggtgttttgctcttgctgcccaggctggagtgcagtggtgcaatctcggctcaccgcaacctctgcctcccaggttcaagcaattctcctgtctcagcctcctgagtagctgggattacaggcatgtgccaccaggcccagctaattttgtatttttagtagagaaagggtttctccatgttggtcaggctggtcttgaactaccgacctcaggtgatccgcctgccttggcctcccaaagtgctgggattacaggtgtgagccactgtgcctggccggacattttcttctttctacatagtctttcgtttgaattctgttttacatttgtttcagcttctgtttttcatgtataatttcctcaaatgttggatgatctcgggttctctgctcattttttaggataataatgaaaagctgcctggagctctgtgcccatgaaagggcttattgaacgtgatcttcactgtagagtgatctgactagactatagaatattttcctgtggctgccataaggacgtaccacaagcagtgtggattaaaacaacagaaatgtattgtctcacaatttctggaggcttgaagtccttaatttcataatcaagatgttgactgggccacactccctcagaaacctgttgaggagaatcattccttgtgaattcctagctgctgattgttgccagcacytcagtctacctccacactctacctccattgtcacataggactcgcccctcatgtctctgtgtgtctattttgcctcttcatcttaaaaagacaccagtcacataacttcatttaactacatcttcaatgaccctgtttccaaataaggtcacgttctgagggattrgggtttaggactgtgtgttagtcagcttgtgttgccataacaaaaaccatggactgattgacttgaacaacaggaattattttttcacagttctggagactggaagtccaaaatcaagttgctgccagggttggtttcctgtgagggctcttttcctggcttgtaaggcagccaccctcccatatgtcatcacatggtctttctgatgtgtgcacatggagagaaatattcctctttttccttttcatataaagacaccagccctatagtagggcttcaccctgtgacctcatttaaccttaattaccaccataaaggccctaactccaaatatagacacatttgaagttagaacttcaacctgtgaattttgggaaaacctaattcagtctagagcagatcttaacacatctgttttgggaacaccattcaacccataacaaccatttcttggaaagttatcaatgtctatatctttaggtattttctcttgtgccagtcagattcttcagagaagactcttccattctgaaaggtacttgtttaccagcatcctactaggagaataaggcttgggggcgctcaacattcagtttataaacttttactcgatccctattagccccactctcagttgtgctggagatttgcaaatccagaaaccctctgattcacccctttccagagaataaacataagggtttccctggggaaggagggacattgacaggcttctggaatgagaaggtatcttggagtctctctccyccttaagcagaygtacagccatccttcctaactttagcacccctgtcctttttgttttgttagacagggtcttgctgtgttgcccaggatggagtgcagtggtgccatcatagctcactgcaagctccacctcctgggttcatgcgatcctccctccttggcctccccagtagctgcgactacaggcacatggcaccacatctggctatttttcttttcttttttctttttttcttttttttccttttaagtaggaaaaaaaagctgttcttgagctcccgggtccaagctatccatccacctgggcctcagaaattgccaggattgttaggcatgaaccactgcacccagcctctgtaacccttttgaccaggaattttgccaccatttcttttggcgagctctgcagtgtagagttaagttgcttctcagtttttccccctgccagcttgctgttcagttttctcaggtctcctaactcagttactactcatccatttccttcctggttccaaaattcttatgttctcttctatattcttctgagcttatgctgtctttaaaaatcactttactgttgttttaatatttgtagagggagtggaactgaatatgtatattcagtttaccatctttacccaaatttccaaattgactttgtgagtgggatacttgcagttgagttactctgtggtatgtatgtatgtatgtatttatgtatgtatttatttatttaaagtcggagtcttgctctgtcacccaggctagagtgcaatggtgtgatctcagctcagtgcaacctccacctcgcaggttcaagcgattctcttgcctcagcctcccgagtagctgggattacaggcacctgccaccacacccagctaatttttgtatttttagtagagacggggtttcaccatgttggccaggctggtctcaaactcctgacctcgtgatccgcctgcctcagcctcccaaagtgctgggattacaggcgtgggccacagcgcccacccgatttactctataatattaagtaagacttattatacccttaacattggtttttaaatgtgttcacttaggaaatagatttaaagtaatatatggccgggcatggtagctcacacctatatctcagcactttgggaggccgaggtggatggatcaatcgcttgagtccaggagtttgagaccagccagggcaacttggtaaaaccccgtctctaccaaaaaaatacaaaaattatccaggtgtgatggtacacgcctgtagtcccagccacttgagaggttgatgtgggaggatcgctcaagcatagcagttcaaggcttcagtgagccaagatcatgccactgcactccaccatgggcaagagagcaagaccctgtctcgaaacataaaaataaaaataaagtaatacatactgtcgttttttcaatgcttgaaaataactttaacatttaattgtagctgacatacactgaattcatgtgtgcttacttaaattaggttattatttctttataaacctaatttttcatatgtcatgtttactattttatatgtaatatatacagcatatcacttcactggtaaagtaactggtactgttataatcatcaagtgttttatattcttcactatgtgtttttttttgggggggggggagatggagtctctctctgtcacccaggctagagtgcaatggcgcatctcagctcactgcaacctctgtctccctggttcaagcagttctcctgcctcagcctcccgagtagctaggtttacggtcacccaccaccacgcccagataattttgtattcttagtagagatggggtttcaccatgttagccaggctgatctcaaactcctcacctcaagtgatctccccacttcaacctcccaaagtactgggattacagtcctgagccaccacaccgggcccttcattgtgttttctaaaaacaatttctgatcacctggggattattacaacagatctaactttaggaaagtaagtattaaatttgaataagattatataatagggggatttaaattaaatgcctaacagagtttcatccaaaattttagaatgtgaattcaaggaactcttgacccttctgaagtaaattgaaagcatttccacagtgttcacactaggatgtagctagccaactcacagctgcctgtcctcttttagcttccaatgaaaatgctttggaaaacatacacatagaaaaagaaattctcacagtaatacttaaacctaagaggctaagcaatcaggcttttgctaaaatctaggaagaatgttaccaactgtagtgccaatggaaatggattttttaaaccattttaaatgggactgaaacagttgtttccattaaaggaaatgttgctaagaagtaagttggagggaggcctagccacccccaccctaatccctagtgatggaatagtttaaaaccataaaagctacaataaccagaaaactcaactgctaccaccctcactgcagggagacctgaattcagaggcagccagtgtttgccttccctttttcagaaaacatagcctcactactttgaagaaaataccagtaatttccacacaggagaaataatcattgactataagagaaatcaacaatgtagtaataaactaattataaaaaattgaaatgatagtaatatatatcataatttatattcttgactataatagctggttttcrttgttgttgttgttgttgttgttttgaggtgggggggtggtattgctctgtcgcccaggctggagtgcagtggtgtggtcaaactcaccacagcctcaacctcctgggcttcagctatcctccaacttcagcctcctcagtagctgggactccagatgtgtgccaccacgcccatctaatttttgaattttttctagagacgggggtctcactatgttgcctaggctggtctcaaactcctagattcaagtgaccttcccacttcagcttctcagagtgctggaattacaggtgtgagccactgcatccagctataatagctttaaaagactattttgaaaaggaaggaagaaaaatcaaaagaatctgtaagaaatgtagcatgaataaagcaatataagagcaaaaaataaaaacaaaatcaggtaaattagtgtatctaggagtttctttgaataagtttaataagataaacacttgaaataactaaggtatagggtaagatagaaaaggactgaaaaaaatgaaaaacaagaaaagagtttaagcaagcagtactaaatttaagtgacatagaaaatattaaactacctataatttttattaaaaaatgggccaggcacaatggctcatgcccgtaatcccagcactttgggaggccaaggcaggaggatcatttgagcccagcagaccagcctgggtaacatagcaagaccctacctctacaaaaaaaataaaaatagccgggcatagagacatgtgcctacagtgccagctgcttgggagactaaaacaagagaatcacctgagcccaggaggctgaggctgcagtgagctgggattatgcaactgcactccagcctgggggacagagtgagaccctgcctctaaacaaattaaaaagagtattttctaataatatcagatagacctattttttccttttcagctaaagattatattatttatgcaatgacatttcccctttcacacaatactgggatctgtctttggaatacccagacatgtacatcatctttccattatgtaattttaaaaatatagtgctttaccaactacagctgtaataatcagattgtcaaccagattgccatcacaccgtgaaaggtcctcctaaaaatataaaagctagagctattcctgaagattgtagctaaatacataaaataaaatcactctccaaaacgtcataactttaaaagcacccaaaatgtaatggaaatgtaaaatgataaagtttttttgaaaaactataaaaaaattaaaatgcattgaaatgtattatacaaatatttaccttaaattttgtctcttggctacgtgtggcaactcacgcctgtaatcccagcactttgggaggctgaggtaggaggattgcttgagcccaggagtttgagactaacctgggcaacatagcaagactctgtctctacagaaaataaggaaaaattagctgggcgtggtggcatgtgcctatagtcccagctactcaggaggctgagggaggaagatcgcttgagcccaagagttccatgctgcagtgagctatgattgtgccactgcattctagcctgggtgacagagcaagaccctgtatttaaaaaaaaaaaaaactcttgctattagaagagagtttttaaattgtatttttaaaaattcttttatctgctcaattgttagctatgaacagtgcctctgagaagtatgctaaaggttcagctccttttttttttttttagctttttggtatttttcttttaaatgatgatgtgcccaaacagtattatgaaactaagggtacattttaaatgtttacactgaacagattatctcacaataccaagtttgtcttttctctaaacccaaggctcttacattctcttcggaaatggcaccaccttcctctagttgatattgtcagaacatgcacagcacagcctctcactgcagtgcttctcaaaatttaatgatcatgccagtcccctgggattctgctaaaatgcagattctgatttaatagttctggcctgagcttcagattctgcatttccaacaggcttccaggtgatgccagtgcagctagtctgtagaccacagttcacatcacaaagattctgtgcatgtcctcaactctggttacatatcaaaaccactggaggagcttgacttttaaacatctgtctgccctctctctgcaccttgtgataatgaggcctcagaatctatataactgtttgtaatcaccacatgattcctatccacagccaagttgaaaaccactgattaagcagtatattattttattgtggcactcaggcaacccttcactacacctttactacactgtgtgcttttaaaaacatatatgttgatgtaaacgaatagttgattttagaaacatcttatgtaaattgattgattaacaacttggaatatattatagaaaaataatattttagtaaaattaactataagatacaattaggggagtaaggctattgagtaggacttcctcctagtttccattttttgtggctggctctagaccaaatgtctccgtcagtgaagtgtccctttataatcacccacccttctttcatagctttctgcagcctctgtgtacctgtttccttaggcctccactgtggcactcaggcagcccctctttacccatgtatcctgtattctgtgctccgttacttgctgccctcccactatctcccactcacctaaatgtgaactttctctctgtgtggttgattgcacatgcctttgaagagaagtaatttgataacacaggtttgttctcggtcatgatggagattttgtcttcctggagttttttttcttttttgttttgagatggagtctcgctctgccacccaggctggagtgcagtggcacgatctcagctcactgcaacctccgcctcccgggttcacgccattctcctgcctcagcctctgcctcccaagtagctgggactacaggcgcccaccaccacacccagctaattttttgtatttttagtagagacggagtttcactgtgttagccaggatggtgttgatcacctgacctcatgatccgcccacctcagcctcccaaagtgctgggactacaggcgtcagccacggtgcctggcccccggagttttttttctatcagtctttgctttctcaggaagaccatgtggtcctactattataagggccagttcttgacatttaaatacttactgtatgtttaaagtatgctgtcaaacctactataaagcaacagtagtatataggggctgttatgttccctaaagaatggaatttttcatttactaagtcagccatagccttgccagacacctagagaatgaagcatctcttttggtggctcggttaatgtcctttgtggaaggagccagatggagtcgactgtgtgaagttagataaggcctaggtgcctaagaagtgggaccaagaccaagagaaagaaggaagtaggatgacagtttggtatgggaactaagataaccagtaggatggctgtgtagtccagtctatatttgaatagtcttttttcccatgctaaaatcccgagaaattctgtgtggtcctgttaaaagggaactgtgtctcttacaaatgcttattatcccaaataaatcaatagaactttaaataatataaaaagtgaagtatgaattctcagccagtgttgatggagagagttattttgggactgagaagtcattccttcctaaattctgctcctgggaacagttcccttaagcagttcctgatttttgcatctttaacacttcttttaaattaattatcatctaattttttaacatatctgtactttcccatctctcaagtttcttagactctactgaggtcagggttgagatatataaggcttctctgattcaagggcactggggaagaccagtgcaatgttgcgacagaggtatccatttctatatacagtcggccccattttaactcactgtaacaccagatacatttatataatgtgaggctttctccttcagagcaacaggatattctgtgaggtatttggcagtgataattagaaactgcaggtaaacaatgttgctgccagttccgcatctgaaagtagaactcccaagtcattggtgtactggggaggtgctgacagttaaaacctgcttagatgggcatggggggagaagtaccccaaagttgagggagctcacatcaatcctaagctaacatattcacccccaacacatgccccatctttttaaaaaaaaaaaaaaaaaaaaactattttcagccacagtctctagtcactttggatttaacttcaaatagctttttttcaaccatgcctctaacttggcacagctctgagaaaaaatcccgtaaccaagccatctgggttggataaaacagggagcttttctatttgatttctcacattttgttcctctttgtttttaatgatggagtsgggggggaatcattatgaagtaaccaaattattggataagttagtgaatcgggaatagatcttttcaactctatactgtctctaaaaaaatctgtatcagaggatctctctgttgtctctgaaatgtggtgtagaatgaatgttttgggtgaattgacttgagtgggtaacaagtaatggtcagaaaataaagttctcattgggtggtctgaaattcagcagtgtttatttctttttagactcagcagagattttttttttccagtgaagcatattttaacatgttatgctctggatttacttagtatggttttaagtgaatcattaggcatgtgtgatttttcattttttcttaaagaccagcattaatagcttcataattcaaagagtctgtaattaagagagtttgaagagttgtttaaactctgttaactttgaaaaaataggctattttatatgtgataaactgctgcttgcagttcagagttacttgttgggattgtgtatcaattcagaccttaaaatgtaagagtggaagccatcctctgtgcttgctttccaggcacagggtgctaggtactgagaatatgaagatgaacaaggcacttttgatccctatttgttgttacagtcaaatggcaggggtggttgttacataaaccaaccatatggatatgttacaaaggaaaagtacggtacacagagattatatatgatctctggaaggagtcagggtaattaggaaaggctttcttttggaagtaaagaaattttatttatacaaggcagtgaataatatgtaatgtaataaaatactagtagttatatattgaatcagacattgtgctggtaatcacctattcttatccttctatgttatactaatccccccatgaaagctttgtgggtgtaggaaaaccttgacatcaaggtttatgactatctcatgtcaaaggttttgtttgtagtaggccctaagtaatgtttatcaaattaatatatcacattttttctttttattatacaagtgtaaattattacaattataacatttaactttatcattgctatcataatgtctcactggtcatagcataacaagttatataaaggtatcatttaagaaaaatactttgaagttaatatgccattactgctattatctatggctcttataaatctacagcagtgtacctccaaccataccatatttccttgtatacttggggcctgggtattgttctcaatttctgtgatggaaatcctgaggatcattttacaattgcagcttactttttgtttgctttatttgtttatcctgggatctaaatcaatttcataaaagttttctctaagaatgtaaatcatagaatcttgttttattgaaaatgttaagagatcatgaaatgaagctaactcttcatttggcattagggtaggtaaatgcatacctrttaaatgaagcatggttttcttgatagtaaatttagcctaggagtatgttcattttacagtattcactccagctttaaatatcctctaattcctttgagagagtgaagctaagaactctatcacatgaccgtctggatttctgaaatgctaagtctttataaaagccttatggatttgagtaataataaagcaagtgctggcttgttaagtaggctaatctgatccatgcactatataaatcagaatgtaattttaaatactatgactttatatcgcagatgactccatattcttcaaaagaacttgcctaattataagagcatatttccttggaaaatcaatttcttttgatttttaaatgactttaagattccatttgaggattattttacttatatatttttattttaaatgaaaatattcatcacatttctttagtcacaaaaaatatagtaggtaaagtgctccagtagtgaaaatgattgccatttcattgtgaccactttcaagagaagtttattaccaaataattagaaaaaaaatggaaattataatctcacttgttaagttaacccagttcattcgttctttttttaaaaaattaattttttatggtaggggtagagatggggtcttgctgtgttgcccaggctggtstggaactcctgtgctcaagcaatcctcccacctaaacctcccaaagtgctgggattaaaagcatgagccacgacacccggcttattaattcttttaataagtatttttgagcttctgttttgtgccaggtactgtacaaggcattagatacactcttggcaaagaaaacaaagtaagcaaaataaaacatcaaacatctttgtttatagagttttcctactgacgtttatgcatgttttttttttttttgcattttattcactggcctcccactcagaatatatttacttgaaatattgtgcctatttctaacaagttcatttatctgatttcttggcctattgaaagtagaagaggattgctgctgaaaccatgtagactgaatgcagatgatagctaacaaattcacacagacttcacacttgccaagggatcacaataataatttaaaatggtattcctctagctctgcctctgtctgctgcatgagaacatcaatccttcctacccttcatttctttccaaaatacttccctgaggatatctcaaccacagttgcttaaaatgtggtccccttctccatttctcaatcattgtagcactgtcacgaccagtccgggcattagccctgccacagatggcagctaatagtactatgaccagtgcctaactaattctggaaccactgctgctgtggccttgctctctcattattacagagattagtgtaacctcttatactgcggtaggctaagccgctatgatcatagtatgtaacaataatgcaatgactgaagaactatagaaatctatttctttttcacataaaagtcctggttaggtgctcatttcatcaagaagttctccccacacaactattaatatttgaaaactcagattctacccatcttcaacacatagcttccaagggtgctctgctccctgccatcccagccagtaggaaggaagagcaagtggaagagacacccccacttctcaaaagcctcacctcatattcttttggtgagaactcaacagattcctcatctacctgcaaagaggggctgaggaacccaggccctggctcagccattttctagccacactctgtcattctaccttttatggacagcagtacatcatatccatacttctcttgtttcattgtcctagacttttcatacttgtttcattgtcctagacctttcattatagcccttgcaccagcacccagaactggtgaaggcaccattggtcatagtctgttccaggtcttccctagacagctccctttcccatccttaaaaacatcttttctaaacatttactgctgttgtgaaatccactcaccttcccactcatgtccagccttaacagctaatatgccgcctactgcagagtaaaggtagagggcctaacccatgaacccttcaactctcttctggacacagccactcttttcttcctttctatctgtcccagaggaagaggtatccctgcttctttcttgagcccactcttttccctctgtgttcctaatcttattcttgtctatctcatccaggatcttgttccattaaatattcctgctttctcataatttgaatctcattatctctccagtataacgttaaatccttgagaacataaacatgctttcgtgttgcttcatgctattttttattccttctccttaaaaaaaaaaagatatcttaaaagattaatttatatgtactcatcatgtttttacctcctatctactttctagccttttgcagttcttaccaaaaggaacacattaagctatgtgcattcccacattcattcaccaatccatcaacatacatttatttacaccttttatgccaggcacagatgattcatcagtgatcaaaataaaagtctttgtcatcatggggtttacattctactagggaaaaagcagaggaagaggggaaagcaaatatttgttagatgtgcttatgatatgtgatacatgctaaagagaaaaataaagcagaataaggaagttaggattttgatattttaaagagggtagtcaggaaacgcctctctgataggagatattcgaacacagacctgaagcaagtgagcaagctcttcacatggataactgggggaaatgcattttagacaaggaaacagcatgcaaaaggcctcgaggcaggagcatatcagcacataccagggccagtaaaagagcaggtgtggctgaagcagaacagaacaggaggtgcagtagcaggtgagggcagagagattgctggagccacgtagatacacagggctttccaggctatagtaagcaatgattgggaaccatgggaggggtttgagcagaggaatggcatgatttggcttctgttttaagtaggcaccctgactgttgtatgcagaatagagtcaaaaaaatggagtgaccagttaggatgccactgaaataatccagacaggaggtgatggtcatttgagctgacgaggtaatgaaaaatgatttctattctgggtgtttcaaagggctaacaggtttagtagtgctggaaccttctattttcccctccagtggagcttttcctccactctccatacttctctgcccggctgcttatggcccaggagactggtctatacaggctggatcatctctggcctcctttgggtttggcccatgagaggcccctgcacaagatcagaagacaggaaaagcatgaggtcacaatatttgttctcctagccccctcactgccaccaccagttagctgtgaccgtggctctcacctgcttaccatctttgggttccaggaagccttttcctcccctacctccttctcacctagatataataccagttcctgcagtggcttgctcaggggcacgccactatactttattggtgttcttgaaccttgcacacagatttataaataatccctttagtaagctttcctccaaatattgggattttgacccatactgggagctaggacgtctaatgtactaagaacagcagaacatcttttttttttttttttttttttttttkgaaacggagtcttgctctgttgcccatgttggagtatagtgtcatgatctcacctcactgcagcttccacctcctgggttcaagcgattctcctgcctcagcctcccaagtagctgggattacagacacgcactaccatgcccggctaatttttgtatttttagtagagagggggtttcaccatgttggccaggctggtctggaactcctgacctcaagtgatccgcccacctcagcctcccaaagtgccaagattacaggcgtgagccaccgcacctggcccagaacatctttttaaattagggacgggatctcattatattgcccaggctggcctcgaattcctgggccaaagcagttctccacctcagcttcccatgtagcttgaactacaggtgcactcacgcattttaaaaatcatggttatttacttgtttttctgcccagtgaaatgttgaatccttgagaatggaactatcatgtttatgtttctattcccatgccatgaggcaggtaggatttgcttacagttgaatcagtgagtgttatttttaatgttgccacctgagtcctcaagaattgactaaattatgttttacatgaaagattaatgaaaaggagggtatatgtgcatgtgtccccatcttagtgcttataggtgtaaacttcaccttgttggataattaagttctctgggatcaaggaaattttttttttttccttgacttgtgtatagttatcgactaggctacatagaagggaggtgcagaatattcaggcaattcctatgttatgtgagcctcctataatacaagccccctttctgaaaatgaactgtcatctgggttgaaattgtgcaccactgggaatgggggacttgtagattgacaagggccaaagggacttttaaggaaatattgggtatagctttctcattattcattgttcttgtgaagatatctaaacaacagtttgttgattttaccaattgtttccgaactggaaagaaatacgatttgttctcacttccccgataatatatttctatcaataaagttagtaaccttttttcccagtagcttaaaaggtgatttgtgatttattaaagtcacttgataaattactgacttctatttacatattttaacagcaattctttatattatatttggttacatatgtttataagatagtgtattggtttcctttcaattttttggtattaatactacattctgttatcaatgttttttgttgatctaaagaatatttcctttatcttcacatacatttaggttttgtgtttttgtttttgtttttttttttttgaccttgacttctttctgctatttcttttgagcaaaaccttaaacagcaggctgaatggccttgaggtgtagttttaataaaagcatcactgagtaatcatttggtataaactcccaaccaaatacattaatggaaaaaaagaaagcaatatattttcaaggttaactttctttatggttgcttccatgaataatacatggtcattgaatttatttaatttttgcctgtattcaactatatttaaggttcatatttctgatgagaacaaaaaaaacataggttcaagagaccaaattgtcaaagaatttattaattaaagacaaattaaagccatggggtttgcatatgtagaactgtagtcaattcaccaggaaaatgcctagaaataccctattgattagatagtttgctgttgggtatttaactaaaagttgaagccttttctctctcttttatttttgacactattaaatattctcacaacctaaacagataatttttactttcttaggaaaaaacatatattttaaagcacatatttattttgtgagttttaaaattaatttgatgacttcatctgaaaattgaataagcacttaactgaagcacagctacttttgaaatcttcagaatgtgcagcagctctaattcattccacaattcgtcattcagggaatgtcagcaaatggctaccgtctgtacagtccttttgcctctactcaaccctattaacaagtaaattaaaacaatttgtggagcattacttatagttgttatccccttggaagatcacaaccatcaacacagttgtaaaataatgaaaacgtgaaataatgaaaaatagaaagtagttacttaaatgcttttatttttctgtgaatttattaaattttctgtgaagtgagccatatttcacttaagcctccactttcctgggaaaggaggtgataatatgtacactgaggtctctgtgctgagtactggagagggagagagccaggaaatcctagagaactggagagactggtctgatggcagccgcttgtttaaaaagctgcatcctttgggcttcaaggtggactgttcctccttcagccatttcctagtgcagtgatcttgagcaacttattgattttggccctttgtaaaatgagaggagttcaccatattacttattttcaaacccttctcatagaacacaagggtttcttagagtctccccaagagtctagggcagtataaatgagagactcagccagaacagtttctcttgtaatgtatttacagggttttttgttttttgttttcggtaaagggttgtttagtttaaaaaagcatgatgattccccaaatccctgctagcttaacaaaaaagcacacggttcagtttgtagtcattttttccttcgtttctttttaggagggaggcctatagtcaggattgactctaaaagataaccttatgggccgggcgcggtggctcatgcctgtaatcccagcactttgggaggctgaggcaggcagattgtctgaggtcaggagttcgagaccagtctggccaacatggtgaaaccccgtctctactaaaaatacaaaaaaattagccaggcatggtggcgtgcgcctgtaatcccagctactcaggaggctgaggcaggagaattgcttgaactagaaaggtggaagttgcagtaagccgagattgcaccactgcactccaccctgggcgacagagcaagactctgtctcaaaaaacaaaaacaaaaacaaaaaccttatgaatacagctgagaagtgaaagtactaaattagtgtttggatttggaaggactgagggaatgaactcatacaagagcatcatttcctcttttagaaacaggtagggaggggccgggcgcggtggctcacgcctgtaatcccagcacttcgggaggccgaggcgggtattcatatttcacattacaattgcttcagaagttattcatggctattttctattgggttgttcatgtaaatagacaattgaaaaagctatttgagttatcattttatattgcctgcgaaatacccaaacaagcatctgtattaaaactaataggtcaatttcccagttatatataaggacctaaatttttttgtcactcatgaggtgagaacaaggaaagtggtagtcatccttggaccctacattgggcagtttctcacatcttctctctctgcctggtataatgggttaagcaattccagagtcaggcaacctggacmgaaatcctasccaaatgacttctcttttacctctctgtgccactgttttcttatcgatgatggaattaattatatttcctactttgtaaaggttgttacagggattaaatgaattaatttatgttatatgtttatcaacgtaattcctcgccccctggttggcatggcattgtgtatttgctgttattactacacagaaaagcagagattttaatcgtacgtgaaactccagtgcacttgagagacaagaaactctgtgtactgaggtcgatgaaaaaatataaatttgggagaattaactcagaaaacattaatctggcatgcttctatgagaaggataggtcccaagagaaggcagagtgccagggaccattcagcatgccctgactcagaagagattaaaacgtcctgaactaccattgtggaattagagtggaagaaggagaaagatgtgtgagagattacaggcttacatcaggggaagaggaagaagattaaccttatgctgtccacctgggtaactagcattatggctgcatcattaatagaagtaagaagcccaggattgttgtttgctttctgaacawtttatatatattgggaaataaggaatataaaattttaaagactaataaagattaaatatagtcttatactatattatttatgtaacaattaaatagctaaggccaggcatggtggctcatgcctgcaatcccagcatgttgggaggccgagacggacagatagcttgagcccaaggagtccgataccagcagggcaacatggcaaaacctcatctctacaaaaaaaaaaaaaccaaaaaaaatttagccaagtgtggtggtgcacacctgtagtcccagctactcgggcagctgaggcaagaggatcacttgcactggaaggtcraggctgcagtgagtcatgatcgtaattgtaccactgcacttcagcgtaccctgtctctacaaaaaataaaaataaataaataacttatagtcttcataaagaagcaagtagataacgtcttttaaagaactttcttccaattaagaaaaatatttcctgttttcccaattccttgatttagattcctagattatattgtatcaagtcccagagatttgttaatctttgctcctgctatcccaagactgttgatgtagtaatgtaaagaactcaaacataaaacctgttgaaaattaaaccatcactttctgcgtttgacccaacatactatgtatccagaaatacatacataatatgaaattattatgaaatccagaaatacatacatacatacatattattcagagttgcaaataattttcatctgttgtttcatgagtatttttattatttccaggttcgatggatgatgtactggattgtttttgctctctatactgtgattgaaacagtagcygatcaaacagttgcttggtaagttttactattgagaaggggccagactacagactcataatcaggtgtcctaagttcttatcctgctcttgctattaactgagtgattttcatcaggttacctaattatccacccatttgtttttgtcatctgctttcccatagaacactactttccttttagtccccatcaaataaaggcagctcattttcctccccatacgccgctccctgctcacctcccacacaccttcccccagtatcttggaatagggaaagttgattgtcatcatccttttctgcactgatgacttcagaacattttcctgtatcacttcctaaatgactccacttttgaagcccacagcatctggttttagcacccctccctatcctatccttaaaactctcatctacaaacatttgaactggaaaacgtcagcacccacgtggacacccactcagcactagcttcctggctgctctgttccaaatagacgaggcaaaattaaagtgtgtttatatcctcagggatttgacattttaccaaggagcagtacttaactggacaactcaaatctccctgtggtgtatttcagtagtgcatttccatctaaaccctgcaatcactttgagaacttctcctttcaaaatattttggtttactaccttgctgatatcttcatctgcccttgacgcacaaaccttctgtctaaattagcctaacaattactcgtcttttttttcttttttttttttatacaaggtcttgctctgttgcctaggctagagtgcagtggcacgatctcggctcactgcaacctctacctcccgggttcaagcgattctcctgcctcagcctcccgagtagctgggattacaggcacatgccaccatggcctggctaatttttgtatttttaatagagacggggtttcaccrtgttagccaggctggtctcgaactcccaacctcaggtgatctgcctgcctcggtctcccgaagtgctgggattgcaggcatcagccattgcacccagctaaaatgactcttttttacttctttaactgggctgctaaattcagctgaaaaaattaatcagctgctcacataggtatcagcttgaacctcattctttttacttgctcctggtcagtgtctacttacattttgtctgggtctgtttcaaacctttactattctctccttaagctgtctttcccattttgctcttctcctgttcatgtggcacattaggtcctattggatttgcaagaaaaaaaatagaagtcttcatactaaaatatttttaacaaccttcccttatttgcaaacgtcactgtatctgtcttctgatttgaaatactgtaaaaatttcccttcctgtgccccaaagctcattcatttatctgttatatttttggtataggggtttggttgtggggggtctctttgtttttaagtgacagagcacagatccccaaccgtgctacatcgaagtttccaagttctytttttaagacttcatttttttctgattgcaaatgtagcctatatatgttatttaaaaatgaacgatgtagaaaatgtttaacatgaacaactgaatccagaaactcctgtaattgcagtgtggcagagacctctttgttgactacatagtaagtcatcctcactgctctctacctgcccaccttgacagaagaactcaartttgctcagctatcatttatcctagtgataaatggactacatttatgtggttctcacagacaacaagatactgagcctctcattatatattagtgaacttttgctgtggcaaaaaaacaaccataaaagtacagtggcttagaaaagcaaacttttatttcttgctcaagctacatgagggcaaatggttgactgcatctttgctggggtcaggtcacttttgctgttgtttctgttgttgttttagagacagggtcttgctccattgcccaagctggagtgcaatggcatgatgatagctcaccgcacccttgaactcctgggctgaagcaatcctcccagtttggcctcccaaagtgctgggattacaggcgtgagcacctcacctggcaccttaaaccaaggctgaagaagcagctgttctcatgccagaaggcaaaagcttaaagcaagagtttgagggtaatgggtaatggagtgagggagtcraagggtgttctaaagcttctgcttgcatgtgacatgtatcatgttcttttctgctggccaaagcaagcaagtcacatggttaaagccacartcattggttgaggaagtatactgggccaacgggggaggcccactgtaacactttgtattttccttggaagtgaacagtttaggtctgcagagtgctgcaattctggccaaatgaaattggaagggatattttttcggagttctgaaaaagatgaagacgtgtgtgtatggggtagacattgtgcacttggagcatatgaagtcattctctgataggcacaactatcatatgagataggtcatgtacttccatgccagtttggctctgcagatagggtggccataccttgtgcactggataaatggtattagtgccttctcttaactgctgcattcagtttggcagctttcctatgcttactacaaaggaagattcttgtattagaatgaggggggaatctctcaggtcacacattcatgaactgatctatagttgaaacaagattattcaaacacagttgtctcctgatcactgacttttacattcaaaaacttagcataggctgggtgctgtggctcacgcctgtaatcccaccactttgggaggccgaggtgggcggatcacatgaggtcaggagttcaagaccaggcctggacaacatggtgaaaccccgcctctactaaaaatatgaaaattagccaggagtggtgacgtgcacctgtaatcctaactactggggaggctgaggcaggagaatcacttgaacccaggaggcggaggttgcaatgagccgagatggtgccattgcactcagatgacaagagcaaaactccatctcaaaaaaaaaaaaacaaaaaacagcatagtgactgaactttttaaaaggtgtttttgtgatttctacagtggtttgtttttcactggcagtttatttccaaatgtttttcttattaggtttcccctgtactatgagctgaagattgcttttgtcatatggctgctttctccctataccaaaggagcaagtttaatatatagaaaattccttcatccacttctttcttcaaaggaaagggtaagatatataaattacttccgtaaataattttttagaaatgcctaagcggaggccaggtgtggtggctcacacctgtaatcccagcactttgggaggctgaggtgggtggatcactggaggccaggaatatgagaccagcctggccaacatggtgaaaccccacctctactaaaaatacaaaaaaaaattaaccaggtatggtggtgcatgcctgtaaccccggttagtcaggaggctgaggcaggagaatcgcttgaacccaggagacggaggttgcagtgagctgagatctcaccattgcactccagcctgagtgacagaatgagactccatctcaaaaaaaaaaaaaaaaaaaggccgggcacggtggctcacgcctgtaatcccagcactttgggacgccgaggtgggtagatcactaggtccggagatcgagaccatcctggctaacacggtgaaaccctgtctctactaaaaatacaaaaaattagctgggcgtggtggcgggcacccatagtcccagctactcgggaggctgaggcaggagaatggcgcgaacccgggaggtggagtttgcagtgagccgagattgcacaactgcactccagcctggacaagagagcgagactccatctcaaaaaaaaaaaaaaaagaagcgcctgggctgggtgcagtggctcatgcctgtaatcccaacactttgggaagccaaggtgggaggattgcttgagcccaggagtttgagaccagcctaggcaatatagtgagaccccgtctctacaaaaaaattaaaaattatttggtcatggtggtacacacttattgtcccatgccactgcattccagcctaggcaaaaggaagagaccctctctcaaaaaaaagaaaagaaaagaaagaaatgcctatcaacacatgcttaatgctataaaattaatgaaactattatagggagaatgttctagtttggggcttattaacactatttttaagtaaaactaacatctgtggctttttcccccaggagattgatgattatattgtacaagcaaaggaacgaggctatgaaaccatggtaaactttggacggcaaggtttaaaccttgcagctactgctgctgttactgcagcagtaaaggtaattgttcatttacctttttaatccaatgtcatattaagtcaacaaataaaggtggcttcttatttcaaaccattataaaattgtggcattttgctatatttatttttctaatactggaaaacaagtaaataattttaaagatattttaattttgtgttttccatacttgatattttgaatctcttaattcatcacaaaatgaggtcgttaataaataatacatacctgaaaatgtcatttagtcataattttcccacttaatcaccttaaagtagtttgagtaaatcacctgatgtaaagatgaccattgtttatttctctgtctttggtgttctttctctctctttttttctgtctctttgtcaatggcaatatcttggtaggatttctggcttacttctgcacctctacttcaatcaatttgaggtaaccgattattcaaaataaggcatgaaaaagtctgttcttaaaacttggtacttagccagttactaatgtcatttgttgtgtttgcaagccaagttatcaaatgaatgtgttctgtaaaaatttgcattatggttttggatttctttgcatgttgtaatttgtgtgatttattttaaatactttagcataattgattttggtgtgtttggtatggaaagaaaatagycttctgtgttccttagttgcttcatgtataaaatgggggtaatatacctgtgagaatatttaaaagcacagtgcttgcttgcatatagtaggagcccaataaacataaatatcatgtgtctatctccattcaaaattcaagtgaaaatttaagttttttgctattaaattaaattgagattgaatagtattctgctttcaagttagtctgttttagttatcttgaactaaaacaactctatggaaataaatattccagttgagtggtgattttatataactaatagtgaagggatatgaaatgagggcactttcacttttcagagaggtctttgactcaagtatcaaaatgaatgtaatgaacaagaaggaaaattcaaattatatayctaatagcattacattgagggttaaatggaagtttattaactatgcagcactatacatgtaagataactatattattaatgattattaatggtcagcactttaatatagcatagttttcttgttatttggcttttaaaggctttttcttttattaggataggtttataaatgaatacagaaatagcaaagttttcagcttaaaggactatgttttattttagaagttcattttgttttttatttcttgcttagtgaaaatgcattcctgatttccatatctgctaaaaaagattatccaggagataatccagccactgggaattctaaaaagagggaatagatgcaattatcaaagaaataatacaataatatttcccagaactgaaggatatgaatcttcagattgaaaggacccaccaagtacttagcacaatgaatgaaaagaatgactgactctaagtgaagtcattgggtatcccaaaacaccagtgataaggaaagaattcataaagattccaaatataaaaagcatgtcacatttggccaggcacagtggctcacacatgtaatcccagcactttgggaggccgaggcagatggatcacttaaggtcaggaattcagaccagcctggccaacatggtgaaaccccgtctctactaaaaatacaaagattagctgggcgtggtgggggggcgcctgtaatcccagctactcgggaggctgaggcaggagaattgcttgaacccgggaggcggaggctgcactgagccaagatcacaccactatactccagcctgggtgacagagcgagactccatctcaaaaaaaaagcatgtcacatttaaatgatgtagaatcagaatgacattaaatttctaaacagtgacagtgaaagcttgaagacagtaataccatccatgataccatcatgattttcaccctcaagaactattaacagtcaagctctcaattgtgttagcttagaattaagaaatttcttaattctaggcatgcagagtcacaagatttacctactggttatcttttgtccaggcagatatgctccccagagctagggaatggtccacaaaaaagaaaacccatgggatctgggaaacaagtcattcagcacagaaaggagatgacaaaaattcccaaagagaacaccacacagcaagtccaaagtgcagccagccaaaactggatgtggtggatgaaaggtgccaggagggatgtctctggtagacctacaaagccaagaggatttttcgtgctgcacagggatgatactaaaaccagtgagaggctgggcgtggtggctcacacctgtaatcccagcactttgggaggccgaggtaggtggatcacctgaggtcaggagttcaagaccatcctggccaacgtggtgaaacccagtttctactaaaaattcaaaaaaattagctggacatggtggtgggcacctgtagtcccagctactcaggaggccaagacaggagaatcgcttgaacctgggagatggaggttgcagtgagccaagatcacgccattgcactccagcctaggtgacaagagtgaaactccatctcaaaaaatactaataataaaataaataaataaataataaaaaataaaagcagggactctgagggcatgcttcaaccagatgacacattggctgtaggccactggtgcccatgtagctgcacatgatccctgagcaccatgaaaaaatacattggcggcaatgtaaagaggaagagggtaagacaatgaaaaaggaaaaaaaaaggcataatcattaactctggggaaaaaagttacataagaaatgaaataatggagtatgactgcatttacattataataatgaacacagactaaggatttaacaactgtggttttgccatattgagagtatgggggaaagagaaggaaagtggaagagaactaaaatcctcatttgttacagtaggaaagtagagggtttaaaggagttgcatcggcagcggatgaagaggagaaggagactaagagcttgttgctttttgctataaaatttagcatttttgattttgcaaatcaagtgcatgtatttatttacacccaatgaagatgctatctgaatttttcatatttaaaagcatccttcaacatggttctatggagaaaaactgaaaattaaatttcaagttgaaaaattatttagagaacacattttagaatattgtctcaaaaaacaaagaagcatacaaatcccatttttcctcctcacttttaacatttgtgtataataatctattattctcctattttgtgagacaccattgtacatattgtgactattttgtgcagtacttgttttattttgacttgtgtttactactcccacgtagggcatcagcagtccccactctattatcttatcctcattcccttcctcatttatttttatcttacacttcgcctccattggtatttagcattctacatattatttattcagcatctgtttatttaatgcctactgcatagtaggtactgggaatgtagcaatgaacaagatagatatagccctcacctgcacaatctactgtctgtctggagctaatgtctgtattagctagggaatagcccacaaaaattttatttctaactgaaaattttatttcacctctggttgataagaccccacccatggctgggcgcagtggctcacacctgtaatcccagcactttgggaggctgaggcgggcggatcacaaggtcaggagattgagaccatcctggctaacacagtgaaaccccatctctactaaaaatacaaaaaattaggtgggcgtggtggtgggtgcctgtagtcccagcaactcgggaggctgaggcaggagaatggtgtgaacccaggaggcggagcttgcagtgagccgagatcgcgccactgcactccagcctgggtgagagtgcaagactctgtctcaaaaaaaaaaaaaaaaaaaaaagaccccacccattacccttcattattaaaataagcattatctcacaggaatacttttctgtaaaaatgccaygaaaacaaaaatgtgtctatttcatatatctatttttctggctctcttgtgatttattcttttaatttatacgtttaacaccttaaaatcacgtgttttaatttatacgttaacaccttaaaatcacgtgtccaccccaaaggcagtaatattgataaaaatcatctaagtcactcctgcaaaacaagtagaagcccatatcccctaaatgaaatcagatactggatttggaactgttcccatttgtttgcaatgttgtgattcttttatccataacatccctgtatgtaaggtaaccttcattattctcatgagtaccggaatgttggagaccccatcctggagtctatattattcactagcatattcattaaatatgctgaacatagcgtaatgttaaccctatttgcctcaagttatactgtgcttattttaaagtacatgaaattagtttcatctctgcagatgtcaaacaagggcattgtcatagaagaatcactgaaccagacacttcatactgaagagtaaattgaaactgaaataggaaataggtcaggtttaaggagaagctgcaagaaagccaacagtaagatctgaaaattatttaacatttttacaatatatagtttgtttaaagtatctttcaggcttaaaattcttggactcttggtgtgacctttgaagaacgggtaataacgctgactaggtttcccaggttgaaccacctgagcatgttaaaggtgaaaataggaatctaatcagaacatttattacaccgtaaagcaattttctgaaaatgttactcagttctatgacctcattaccaggcatctgttcgcaaggtcactgtacaagtttattttggctgagcaaagcataaacatttgaaggaccttcaaggattttgctgaggatgtacagcattccatagcttttcacatgagaaacataggtggtttcgtgcagatgagcaacactactgccagatgaaggacagatgaagaaaagtactgttagttgtattaaccatgtctttgaatttctctggcagcctttttttggtgaatttctttagcagatrtaagaaatcagttaccacagacttttgagctttacaggtaaaattgttgaaatctaattaactttaaatgatcccgattaggtcaaaaatccgaacatcttactgtctatgactttctgtttgtgaatggctttgaggatatacagcttagtattatacacttaaaaaaaaagggaagaatgtttgtccagacaatggaaaaagaaggttgtactatttttcctaaaatctagggaagcagaatggtataacaaacattgaatgctacagcaattgagttaatctggatttkttttagtgctgattccaccacaaattagccacgagattttgggcaaatcatctgcattgatctaagcattaatttttctcacttgtaaaacgaagaggtgaaacatgatttctaaaaccccttatatctctaaaacagtggttctcaactagaggcaattttgtgcccctacccttaccacgggacattttmggttgtcaccactgagagggggctgctactggtatctagtcggtaaagaatggtcagggatgctgcttaatattctacaaagcacaggacgttccccacaacaaaaaattatctaacaaaaaatagcaagagtgttaaggttgagaaactgctctaaaagtatgatgagtcagaaaaaactaaaagaatatataaatatgtataagtagttttggtggtaggttacaaataatttttmcttcctttttaaaatttttctccatgttatcaatgttcttcagtaaatacgtattgctttaaactcactaaaatattttattcacctaatgcaaatgcagtcaattccattctgggcttgatcagattaattgttaaatgtgcatggggaaatgagatttccctaaaaactgggaactaaccttatctgcaattataatgtaacatcagggatcaacaagaaatagagcttagtggctattctttactgaatagtataataagaattattctgtaaaagaatgttttgtgcttgtacgattataaagcattgctggttatatgtttttaaatctgtgatttaaaatgtgaagaaaataaaggttttatacaaaggtgctgataaacaaaataagttcttatttaaaacaaaataaytaatgttaatgtagtgtttaaccaggaaatgaagtatttaaacaaagacagcattatttgagtgtaaagaaattggaattactcatacatgcagggcccctttttatggatgccaaccacgtgcttggatacttgagtagacattcagatgtcctagtgcccttggatgtaaatgagctctgtgtggagccagtgtggggagctgcttctcagctgaagaatcccttccagagcctgagtgtgctagctctggacccagccctcctgcccagtcagcccctgcagtattctcagtttcttacagaggcatttgggcccacctaaatccaaaacctgagaatttagtgccasctgaagttcagatggttcagaaacagttctgctcacgatgatcagtttcaatgtgtaaaatattctacagaatacttaattacctggacttttacattctcatcataatctctgttactttgattgttaggatcaattttaacatacacagagtacagacaattctgcagagaataggatctaaagtgctgaaatatggaattatcttgtgaatggtaatcccgcctttcctctttattgactaagaccgctgtttccatacagcagactagactagaacttttctttttctttctttctttttctttctttcctttctttctttctctctctctgtctctctctttctccctctctttgtttctttctctctctctctttctttctttctcgtctttctttctttctgtctttcttctttccttttttagagacagggtctcgctctatcacccaggctggagtgcagagttgtgatcacagctcactaaggcctcaaactcctggcctcatgtgatcctcccaccttggcctcccaaagtgttggaattgcaggcgtgagccactgcaccaggtccttttctcatttttcttatacttttgtcttaatattatataaattaaatagaagaaaatagatacacaaagcattattaatttaaacaaaaccaatcccttttagcattgttatttacaagtgactataatgttctatttgtggcctcaaaaatagacatttttattttattgatgggaataaagcattagatacaggacacatgagtgagaaatggattggaaattcttatagtatgccacatattgactaattttgtaatattaaagacaatattttaaaaaaggaaaaaagtcacccatcccatctgcctaaacattgtactgttgttagttttgcatttttccatgcctacttatagccatactgcatacttgcaatcatattatgcatgtgctatagaattctggggtagagggaagatatctccacttaccgttaatatagcaaacatagttcctttattactggactttttgtgctgaagatgtaaaaactggaaggaataaggtagtcttcagaagtgattactttgtaattatacccatcctttaaactggttacattggatacatgtaatttacgwaatgttttcaaagtccacaatattgcaccaatttctctcttatattagttttattctggatccataaaaaatatacagtggaaagtccaattttccaaggtaataatggctgttaaagtgttggaggttctcaaagagggctcatattccctttttgcttttccctacagtgcctggctttcctgaaagccttgaagaggttgataatacttgggtattgataatagtagcattggttactcaagagctaaatttaaatccagcctttagatagatcacccagatacctcaaggttgggccttgccttgctcatgtttattctgaacctgaagcaaacccttggtaggtggtgtagtctatccatggagaaacctgtggccatacctgtagtttgctgctgaacctctgcaaaaaacctacagtgtttacattaaaacatgctgccatctatggagaagtctttaacagtcaagagtaatgaaaaagaagggacataaaaagagtatttagtttacttattacatgctcaatatcagtagcataccaggcacaccaggagaatagaagaagcctaagatttgtccctctcctctagtgtcttaaaagtcttgctctggaggcaaaatatacctatcccaacaatagaagtaacagtagtacgtgagttcatttgtgaggtatatcccaagagatttgttgattatgcttgttaaacataccaaagtttggggatgatataattataaagctagactgattccattgtactttgagtcatttgtatcctgaaatgtaccttcttgagtgggagggtttgggaattatagccagccttggaaatcgcatgtgaattgagtaaagggtatcatggacatgcatgtcatttgtcatctgtgtggcagtaaataaagaaatcagaaattgctgagagaaggcacagaactacgaagatgaaataaagagaatgacatttctgagaaacaaggcatccgtttcagatgaacactggtcacttcctcgtagtatgtctctggagtcttctgtcaactatctgtttgataagtaaatgatatctaataaggaggaagcaagtataataaattaatccatgccacaaatgttttttaaatgtgtgaaatccaattatttttattgagaataaagtcctttaatgatttcgtatcacaattcaaaaatatggtagaaatacgcagctcaagtgggatatggaaatggcatttggttttgacataatatattattaacccaaagtaactgaatcaagactcataaattaagacctttctcttgagtgtaaaatataagttaactgtaatgcccaaatgtttgtagcacctttgactttgaaatttagagatgaagcattatggattagtttctctggtaacactgtaactagaggaaatcataaattcacatgtgtgaaacgaagaaataataagtataaaaaaccccttagaagaatatttttaatctagctataaataagaagtgactcatctatatgctatgcaaatttaaagtaggtaaatttagaatttttttttctttttttgcttttacaaagctttatactttaggaggggaaatgtagttatacatgaacagttcagaaaatgcctctttcagagctgctgtgatggaaatgttctgtgtctgcactatccaatacagtagccactagccacacacagctattgaacatttgaaaagtggctagtgcaattaaagaactgaatattatattttatttaactttacttaatttcaacttaaatacccacctgtgcctagtgtctgccatattgttaagggaaaggacttaaagtcaaatgtagagtagtagatatgtcttgccagatagttaattcactaattgactatcattttgtattcaagattctttggctcttacatgtttctaacttgttctaggaagagccgttaccagtcctgacttagcttagctttaaaacaatgtcatgtctcttttactttaaaaagttgcccttggccgggcacggtggctcacgtctgtaatcccagcactttgggaggccgaggcaggcggatcacgagttcaggagatcgagaccatcctggctaacacagtgaaaccccatctctactaaaaatacaaaaaattagccaggcgtggtggtgggcgcctgtagtcccagctactggaggggctgaggcaggagaatggtgtgaacctgggaggcggagcttgcagtgagccgagattgcgccactgcactccagcttgggcgacaaagcgagactctgtctcaaaaaaaaaaaaaaaargttgcccttggccgggcttagtggctcacatctaaaatctcagcactttgggaaggccaaggcaggcagatcccctgaggtctggagctcaagaccagcctggccaacatggcgaaaccccatctctgttaaaaatacaaaaattagctggatatggtggcacatgcctgtaatcccagctactcgggagactgaggcaggagaaacgtttgaacctgggaggtagaggttgcagtagccaagatcacgccactgcattccagcctgggcaacggagtgagactctgtctctaaataaataaataaataaatataaataaataaaacaaaaaattaaaagttgccctaaatattaaagtttaagccccaaagtgctagttttaggagacatcaacattatggatgctgtttactctgagggtaagcccatcatacatcttttacattttaaaattaaatatgatgctgaaatgttgaggttgaaatatactgatgtctccaacttactttgaaatgcatgaaaaaataaaatgaattcatggataggtagatggtaggtatgtgagaaagcagataccgcaaaatgtaaacaatattgggtgttcattgtacaattctttcagcttttctgaagttatcttaataaaatgttcagggatagttaaatgtaagcatactaaatattttttcttggacctatcacttctctgttaaatagagccaaggagcaataactgaacgtttaagaagcttcagtatgcatgatttaacaactatccaaggtgatgagcctgtgggacaaagaccataccracctctaccagaagcaaaaaagaaaagtaaaccagcccccagtgaatcagcaggtgtgcttgtgtgttttaatatacggttcttttacatggaaacagggaggggaacaacatacactggggcctgtcggggggtggggcacaaggagagggagagcattaggacaaatacctaatgcatacggggcttaaaacctagatgatgggttggtagatgcagcaaaccaccatggcacatgtatacctgtgtaacaaacctgcgcattctgcacgtgtatcctggaacttccagtaaaattaaaatatatatatatacacgtatatatatgattatttcataattgggcttgtggatagtaaaataatacatgatacatgataactatctgaatttaggtagacaaaatttacttctaagcttatattttttacttttacatttaatcatagttctttttctctgaattttctctaaattagtacttgctaggccaggcacagtgactcaggctgggcacagtggctcacaccgttaatcccagcactttgggaggccgaggtgggcggatcacgaggttaggagttcacgaccagcctggctaacatggtgaaactccgtctctactaacaatacaaaaaaaattagctgggcgtggtggcacacgcctgtaatctcagctacttgggaggctgaggcaggagaattgcttgaaccttggaggtggaggttgcagtgagctgagatggtgccactgcactccagcctgggcaacagagtgagactttatctcaggaaaaaaaaaagattagtacttgccttttgctgattctggagatcatctagctaacaaagtagcctcttttgctgccatgaattttagaagctgtaggtgtggttaccaacaccttctcaccaccagcactagttctaacctgtaatcaatactctttctactcgaactgtgcactgacatctaagaagttttatagttgaacactctttactgtaagtgctgtggacaaataaggatattgactcacagattaaaagttttaagcacgtgataaaagatgactcaatttgaaaataagattactcccatggaaaatgtgttaaaattacatattctagttcaagagctagcttgtaggcatattctagtataaattatgaacatgtcatagttaatatattctaaaactttaaaaaactatcatgatcttagaaacatacatataaattagacacggttccttagtcattttatcacatataataagaaagttttaattcaaaggcaaggctgaaaacaaagattttcaagacattccttattaatgtgttaagtccataaggcacagggctattttactttttattaaaaaaagaagttttcttttgagagagattgaaaatcatctttataattaaaatcaatttgaaaaataaaaattaaaaaaactgttccttcttaaaaaaggaaaaatatctctgcaaaaaaaaattttttttttttttattagctgagtatggtggtattcaccgagctacttgggaggcaggtgggaaaatcacttgagcccaggaagttgaggctgcaatgagccatgatcacaccactgcactctagcctaggtgacagaggaacaccctttctcagaaaaaaaaaaagaaaaagaaaaagaaaaaataatgagctttcttccaagaatgaatacctttacaagttgtgactattatctaagaggtaatgatcaagcattggccattgattaaggtagtgatgcctttgagagagaggaaccatcagtcttaatagtacattaataatgtaaaagtagttcctaatgtagacatttccttttttatttttatttttttgtttgtttttgttgttaatttatttattttgagacagggtctcactctgtcacccaggctggagtgcggtggtacgatcttggctcactgcagctttgacctcccagtttcaagtgattctgtgtcagccttccgagaagctgggactacaggtgtgcaccaccatgccctgctaatttttccattttttgtagagacggggcttcaccatgttacccagactggcctcaaactcctgggctcaagcagtctgtgtgtcttggcctcccagagtgctgtgtgggattacaggcatgtgccacactgcctggccttggcatttcttaatatgcatttaaaattaggtggtcagtcacagtggctcacacctgtaatcccagaactttgggaggccgaggcaggcagattccctgaggttaggagttcgagaccagcctggccaacatggcgaaaccctgtctccaccaaaaatacaaaaattagccaggtgtggtggtgtatgcctgcattcccagctacccaggaggctgaggcaagagaatcacttgaacccaggaggcaaaggctgcagtgagccgagattgcgccactgtagtccagcctgggtgacagagagagactccatctcaaaaaaaaaaaaaattaggtatattgattttgattggagtctgctacatatattatattttgctgatttagaccagctatcttagaccagagtcctttattagcagtttattcataatcatacccaaggattggctaagaattatattctaattaggtaaataaaaacacgtttataaatatgaaaatttgtaatactatttttatggtactcacctatcaatttttttttttctttttgagatggagtctacctctgtcaccgaggctggtgtgcagtggcacgatctcggctcactgcaacctccgcctcccaagttcatgcagttctcctgccttagcctcctgagtatctgggattaaaggcgtgcaccaccacgcctggctaatttttatatttttagtagagacggggtttcaccatgttggtcaggctggtctcgacctcctgaccttgtgatctgcccacttcagcttcccaaagtgcagggattacaggcgtgagccactgtgcctggccacctaccaaattttatatctatgactgaaatatcttaaaatattgacctgctgtttagttcttaaatttcaaatcatgaaattaaataagttttataaaaatatgaagtatgtggtagcagtataagaaagatatttgttcagttatgaaaggtacttgttcagagtataaattctgcccagtttccaatttttctacagaatggtatgtattctgagcctttcttccctaaggaaaaactttcatcaaaactttctctcttgaccgtatttttaacaaagcagtatggttctaggaccggaataggtgaagagaagttaaaaatagattgtctagatagacacaaacccaggtgtacatggaaatttatcaaatgagaaagactgtctttcaaattggtggaggaaagacagattatttaataagtgatgctaggataactgttagactgctagaaggtggagtagagaatgaagttatatctctgcctcaaatcttagattaaaataaattcttaaaagattaagatttaagtataaaaaaattaaactatataataggaagtccctgtgaatatttttataatcttcagatagataaaatttcttaagcatgatatcaaaaccagaaaacataatggaatagtttttgagattttcctgcataaaaaatacataaaactctaatacagggggaaaaaaacataaaaaagacaaactacaaactgtcagaaatattcccattatatgttataggcaaagggttcagattcaacaatccagtaacccttacaaaccaattattgtcaatgctatcaaagaatacaactgtcaagaaatatatgaaagagattctcaacctcagataatcaaaaaatagtaataataataattttcgtttgccagattggccaaaaaaaaatgtttttaattaacagtgctctgtgttgggaactgtttcagttatctagttatctattgctgcataataagccaccccaaaacagcrgcttgaaacaatcatggtcatttattttgctyacagatctgggggtgactggacttggcaaagcagttcttgctcagggtctcctgcagctgtggtctgacagcagctgggctagagtcataatctcaaagagagctcacacatctgctgtctgagctgaaaagagtcaagcagctgctggctagaatggttggagcctctcagccatctccctctatgttctctccatgtggtctctaagggtggttggacttcttacctggcagctgaaggctcccaggccagtgtgccgagagaaacttgcagaagtcctagaagcagcatcacttccatcacatattttgtggcgatttgttgaggcaagtacaaaggcctctgagatgttaagggaagggaagaggagtgtcagagaatctgtagacatgttttaaaaccacacagcaagcctgttgagaaatactcttaggcactttttatgagtttaaaatggaataatccttttggatgacaatctggcagtaatcatcataatttattccctttagctcagcaagaaacttttaagaatatgtcataaggaaataatcagacaagtgttcaaagatgtatttacaagaatgttcatctcgttgtttataataacaaatattggaatgaaccaaatgcctaggagaaatgattaagcaaaaggtggtttattagctgtgaaacataacaatgtcagtctatacttaatgatatgaaaacatatccagattgtagggaaaaaaaataataagtagatgatgaaatggattaatatacctaattttttaaatgtatatacataagagaaagtttggaagggtattactaaaatggtaacagtgtttagccctgagtagtgagctttttcgtttgttgttgttgtttaaattaacctattaatcttaaaatcagaagtaaatcagccatactcttcattttgaaaaaataaggtattcattttcgggttttaagttaaacagaaaatgttttttttgtttttgtttttgtttttgttttttaatatattaatggagatgggatatcagtatgttgcccacctctgcttcccaaagtgctaagattacaggcatgagtcaccaagcccagccagaaaatgtatattttaatgaaaatatttgacttgattctagtgtctcttctctctttgattcaaggattggtttaataaattgctaaattaaactttttttttttttttgaggtggagtctcactctgtcgcccaggctggagtgcagtggcgcgatctcagctcactgcagcctccacctcccaggttcaagcaattctctgcctcagcctcccgagtagctgggattacaggcacgtgccaccacacccagctaagttttgtatttttaagtagagatggggttttgccatattggccaggctggtctcaaactactggcctcatgtcattcacccactcagcctcccaaagtgctgggattacaggcatgagccaccacacccagcctaaacttgtggatttcatttcccaataaattctaaatttggctccttgctctgtcctcactctctgtggactctgtcatttctgacctgctatactacagtaacctccccacttacgctcccttccctcagccttatccatttctgattcattttccaaagcgcaagaagaatattttacaaaacccaactctaatcatgttactcttctgcttaaaacatttcaatactctccccgagcctccagaggcttcattgctctctgacgaagtccaaactagatagcatggkgtattaactccccagccttgttctcccactccatcaagtgctagccatacagaatcatgactctttgaggatttagcttagccaccacctcctacaaggccttctctcataacccaccctttccaacccaccccatgctrattacattctcttactgtatgccctctggcaccttgtcattagcttatagtatttattacagtatcataatgcccattaccgtctgtttcccctattggactctaaattttttgagggtagaaaaagacagctgtgtctttttcatccttgtatcctcataattcagcacactgcctcattcataatagaattttaaaaatacttgtggagtaatgaatcaatccatcacttttcctgaagctataattagatagctaataagattttttttagctggaattaggaaaaaagaaaagaataagatgtataatcagcttttgaatgaaattccaattcctaatcatacaaaatgagaggcagttaaaatagcaaggactgggtttgttgaactgtgctcttatgctacatttgtggccttagagaaattgtttatcacagttacttcctttctgactttttccttgattcctcattctgttttaccatattaggatcaggaatactatataagcaaacatcaataggaaaaaaaatctagaaatgacaacctaaacctgaagcctggtttatttttctcaattataaaataaacattttttwaaaataagaatttggcaagtaaaaaaagaaaaaatgaaaaaatttaaaatcacctgaaagctcacttccatgagatataatcctttcatttatgtttttcctttgtttgtttctatatgtacattttttttttccacacttaatattgcttcaggagcttttttccaggaccactgatccatccccttccttgccacactggcctccttgcagttcttccaagcaatccccaagccctagctactctcctcactgcctctgtgcatgctgtttcttccacccggaacacacacacttccttggaccactgcaagaaaacaaaggatcttggcctaaataaggactgattccacttccaaatctcctctgacttctagcctagaagtctaagaacataaaattatacctgactaatatacaatgcaagttgcttatgttattatgagagtaacaagcttattaacaactctttgtagtttgcttagtgtttctcaaattattcgtgtcttagaagagcagaccaataaacatgtattcaatttttttaatatgtatattttttgaaacaggctataatgcagtggcatgatcacagctcactgcagccttgacttcccaggctcaggtgatcctcctacctcagcctttggaggagctgggactacaggtgcacaacaccatacccggctaatttttgtattttttgtagagaaaaggttttaccatgttgcccaggctgatctcaaactcctaagcttaagcgaaccacctgccttgacctcccaaagtgctggcattacaggcatgagccaccaaagcccaccccagttttattttttatcagcatgagccaccaaagcccaccccagttttattttttatcacatgcacggaatctatcccgtgccttctcctaagcctggaaatccttctactctttttttttttttttttttttttttttaaagagatggagtcttgctctgtcacccaagctggagtgcagtggtgcaatctcagctcactgcaacctccacctcctgggttcaagcgattctcctgcctcagcctcccaagtagctgggattacagactcctgccaccacgcccagctaatttctgtgtttttagtagagtcgggtgtttcaccatgttggccaggctggtctcgaactcctgacctcaggtgatccgcccaccttggcctcccgaagtgctgggattacaggtgtgagccactgcgcctggctgtaagtccttccactttctcctcacctgacaatttaagtatttatgctccttatgctccttatttttattaaaggagaatttataacttcatggggatttctttccttcttcttttttttttttttttttttttttttgagatggagtctcgctctgtcacccaggctggagtgcagtggcgcgatctcagctcactgcaagctccgcctcccggattcatgccattctcctgccccagcttcccgagtagctgggactacaggcgcctgcctccatgcttggctaattttttttgtattttcagtagagacagggtttcaccatgttagccaggatggtcttgatctcctgacctcatgatccacccgcctgggcctcccaaagtgctgggattacaggcgtgagccaccatgcccggcctcttcatggggatttctaatctcacccctttctttataacctacttagtactctggttgtctgagacttgggcccctgtcttgctgtctccagcatcctcaggcagtggttctcaaagtgtggaccacagaccatgagcacaagcattacctgggaacttgtcagaaatgcagattctcagccccacctcaaatctgctgaatcagaaattctggggttgtcagaacttgtattaacaggttctcaaggtaactctgacgtgctcaagtttgagaacctcagcttcagggttggaagagttttcgtccttgaggccaagcctcaagatgctctcagacttcctgactgtgtggatgtttgcatattggcccgtagtaagtctttatagctacacataacagccttctagcatactcgcgtgatctctcactgatctgcctgattctattttctttgactagtatctgtcacacagtctgtggtacttctaattactgcagcctacctggctgggttttatctcagcaactgcaatagcagctaacatccccatcctcatcacctgcccccagtgaccttattttgcccaaagttctagccccctggggtcttcctcaatgccttaagtaaaccctaccattcccagtcttgacaaaagatacgacacatagaacggaaaagccttaattcctaattcaaggcaaaagtgcaaatgacagactaaaacacaaatgcttgggttgaattcatgaagaggaggaaaggtgggaagagactttttgctctatatctatttatattcttgaattttttaacaagatggtgtgttacctactcaaaaataaattattttataattatttttaaaaatgcatagtaaaaataagaatgatcagggaaaatttcctggaggaaatgagttatgagtttcacctggaatagtgcgaggcaaagcttaatgataaagggcatggagcacattccagatgcaaaaagartaactgggggaaatgcaaaccatacaaagaactgtacacagatgggtcaaagagccggcgctgactggtgtccttttaccaaaacatgctgtttttgacaacttgtttaggttatggaattccactgaaagacggagatgagaaaacagatgaagaagcagaggggccatattcagataatgagatgttaacacacaaagggcttcgaagatcgcaaagcatgaaatctgtgaaaaccaccaaaggccgcaaagaggttggttaagtgtagagctgttttcctaatgattagtgaaggatttccctgctgtgttatcatttaggatattaatgatccataaatgaaggattggaatggtagaacagcagtttgatttyttttttttttttttttttttttagtttttggggatagagcttttttgctttgtcaaccaaattggagtgcagtgtggcgtaatcacagttcactcaaactcctgggctcaagcagtcctcccacctcaatctcccaagtagctggaactacaggcacatgccaccgcacctggctaattttttcattttttgtagagacagggtttcaccatgttgcccaggctggtcttgaacacctggcctcaagcaatcctctcgcctccgcctctcgaagtgctgggattccaggcgtgagccacctcacctggccagcagtttatatttaaaattctttattcagatcaatgtatcaggatatcaggaaattttgaaaatggtaaactcttaatcttctgctatacgtagaaaatggcattctcatttagcaaatcacatagttcaaatacccagtcccagccctatgcataaacaaagaaagcaatgaataaaattaaccacacagttttgctttcaactaatgctacatgaagattaaatagtaaacagttaaccataataacatattgtctttatacccagaaagcagtggaggactgtgaatggcctctgatcattataatcaatgttcattgacattgtactaagcaaaacataaataataggattaatgtttttatgttattagtaataatctgtaacatatatctaaatattaccaactacattttttatgagtttataagtagtgctgtcttatatacatttattaagagaattcattctttatatcaaaaaggtaaaaaaattactatgattatgaactattaaatctgatgtaattttttaaagtaatcatctaattcttaataataaaacatttctctcttcaggtgcggtacgggtcactaaaatacaaagtgaagaaacgaccacaagtgtatttttagtcatctacacgtcaaatatcccaagacagattatgctaaatacatcgacttcatcttctaacatgatmtattcaggatttacacattaaaatgattatttaaattgtggcagtgatggggtttactttcatgaatttaaattgtttttwtttctgtaacaattgcttccaaatattgactactaaaggcagttctgcaagatgtactaaatatgtatattagaaattatagaaaatcatgttgtccgttttcaaattcatcaacagcctagagtgcctgagatataagatgaaacacaaatccacagtatacttgaaaggagcctttttacggttcaggataaatcagcctttgtgatgtactgtgtttacctccttttgtgttgtatctggtaattaaataggcctcagattcagcagtgacataacaaggacataatgtaagataataaagtaggttttatatattctttaaatttttacttatataatactttctagtttttccaccatcagctgaaagtttttgaaacaaatatttgaaaaccaggtatccacacatagcacttttattcctgactagttttgcacacttgaaaattgtttacttattttacaactgttttactgatgctatctttattgtttttgccgtattctgacatgtcaaatctatgccttgaattatatcatctcttttcctgtgggtttcatttgttaaattcattggattttaataatataaaagtatagctaattgttcagttttaactatttttaattatcttcttaacaaataagaagttgctttaaacattaaccaattttctatatttagctatacagagtaattgaacttaacatgtttttgtcaacaccaattacattttcagcttttaaaaatggtagcttttgtgaaatagaatcagtgaccagtatagcacttagatcccttctaactcatataatttttctcagccaatccattcacaagcttggcattgacatgtgctgctagtttataaactggcattgacgaaaatcatttgaatctcttctggctgagataatttgccaatgcaaaatacagttgtcattaatcctgcacattrgaaattattagaaacatattactttttaactttaaatctcaaagagattttgagttattgaattcttaaggctttcttagcttgaactgataactatgcattatgaaccctaagtcaatatatttttggtggttttagtgatcagtaatcaaatttgtacttattatgcttgttcaggtaatttacttgactgttctatttgtttgtccaaaagataaaatgatgagagagattcgagaggtctttgatctgtctcccttttaagaaatgaagccagctggtaatgtatattcaggacttcctcagagtattggccaagaacataatgtttacacaggagtaccttggtataatgcatacattgtctcatgatactagtcataaaatattttatggattatttcacattcttcatatataacaagtaaaattaattcagttttcttctcccaacgtttaattctgaataactctatctactttaccctaatttttagcctmttaatttctggaaggactctaatttctattccaaatttctatgaattctaattgtaaattatcggaacagagttktatttatatgayctggtactagacttcttaatataactgttacactgtccttgtctttcctactcaaagacagtatcatctgaagttgcctaataaggtcatgtgagtcaagaactttatctgtgggagctgatttgcaccattttaccttttttttttttttttttttgagacggagtcttgctctgtcaccaggctggagtgcagtggcgcgatctcggctcactacaacctctgcctcccgggttcgagcgattctcctgcctcggcctcccgagtaactgggtctacaggcccgtgctaccacgcccagctaatttttgtctttttagtagagacagggtttaaccatgttgcccaggatggtctccatctcttgacctcgtgatccgcccgcctcgrcctcccaaacttctgggattacaggcgtgagccaccgcacccagccaccattttatctctctaaagtctggtcccagtattaaacctattctttagtaaactcatattactgttctaaattgaagaaattatttattactctgtacttctagactcaaaattctttatcaaagatagtctcaaagaggtagtacaagtcctgtttaactgcactttttcacattcacagtgcttcctctgatatctttccttacatcattatacactgttgatatcattttactcttctttctcttctacatttcttaaattttggttcttttcctgtacatgtgttttagcggggcccttttctttgaactttgtctaattagcctgtacatttttgtttcttttaaggtagaacagatctttttttgtttctccttttaagtctactggttttaaaagaggtaaatgtatccatagaccacagtgccttgctttttcctctgccagcacatggagcacgggattagatgcacaaacctatttagggaactattttggtagatgtttgagtttatacagaaattgcagctggtattttattttgctgtacatttactcaacttgtccattagtatttaactatttccagagtttgtttaggagtaagaattgacccattcgttagtttaccatattttttcctggtataaaaaggagccagaaataagccttattgctaaataattaattatgtaagcccacctaggtcctgcataagatccccctcacatacttcacaatatatakgtgtgtgtgtgtgtgtgtgtgtgtgtgtgtgtgtgtgtgtgtgtatttggctaaaaaattatactgccaaaattactgattataaatacttgactacactgattgatgggacaaaatgattaaagtattttcagggatcttattccatatgtcaccaccaaagatttctacagtgttataaagtatataaatattccaaatttctgtggttaaatatttttttcttttttttccttttttagaataacacagtctgtgctttccaaaaatgcttgaacttttatgttgttaagaaatatataatgatatcttacattaagcatgagtctaatttgtattaattgggatggactaaattttcatttgattatcaggaaaattaaggagttatatatttaaaagcaattttctgtgttttcttctttgtaagttgactcatttgtgaagcaattaggcaaattttgagaagatcattgttattgtggtttgcagtatatatttcttagtaaatatcacttaagattaaatttttcagaaagaaaattatagcttttttcccaaaatatttttaagatttaatctttttgtagtatgctacagatttaattatattaactcttttttaagacattgaccatgacttaacattttgccttctaacaccttttaaatctatgtactttaatagttaagagaaaataagtttgcagatttttaataatctgtttgtaaaaggctatctctaagcctagtatgtgggtaattttacaggtgtgttttttgataactttaatataaaataaactcattttatttgtggcaattcgcgtttctttttttatgccagagtacatatgttggattccatgaattggtattacttattattatgtgttgattaaatatatgcacacacttaggattacagatcacagagcaaattatgaaaatcataaacattctggtatggtcatccataggattatgaaaaagaaatactgaattgttaaatttggatgttagaaaggaaagataggaaaaacaatgagtacrgaaatcctcaccatcaatttggatgggttagctgtctcaggcataaaatgtaacacaaaattcagatytatgtatcctggaaatgttctggggttccatctgttttaaagttagacgtctgtctgcctcacatttaagctttagagagaaatcctatgttttaagaagtttctttgtgttacttcattatgacacataatgcgtgttaaggtctttctagatagcattttaaatggaattattttcattttcattatgaggtatatacttgtaatgatctaaagaggttagaaatataaataaaaattcaaaagaacacaatatatgaacggcattttttttcagtgttttagtctccctttaaatcgttcactgttctgaaaaaagagatttacaaaacaaacatcatgtcagaggctgatgaattgttccctgggaaaacattctacccctttacctactcatcagtattttagtcttaaaacactctccttatggtctgtccttggtaacgttttttaaactgctttttataagacaatgctttgaattgaaattttaaagcacaggattgataattgtctataagtgtaaataactaaaggaccatgctcaacaaaagcaggaaagtcaccatgcgtactgtttaccttacaatcccagattaagagagaaaaaggcaagcgtgttattttggcattatgtgcaaatcaaatcagcatctattttttttttaattcaaaaatatccactgattacctgcttcttatgagagcactgttaggtttctgcacaatgcttatatccaagtaaagtagcatagaattaatttaagggaaacaattcttgctcttaataaaatgaattcaccattaccaaccaaatcaatgtttggattatttgagtattatttattctagaatttattcttggctattgaataattcatgtggttctctcagagcagtttttgttttttaattattggttcccttcccctacctcttacatccaatacattggtaaattgttttggctgtcttatctccagaatacatcctgaatctgaccatctcactcttgaaaccttactacattttcagtagccttgcaaatttttcaaggtgacttttaaccttgagtcccttaggactgccacagtttcttatattttcaaccggtgccttggggaatactcataaaaagaaagttgtgaagggagagaacaggatcagatgcttttgcacatcagtcttgtgtttttctcttccaatcactgtttaatgctgagatttggaaaagatgcgtgaggagagttaatgaagccaggttagaatatctggctgaattctaatgtgttttgacaggatgttaaactactgggaaacatggggtatatgtgggcatttcccccatggcaatgctaagcataatttaagtcactctcaatttgagggctacaatagatatggtagtgctaagagtcaatagtaagtacctgaattagtcaaggttctccaaagaaaaagaacaaataagatatgtagagaaagatttatttcaagggattgactggtgattgtggacactggcaagttcaaaatctacagggtgggccaatacaccagagacccaaggaagagctgatgtttcaagtacaaaggtaattctgctggtagaattctcccttcaccgttggatgaggctcatccacattatggagagtaatctgttttactcaaagtctactgacttaaacactaattacatctagaaaatacctttacagccacatagactactgtttgatcaaatgcctgggtaccatggcctagccaaatttgacacataaaattaactatcacagtatccttaaaattaaattccaaaagctaggcgtggtggctcacgcctgtaatcctagcactttgggaggccaaggtgagtgggtcactcgaggccaggagttcaataccagcctgggcaacatggcaaaaccccatctctatgaaaaaatacaaaaattagctgggtgtcgtggcgcatgcccatattcccagctaattggggggctaagctgggaggattgcttaaaccttgggaggtcaaagctgcagtgagctgagattgtgctgcactccagcctgggtgacaaagtgagaccttgtctcaaaaaaaaaaaattccaaaagaaactccacttcaaaatataaagtcataaattcagtatgtagaaattataaatattttattaatttatcttgtaacgaaaggggatgttgtagcacgtgatgtatttggaagaagaattaatactttataaggcttgtgatgccccttacattcagttgtgataaccaacagtagtatatgtttgttttcacactttgcgaagaggcatcatcccgattttacaaatacgcagagactcactagtgaccaacctgtgaccgggtgcagtggctcatgcctgtaatcccaacactttgggagggtgaggcgggcggatcacttgagcacagttggagaccagcctgggcaacatggcaaaaccccatctctataaaaaatacaaaaattagctggacgtggtggctggcgcacacctgtagtcccagctatttgcggggctgaggcaagaggatcgcttgagcccgggaaattgaggctacaatgagctgtgattgcaccaccacacttcagcctaggtgacacagtgagatgctgtctcaaaaacaaaaacaaaaaacagtgaccaacctacgacccaagcaaccgcaatgtttgtgacttcggactctgttgttaattacgtcacagttggttgtcttagagatcacagaatacttggaaagttaacatggaaatgattccttccatacatgtattatataatacaaaagtttcagattatcagaatgttaaatgaagtaaagttgttaagtcattggaagttaatggatttggtttcaagagtagctttagtacagagagaaaggatgcttttaaagtgaatagaaaaaaatgaagacaaataatttactatcagttatggactaagacaaacaggaagaatctgaagagaggatgcagctgaaacaggaggagtatcctctcaggaagtgctttccttccttcctctcctttccaccaacatttgttccacggcttcctctcttcaaaccacaccttgtaaacccttttatgtgctctgttcacaacaagaatttcatgtgctgttccatactgggttttaactaataaaatgcacacacacacacacaaaaggctaaatgcctttttacacaggagattaactttattcagtctttaagctgaaagcaagtacagttaggatatatagcaggcgacagtttccatatgttctaggaaagtggagctgtattatttatagtttacaacatgttgtataaaattaaagctagcaagggggctcccagggaggtaaattaaacaaagaagggaagacttagagaactctattttgctataatcagagaacatgcctataagaaagcactaaaaaaaataatatttaacattaaacaatatgcaaaagtacttggggtgtttacaatagcttaaattctaaaattaaaaaggacattgaagactgagaaggggaaaaacaccttaattttgtaatcttaatagaaagaaaaatgtgtcctaaaagcaggagtaaataaatgtcattaaaaaggtgtatcttccaaagtgcaaagacacgttacaagaaatcaggttgctctttgacccaccagtctcaaagcacattagactgcagcaagtaataattgcttcctcatttagattagacaatgagtgctctctgcaagctgctctcctctaaatagattgtagagagtaattgaaacaagttatatggggaagtggagtgaccgattcctcaaagtgtgggagcagagctatggtaacctcttgagcctggccttcatcctgttcctatttagggaatccgcggggcagccagtgttgagtgcagtctgcagttcgccggctttattgttcagacttgaagagaaggtcacatgccctctttgacagagaggtttatgggctctctctaattagcagcaccctccaccagacagactgttggccactttccaagaacgggacttggtagcggccactgatgaaggagaaaacaaggttatttaccctgcgactgtaattcttggcacaaattctccctttacactcagacacgttttttcttttgttccaacttgcctttggaatcctgattagggcgttaagagagggaaatgcagctatatatttagtggtgtaagcaacccatatgttggccttagatacttttgactattctaagacctcataccaaaagagagaaagaaaaaggaaaacgaaaagggcagcgtagtcgagcgttgcttgcaaatgtaactgcttaagcacatgcccacacacaactccagaaaaggaagtttaatttgcaacatctataaaataacgacagttgtatggtaggacacagaaatcccagcggtaaagtgtgattgggcttagctattattggagtgttaaaagagtaccgggaatatatttggcttgtcctgttctgtcagttctgtaggccggtggattaagctgatagaaatgctttttggttgatttaaaccagatgctccgactatttttgtcccgtttgcaggcgcagaagctctgcataaggcaatactgcccccctcggccgaccgccaactgcaaggcgtaggagactgctctccactagccacctcggccataaaaccctttcaagtccctattattattccaggcacattccaaggggattgagtcacagagttcacttggcttttctcctgccctgaactgcctgtaccaggtggaatacgactctcaacttcaaatatggaatccaaaagcagtcaaagagcgctttagagcaagccccagatgcgaactctactgccacttctccccctcccccaactggggtttgctggctgcgcagctgtagtcccacgccagcactaaggtcgcctggtcgacaaatgagggttttctttggggcatcctgtagagctgtcctattttctctaccactttgagaagccccaagggctgcttggcggcgaggcacagactgggctgaaaacttttccgttgggcagtgcgtcccggagacccaggaggcccaggccgggagcccagggggctggaggttctgctggcttttaagtctgctaggagggaaaactcccagcccctcccacgcgtcctcccagactcgccggccgcctgccccgggcggggaacgcgcacatctggcggcccaggagccacatctgatgcactaacccccgcacccagatgtccaagaggccgggggagtcaaagaacgccaggggcggggcgaccgcggctgcggctcctccctcgggcagagggagtccagatgcgagggacgccctccagagccgagctgggccggccgggcagctagggtgctgggaggttgcggtgcagggtgggtgggtgcagtgaggctggagccacgctgggggggctgggctggcggggggaggctggagccgcgccggggagagggaggcggcggttgggtgctggagggcgctggtgccgtgccagtgggcggtggcgccttacgccacccgccccacccccgtcaccgtgcccgccccactgcgtgggattttacaacctaggtccccgggaggtggtggtggagggaggggcggcggggacgtttccggggcgggggaggggcgcactgctccagaactggaccgagggcggggctcccctctgcttctcccctctgttccagcgctgagacgcaggcctttcctggcgcgaagcgactcgccccggagctcccctgcaccgtcctgggtgtcaggacgcgtcaacccagatgacccgacccggagatcctggatcctctgccctcttccccctaccaagtccttaaccggagagggaggagctaccaatgtcctccagacgttctccaaagcccgagctgccgggagaagcttgctcaaggcgggtgcgcccctcagacgtttgtttgcacgcaggggttttgacgtttcgctaagcaacagcgtttgccagggaatcagggctgtttcgaagagcttgcgtctatttgatgctcccatcttgaacaaatcgtttccattcgatttgtttaaccaaggcgagggcggactatgttgttacttaaaagttattcttcatccaagct

SEQ ID NO: 6947 - DNA, 44517 bp, Homo sapiens
ccaaaggcacaagcgagcattgtcagatcaccaaaaagatttttttgctttaagccccacccctagtgacttctgattccatccaaacacccaaaattgggtcatatgtcccccgcttagctattaaggtatctgtagagttagatacttttcagtaggtattgacatacaagggtgctcttaggaagtagagaagaatgaacattgactaagcaattagctgtttctgccacaatgttgtgattttactgacttttattgcttgtggtagaaccttacattgcatggactggttctggatttcttctatttcacgtacacaggaaggatacttccacactcccttgaagtcaggcacaaccagtgcctgcctgcagctaatgaagggtgggcagaaacgatgtgtgtagctcccaggctgaagtacctaatgcagtgcctgactgagccctgccttccccaccacagcaatcatggaaataagtgtcaagttggagcggtcttagagtgataaatacaagccaagctctcccacaacccacagtagatggagcacttgagcaagaagcaaacctttgttcttttagcccccaggacttggggcttgtttgttatcatcaaacctggcctatcctgactggtacaaattggcagtaatttctccagtgtcctcaattaaatgtatgtatatgtttgtttaataaataagtggggatatattaaaatgtagcatacatttaaaagccaatagcatttctttaaatataaagggttgaaaagtaaatgatctatccctttttcacagtttacatcctggaatgacactggtttagatgaaaagataagtataggggcataaggaggaagaagatttgaggagttaaagtggctttttgaagaggatacggaagaagatgaggacccctactaaggaaggtccctattgatgggaagcagttatccatcatggagaagctgggccctcctccatcctaataagccctaataaactgatttttactgtttgttttgaaataattttagacttacaaaaatgtcacaccaatagtccaaaggatcctccctcgacttcattcaaagcacaatctcctgcttttcctcctgctgatcaggaaatgtctctgctttcttggcaagctcatccttctttacgtacagttggaatgttagagctcctcaaggcggcccccaggcccccttctctgtgccatctgcactctgtcctcagaagaactagtgtgcacccaggcctttggttaccgcacagcatggtagtgactcgcaaacatgtaccttgagccagaccactcctcacatttccaagcttttgtctgcatattgtccttggtatatctagtaatatccaattgtatacttaatattggctcttctctggctcaaatgaacctcacagtaaagtcccaaacagaacttattcctttccccatctacccacacctggccttcctgtctcctggtgttttctgtttcactgaatgttactagtgtgcactgaagggtggaagccatggatctcgcagtgctgctcagcatctctccaacttatccttcatattctacaacgaatgtcccttttctggggaagcccttcctggcctcccagacagacctaaaactgcccatgtcaccttcactgcacttatgatacttaggattttataattatttgtatagtcacttaatatttgtctcttcagttaggccagccatcagctcattgacagaaggactgctctctgattcagggtggggtccccacctcctaactcacaagctcagtgctcagtaggtgtctattgaatgaatatatgatggacacctttccaacatatgactttgctcctgaaagttctggattcccttcctctccttggtggatcacttaagagagggaagatcagttcacttccccttcattgaatcactcttgtgtattctcaagagatttcataaggtcagacaaaatcaacttctcaagttcaagccagaactctttttttacattaccagtatttcagaaaccgaggtcctcatttgttaaaagacaaagagaactcatccttgtccaagccaacagtggacatagaagagcatgagcacacttggccaaagtgcatcctaggaggaggcccagcatacacaaaggccctgaagccagagctcacctggtatttgcaggaagagcaaggcctccagagtcaggagtggaatgggtagggaggagaggcttttccaacacgagaagccatggggctatttgagagcaccagcagaggaggtgcagagctgaatgtatgttttaaaagtcttaccatagctactatgtagagaagacattgcaggggctgactgcgagggaagaattgggagacagcgctgctacctctcctccgctactctctggctcccctgaacagatttagaaagagaaggtttatggggaaatcaggtggaggaaagaggtcagggaaacagtacagggagcagttctctggtcaacgccaagagtcgttcccttgccaggcatggcagggcttggtcgtggcctgggttttgagccatgacagaggaagttactggcctttgaactaggctgatggatttgctccatcttgggctaggagacaatgattgaggtcagctatcaaagcctttctatgaaacctccaraaagtaaccacagctcagacctaagactgctcagtggcctgagagccaacaacatgggcctgtgaggggagagatgaccacaggccccaagccgttgtccctccctatctgtcccaggctcagacactgccagcttctgcacgtgattcttggttcagccccttaggttcccatgctgtggaaattcccccaggattctgaagaccaggtgagtggcctcagtaggagcacagccctggggtccaggaagggctagacatgacacccatcgtgccccttgctggctgagtctgtggggttgtgcatgcctgggcgggtgggtgtcctctgtaagtggggtcagttactccgccaaccttgatgagctgctggaagtacccagcatgatacctggtatgcaatacacatgcagtaagaatctgttagtatccaagcgtttctgtttcttcctaggtcttttcatggaaagggagaggaggttgtatctggaattcttaccaggtgccattttccatggaaacctaaaatatattttggaatcatgtagagctagtcccttctcctagttttctttttaaagtttcctaattgcttttctatataggtttgtacagattctctaaagtagcctaagaatctgaatggtcctgggttgagtttggtgctcctggctgggaaggggtgaggcccactgctgagaagtgactgacgtctagctgtggccccaaaagaaggtggaaggaagcagcgtccggctctctgtgactccatccacacaggagggcttgcccacaccatcatgacgggctgaatatttggaaacttggaaactcagaattcagttttggtctcctccactctcaggaaacccagatgacatgtgtctgtgcatgcacatggccctttggctacacagggcaaagtgaaggctggtggggcccctggaaataagcaaataaagagcagcccccactgtcttcaggggcttggtgtcctgcagtgggaggtcagtgcccctgcagagcctgccctgtcttgccaccagtgcctcccagaagcctggccccatgcaggaagtgcttatcagtgagattgttgaagagcaaacagtcaatgtggtctctaccacaactggcatgattaatttaggggctgagtcagctggctatgacaatttttgtccccttctgcatatagaaaccaaaactctactgtaggctggttgtggggagagggcattaaactctgacaggttgcaaatgtcctggggaaaatgacctctgctccctctgctcccacccggatccctgctctggaggcctggactaattagcgtctggcaggtgtctggaaagagctgcctggccggccatggtgacatcatggctgggcattgctcccccattccactgctgagaaagtctctgtttcattaggcttccaggattactttttaattttttttaatcccctttgtaggttctggctccaatcagtcttggagaacattctgcacgctccttcccactcccactgcctcaacaactgtgctccagttaaagttactgttcccggaggagtgaggctcaccttccccaggcagcaggcgcagccctacaacccagcccccacacatcagcaccagcaacccacactgctgttgctttatactcatatactagggatggagatttcaatgtggctgctgtgttctcaactttgtgcttttcagatgtttctaaagggcttcttcatcacctcacttgttcctggattgtagttggaatgcaatttagatacttcaaatagttaagttggttcagacatttgtagtcttgggaataatccacttgataagttgtggaataaaaaaagctaaaaacctgtgttcacggaactatacaaaacaaagagtgaaccctacagtaacctagggactttaattaataagaattcatcagtattggttcatccattgtacaaacattccacattaatgcaatatgtttgtaatagggaaactggggtcaggggagagcatgtgggaactctccattgtgtctgctccacttttttaagccaaaaactgctctcaaaaattgtctgttaatttaaaaatagtaatatgagcaggagagaagtagatggtggcatagatgaaataagattagcccatagttggggtaatttttgagaatgggtgatgggtctgtgggtgggggttcattataaattatgaaactcataattttaatacagttttttttaacaaaacttatactaattcaacaatgtgtcttttctcattacaaaataattcacatacactgtagatatttgaaaaatattagaaagtacctataatgaagtcacccaaaaatatctatcatcagcattttgatatggctatatatacagataacaaaatgggggtcttactgaggaagcagcttagggccctgtccttttcttcaactttgtaatgtactaagaacatcttcccatgtcttaaaataactccaaaagcatgctttttaaatagccacataacatttcatggtataactgaagtccagaaattgaattcccaccttaatggccctcgtctcgtctggctgagatcgtcagaggtgtgagtctgccatgcacatcaggcctgcagcagagaagcctgacagtaagaaggccctttggccttggtgtccagctgggggtgaatttctcacattcaagttgtaaatgcacctccacgctgtgtaacagggtggaaaaggcacatttcccctttgggatgtacataacctcgggtagatttactatttacaaaaaggcagaggctggacttgagtattcagggccctaacgtgagtgtcgttgctttccttggaccagaggcccaggtggggtccagggggtgcccaggaatcaagataatttctgcaccactgagtcaccctgaccttccctcctgcccaagaaagcacgtcagagggcaagtgagtgagaatgatgttacagcaataaaattcacttacaaactagcaaacccttgaactcaacctccctcccaactgtggctgcaaaccacccagaggatggcccactggctgcaggtgggcccaggagcccaaggctgggcctaatgatgggtcttctcagataaccatccctctcctggggcagagaatcaaggttaaagttggattgcaatgggacccagaagccgagtagatggaatgcaccctggccagactgtagatcatacatctaatgagacttctagccagatatggaagaagcagattctcagtgcacgagccagttcttccagaagctaagcagatacaggcgccagcccaccaagacctttgccaaaggtattttcttcacatacctggagagaaaagagggcctacaactttaaatctgaggaatatgttttctaaaagccaggtcccttgccaatatatccggatctttatcttggagagtttatctaatcagacaacaccaaggagtaaaatccatacttcagaggaactggcaccgtcaagaaactcacggaatacccgtgtgtctgggtcaaggggagtcctccaccttcacccgtgtgggaaggattgctccatcagtcagccgaattcctgagaatcacagggtccacggctttcaggtgcatctgtggggaggtgccttcccttgtgaataggtcccgtgtcaagagtctcgtggacaccactgaggccatggagctgagtactgggcggattaatcagagattcaagtcctcagtccagagggctggctccaaaggacatgcagtcaaccagatatggaagaagaggaaaggcttctgtcaagggaaacagcctttcgtggaccgcaggaagctcagagaagccagggaacgctactcccagactacagggagccgttctgtagacatgcagtggagacagatgtgaatagagyatcccaccaatwgccgtctccccycatttttaggaaatggatctcctcttcaacgctgtggttggggcaggtctgtttgayccccgaggtactcagatctgcttgcccctgaagtctgtgaaagcaacaaccagctcttccttgatctgactggggagctsaggggactcaaaggaaaccagtagaaagcttcaaagtgacagagacggggctgagrgagaaacgatgccagcattgactactgaggctccttgggcagcttccccaggcctgcccgggcttctttcacttggccctgacaaggctggrtgagagggggcattcttgctcctcatcagaggctgcacatgttagagactctagaacatggaatgttcctctctcagcaagggatggctgggaacatgattccagagggcactgtgacctagccagccacagggggaagaaccccaggtcctgagcgtgctctttgaggagaagrttctgacagagtaggaagtgggctgtggggtcacgttgttcccacttcaccacagtgaaagcctgccaggaaacacatcccggaaatgagatctactctagaaaatacaaggaaggtgagacagatagaatcaaggaactaaaggtaaacaggccatgggacgaaaccactgagagtcaagaaaatgccattttgaaagaacataaggacaaaagactaaactttgaaggttattgagaggtaaaatatacaagcaaaataagctaaaggaattagaataaataaaagtaagagctgttaaagaccaataaactcaatagataatgaaaatgaaaacacttattatccacaatagcatattagttaaattatgatagattatatgtggtgaaatgatartatatctctgaacatagtgttccagaaagaccagcaatgaacaatatataatatgttcttggcatagtacatgataaaagtaaacatagtacaattccaacctaaatatatatatatacatatgtgtgtagacaaataccattaagtatttatagaagcatgtgtgtgtgtctatgcaaatgtgcagcatagataaaaatataaaaggaaatatagcaaagtgctaacagtggttaactctggcattattactaattactaattttaaaaataacagtactttctaaaaactctttacaatgattctgaattacttttattgcctgaaagaaaaagtttttcaaaacttttacaaaaaagtaaaaagatggcttaaatatatatctatggataaatgaagttttgtgttgttttaaagttattctactagagaaatttaatttttacttagagagatgttacacaaggagaaatacttcaaatgatattctttatataatatgaggatataatgttcatttattccttagaaggtatgtattccacattagttcatggatactcttgcccaggtactgggaaggtaacaaaccaggcagacacctgtcctccatgatctcatatggacgtgggagctgatcactgcatatgtgtagacacaaagggaacaaggactgccgcgcctacctgagggcagaagatggagcatgaggattaaaaactacccatggggtattgtgcttattccttattagagacaaagtaatctgtacgtcaaacccccacaacacgcaatttacccgtgtaaaaaacctgcacttgtaccccttgagccgaaaataaaagttgtaaagaaaaaaatctgtcttctaagggttacacagtggctgggagaaatacacaatcagtaaagagcatgcccaatggtgagaagggcaaaaaaaaaaaagagagagagagagcaaaagggatggttggttctaggaatctgctgtaattttaaataatcaaatggtaaagaacaagtccccaacaaggtgacttttgggcaaagacctggaggaggtgatggcgccatcctgtagacaggtgtgcaaaggtgtccaggcaggtgagccagtgccttgcatggccaaggaggcaggaggccggtgtgccccatggagtaagggaaggggagtatatgagggcaaaacgtgactttgggtatgactgtgagccagctatgaggtctggagggccatacgctgagaagaatacagcaaaggatatagctggccagggctgcgcatgcccaaatgcacctgcttgcctctccaggaccctctttcagcaccatcgaagtgtgcagctcagggctccaactcacacttcagctaagggagatgcaagttgctgggggcttatcatcatgtgtttccataaaatatcatagtcagtcaaagtaaaaccaaattcaaattacacaatttggaggaacgaaatatgttaaaaaggacttgaacaaagatagaggcatcgtaagtgggaagcttgaagcagccatgaggctgactaagcacacattgccaggaagcaagtggggggctcagagccttaaggtctaggatgttgtgaagccgatgcctttcaggtgacatccaggacactgagttaaaggcagcaggtcgtccaacccaaccatcaccatgaaagtttcctaaaatgggttgtgtggcagccttaccacagccaaggcaggacagaccattctttgaccagaagcttctgagagaagcagagctgagttgcccccaggcctagacacaggtagcatggctgggtggggaggtccagggtggccatggctctgggtttagggatcaccctggggtcatgaccttagtcggttagtttgatggagcatctttatccaaagatgtggtgctgcctcttctcagtgcatttcatgatcacatattcccagcagacccagagtgaaagggagctctacagcaagcacaggacacactgaactccagactgccatgcccggtggcctcctcactgcagcttcgccagggaaggaaactactccaacctcaggagaacacacgggccactgcccattcccaagaatgacacagagctggattggggaaggcttccctgccaatgtcagcacctgccatgcaagtgaggactcttctggccagcttggctgctaggttcagcagagtacaatgagacggatccctcaatgtaaattccccctggtctgaatggaatgtagctctctcaagagggagcctgggaaacctggagggcctgaggacctagagaaatctgtgtgattatttccatttttggtctccatcatcaggagattgcaggtttcagtttttaaaatatgctctttagtctttctccagccattattgatggagagcttgttaagtctaaaaaatgagagttcttggaattatagattgaatcatggatgaaacctcttaataaaggggctatcctgacacattcttctaggataaaccctcagcccagtcttactttcccagtttctgagaactactttagggaaagtccctgcttctgtgcacagagttaaccagtgctactgttctggtggttggggccggttgagcgactgtgttatcagtggagccgctctctttattgtacagaaacagatgstttctgcctatggaggaagaaaggggaccatggctgagtggcgtggagaagcgcagcctcagctcgctggccaggccctgactgtcaggtcaacaccaacagttcgtggtgaaacgtgatacttgacacctttcctgaggagctcaaggctggaacctagggattagatgaagctttacgaggcagtcactggagcaaggcgatagagccatgattcacgctgcccccaatgagacccgccaggcctcatttgtcctttccagggagtggtagcagccgtcacagtgcccagcactttgccatttacaaggaacttctgcattgattattccctttgagactgagaccaatgtgtgagattaagtgaagaccacatcaggagagctaagtgacttgccagaggtcgtgagaggcagagtggcagggcctgaacttctgaccccaagtggactctcttggggagcctcctgttcctccgcactgccctgctgtaggtgagctcacactgtcaacatagtccaccactgctcacactgtccacatagtcccccactgccatgtacaaacgccttctctaggagtccgaattgattgggctgagcctatgtatccttcaaaacaaggagtctccccagcagacttcctcctacctgcagaggtgagctagtcccctcttctctgggctacgcctgtctaagtggtcagctattgtttcttactactatgtactataagtgacttatttgcatgttgagctcttagcctgtgaattccttaggacagcaactacttctggacaggtggagagaggagagttcttgagcatgtggtctttggaataaggctgcctaggatgggatcccaggctcaccacataagagcacttacaagaaaactgcttcactctctgtgccttccttctcccgtctgtaaaataggggcgagaacaatattgccaacctctaggattattgtgaagatgaaagcagctaatcatgtaaatcattggaacaaacatcctaaatgtgcatgaattgtaaaattgatcaattaaatgtagtatattcatgcaatggaaaaaatattctccatctattaccaggaaacaagcacatctaaacccatcatcattgtgctcagtgtgatcatcatcatcatcatcatcatcatcatcatcatcatcatcatcgtgtttgcatcctgagcttctaccacagccggccacacagcaggtgttccataaaggcatgtcaagtgaatgaacaaatgaacacatttatcaaacagctggtggcttttccctttgagactgagaccaacgtgtgaggtctcagccgggggaaaacagaaatgttcttaccctcatctggggcagtcacagctgcctggaccatatctaaaaacactacgatcactgcttcctcaacaaaataatacacaggaaattcaatgagttgaatttagkgttcctaagttaatttacccaaatgaaaagcaaaggactccaggccaaagagtcaggctcacttattcattaataaatattgtacaaactaagaaatcttgtttctgtccaggcaaagttgcctggctggaaatgctgggagcccatcagaaaccccaagcacatggatataggatggaagagcctggaagggaatccaatatatccttcctyactctttttaggatgttttagagcaaactaaargggtaaccaccacagaaaactaccaacacagagattttcacacaaagctctctggggtgtgcatgtgtttgtgcagttctttatgtgtgctctgttgagtcattaaagggaaaggaagcagtttcaagaaacttgtaatgggaaatgggatgtttacattgataagctgtcattaaaaaaaaataaagtcaagtctttcgtgttcaaaaaagcagctatcaaaaaggaagagatcttttgtaaaaatcagaaaatgccaaaatctcagataattaaagtatgtgatatttgtataccatgttccatttacaaagctcttttaggtgatttaatttttgaaaggttaaatatgaatttttataaataaacactgtagtaactatcatatgatctcaaacagaaatatatcagaatttttactgcagtctttttcgttatagtgaaaaatctgaaatagcagaaatgcaaatgaataggtgagttggtgaattaartgtggcatattgatacaaggggaaaatatcacagagaaattgtaaaattatatatatatatatatatatakatatatatatatwgatcgacagggataaattccaaaaacaatttaagtgtaaaaaaaggaactaccagtatgacatagtgacatttatggtgtgataaaacttttacaaatttccattaacttccatatggaaaaaaagttccataaacttccaatgatatgactgaccatagcagcagggtagtttttttaatgttccaaactccttaaaactaaacagatcaaatatgaaagtggaaaaaatgaatctrtggataacatcttcaacaccaccaggtaatggagagtcctttatgacctgaataaaagtagtggtgagcaggagtgtgggaggtcagcagctgtgggtctaagttagggaaatgagggaaaagccaacgtaccctaaaagtcatgaacaccaaaacaaaagaaaatacaaacaaagacaccaacaaaactcacatccaagattttcaaaacctactaggaagattgagaaaacaggtataatggcatatgcattgtttgtgaattctcctgagagcccctgtccttataaacagagctcctaggaagacccaaaagcccataggcaatataatatatactaaaacatctagatgacaacgtatcttcataaacccaaaattataaagcaggaacaagccacttacagctatgtgagctgcatgagacaatgacacttctagtaacactggcaaccaacaaacaaaaaaattccaaaaagtacaaattagcaagacaggtcaatctgagaacagtagttgaaattttgaaatagagtacttatttttcaaaaactattttgtttgtgtggataacaccagacaaaaataacaaaacatttaaaatggaagaaatatcagattggcatcagacattttaacagcaacattttgtgccaaatgacaatggaattacatatttaatatgctcaaggaaatgaatgaggccagggattttacatccagttagactaatatttaaaggcttaaggcagtctcttattaaaaaaaaaaagcaaaaactcaacacatcttactcccatgagtcactcatgaggcgtctactggaactaaattgccatatggagtgataatgatgactgtcaaaggctgttaacatcacaagagaaaaatcagacattatgtgcttcgttgttgaagtacacaactacctatgaaayattcttgtcaaaaaaattgtatcatccagatctatctaccaatctacatgaaatacagagaatagaggagcatgtcaaataacacaatggagagaaaatcagtaaattcaggcagggaaaatctctacacaaaaayaaaccgtttccttcaacaaggaataatctgacatttgccagtttttacaaaagctctcttattttttgatagccactgttttggacaggaaagacctgacttatttttttttaattacagcttatcaaagtaaatatgccattttcctttgtaagttccttgaaactgctacctttccctttaatggctcaaaatcaaacagaaaaaaaataaaattgttaaagtaaacagctcatgggtaagctgcagcacaacttcaagcagtctggcatacatgtaagtcgagtctctaaaggggaagagaacgaggagagaaaataaatatttaaagaaatgaggactggaattttccaaatttaaggaaaattataaattcacagatctaagaagctgaatgaaccccaagcataagaaatatgaagaaaactacactgaggtacatcataaacaaatttcttgaaaacagtgataaagagtatattttttaagtagccagagaatgaaaggtatgtcatatacaggtaatcaaagacaaggataacaaatttcttactgaaaactattcaaacaagaatgcaatagaggatgcaatagagcaaagagaatgcaatagagcaaatttttaaggtagaggtgagcaaaaagaaaaactggtgaaataagaattctacatccttcatattgttaggtttaaatctatcatctcatttgttttgtttttttctcatcaattctttgtttccccctatatgtatgcctttttaaaattaaatattttatatgatcccattttatgtctgtttttgcttattagtaatggttatgatttgtaaagtgtaattatgtttcaaaattaaggacaaaataaggactttcagtcatatgaaagttgaaatcatttaattcaccagcaaatgcaaaatatacagaaatgacaaagaaagtaccagatggaaatgtggatctgtaaaagtgtatgaagagcatggagactggtaaaaacaaaagtaaaatatgttttattatttaaatatcttgaatattatttaaatatctttgtttaaagagtaaatattaagtatttaaacaaaaataactatagcataaggtttatataacatatgtagatgttaaacgtatgacaataatagcacaatgccaggagagcagaaatggaagtatactattatagggctttattaagtattcatgaaatggtataatattagttaaagacagactgcaataaattaaagatatatactataaactctaaagtaaccactaaaatactaaaataacaaaacaaataactatcacaaatcataactatcactagcaggcaaaaattgacataaaatggaattatacgaaatatttaataaatcttaaaaaggcatacaaataaaagggaaacactcatgagaaaaatacagaataaatgagatgacagatttaagcctaacaatatcaatgataacattaaatgtaaataacctaaatagcccaattagaagacagaaattgtcagctaaaatcaaaaaatcaagacccaaaaaatgcacttaataaagttgtgggactcaaaattaacataaaaaattagttgcacttctttacaccaataacagtctatctgaaaaaagtgtcaagaaaacaatcccacttatgatagcatcaagaggaataaaatacttaggaatatatttaaccaagttagtgaaagacctgtacactgaaaagtataaaaacattgggaaaagaaattaaagaagacacaaacaaatggaaagatatctgatgtttatggactggagtaatgaatattgttaaaatccccatactactcaaagtaatatacagattcaatgcaatctctatcaaaatcccaatggcatttctaagtaaataaaaaaagcaattctaaaatatatatggaaccacaagagataccaaatagccaagacagccttaagaaagagtaacaaagttggagacatcacacttttggatttcaaattatagtaccaagctataataatcaaaagagtatgttactgaccaaaagcaaaacaaaaaaaaaaaaaaaaaacaggcaaatagaccagtggaacagaatagagagctcagaaataaaaccaagcaaatatagtcaaataatttttgacaagcacatcaagaaggcacaatggggagaaagatagtcttttcattaatggtattgggaaaatataaatttaaaattatataaacagacatttctcaaaaggagatatataaatggccaataaacatatggtttacatacaaaagaataaaattggatacttacatcatacacaaaaattaactcaaaatggattaaagacttaaacataagacctgaaacaataaaactcctagaagaaaatatagagggaaaactccttgttattggttttggcaatgattttttgaatatcacacaaaaagttctggcagtgatgcaaaaataaaaaatgaaactacaccaaactaacagcttctgtacagcaaaaaaaaaactaacaagatgaaaaggtagccaatggattgggagaaaatattttyaagccatatatctgataatgggttaatatccaaaatatacagggaactcatgcaactcaatagcaaactaaaaagtaaaaacaacccaatcaataaattggcaatgacctgaacagatatttttccaagtaagacataaaaatggtcaacaggtatctgaaaaggtgctcaacatcactaaccatcagggaaatgcaaatcaaaaccatgatgagatatcactttacacctgttagaatgactattatttaataaataaataaataacaagagataacaagcgctggcatgggtgtgcagaaaagggatctcttgtatgctgttggtgcaaatgtaaattggtatggccattatggaaaatggtacagaggttctttgaaatattaaatataggactaccacrtgacccagcaatccctctgctgagtgtatacacaaaggaaatgaaatcagcacttcataaagatatctgtgtcccatattccttgtggcattatttacaatagccaagatattaaaacaatgtaactgtccatcaatggatgaatgaatgaagaaactgtggtatacttacataatgaaatactattcaacctttaaaaaggatatactgccatttacaataacatggatgaacctagaagacatcatgttaagtgaagaaaaccagacacaaaaataaaaacagtgcatgatctcacttacatgtgcaatccaaaaaattttactctttctacagagagtagaatagtggttttcagggtaggatggggaaggaatggggagacgtaggtcaaaggtacaaatttgcagttaggtaagatgagtaagtctaaagaactaatgtacagcaagaggactatagttaataatattgtattatatattgaaaatttgctggcaaagtagattttaggtgctcttaccacaaaaacagagattactgtggaaaattatagatatattaatttgtttacctgttgtcatttcagtatgtatatgtatatcaaaacatcatgttgtatatcttaagtacatgcaataaataatcaattttcaaaatacatatataatcaaaaatgcattttacataaagacacaaatagattaaaaatgaggggaaaaaatataccatgctaacactgatacaaagaaagctaaagaggccatattaatatcagacaaggtggatttcagagcaaagtgtgttactaaagataaaaaataccatttcaaagtgttaaatggatcaattcattaagataatatatacatcctcaatttgtaggcatttagtaacagtttaaaaatacacagagatactaacaaaaatagtcacaaaaacaataagagaaaaagaatggaaaacatagaccatgctagcactaatctaaagaaaattggactgactatagtaatatcagacaaagtagatttcagtgcaaagaatattatcagggataataatggtcttttcatattgataaaagggtgaattcatcaagaggacgtagcaattgtaaacatttatgcacctaataacagagtttcaaaatacatgaagccactatgataaaatattttaatacccttcactctacaattaataaaacaaagagagagaaaagcaggaagaattttagaagacctaaataaaactatcaactaacatgacatgattgacattaatagttcacccaaaacagcagaatacacattttttcaggtgcacatagaatattcaccaagaaagaccatattctgggcyataaaataagtgttaataaaaccaaaaggattcaagctgtatgaaatttaaaattatataaacagacatttctcaaaaggagatatataaatggccaataaacataggaaaaaaatgctcaacaacactaatcatcagggaaatgcaaattaaaaccacaatgagatcccacttcaccccagccagaatggccatgattaaaaagtcagaaagcaacagatataggcacaatgttgtgaaagggtaatgtttatacactgctggtgggaatgttaaattagtgcaacctctatggaaaacagtatggagatttctcaaagaactaaaagtaggcctaccaaaggaaaagaagtaattatagaaaacacacacacctgcatacataggttttttttgtttgttttcttatttggttttggtttgggttgggggaagtgctgagctttacatatttattaacaaggtaattaatcagtagattaccatagagcattatttctttttttttttcaacttctatttcagatatgggggtacatgtgcaggtttgttacatgggcatatcacacccaggtattgaggatagtgcccagtaggtagcttttcaacctatgtcctcctccctccttcctccctctagtagtccacagtatctatttttctcatgtttgtgtccatgtgtgctcaatatttaactctaacttataagtgagaacatgcagtatttagttttctgttcatgcattaatatgcttaggataatgactttcacctccatccatgttaatgcaaaggacatgatttcattctttttatgactttgtagtgttccatggtgtatacataccacattttctttatccaatccaccactgatgggcacctaagttgattctatgtctctgccatcatgaataccatggtgatgaacatacaagtgcatatgtctatttggtataatgttttatttttatttgggtatatacccagtaatgggattgctgggtcaaatggtagctctgttttaagttctttgagaaatctccaaactgctttccacagtggctgaactaacttattatacattcccaccaacagtgtataagtgttcccttttctccatggccttgctaacagccattctgactggtatgagatggtaccttattgtggtttcgattgcatttctctgatgattagtgatgatgaccattttttcatatgtttcttgtccacttgtcttccctgagaagtgtctgtttaatgtcctttgcccgtttttaatgggcttatgtttttggcttgttgatctgtttgagtcccttatagattctagatattgaacctttgtcagatgcatagtttgcaaatattttttcccattctgtaggctttttattctgttgaaagtttactttatggtacagaagctctttagtttaattaggtcccacttaccaatttttttgtttcagttgtttttagggacttagccaaaaattatttgccaaggccaatgtcaagaagagtatttcctaggttttcttctagaatttctacagtttgagttcttacatttaaatctttaatctatcttcaggttttttttaatatgatgaaagatcagggtccagtctcattgttctgcatatggctagccagttatcccagcaccatttattgaacagagagttgtttccccactggtttttgtcagccttgccaaagatcagatagttataagttatggctttatttctgagttttctgttctgttccattggtctaygtgtctgtttgtaccagaactatgctgttttggttactgtgcccttatattgtagtttgaagtcaggtagtgcgatgcctctggctttgctctttttgccttaggattgctttggcaatttgggctctttttttatttcatatgaattttagaattgtttgctaattctgtggagaatgacattgggtagtttcataggaatagcatcgaatctgtaaattgccttgggctgtatgactattttaacaatattgattcttcctattcatgagcatggaatgtttttccatttatttgtgtcatcactctgatttctctcagcagtgttttgtagtcctccttgcagagatctttcacctccttgtctagctgtattcctggtatttcattttctttgtggctgttgtaaataggattgtgttcttgatttgactctcagcctggacattattggtatatagaaatgctactgatattttacattgattttgtatcctgaaatcttaccataattgtttatcagttctagcagcctcttggcagagtctttagggttttctaggtatagaatcatattctcagtgaagagaggtagcttgatatcttctcttcttatttgaatgccttttctttctttctcttgtctgcttgctctggctagaacttcctgcacccatgtttattggcagcacaattcccaattgcaaagatcaacctaaggcccaccaactgatgagtggrtaaagaaaatgtagtatacacataccatrgaatacttctcagccataaaaaaagaatgaaataatggcttttgcagcaacttgcatggaactggaggccactgtcctaagtgaagtaactcaggaacagaaaaccaaataccacattttctcatttgtaagtgggctctcagctatgaggtatgcaaaggcatgcagagtggtataatggaaggggagagggtgggaagtgagtgaggaatgaaaaaatacctgctggatataatgtacactattctgatgatgggtatactaaaagcccagactccaccagtacataattcacccatgtaaccaaaaaccacttttacccctaaagctactgaagttttaaaaattaaaaaagagaaaaatatatgccatgtaaccataatggaatgaaattaaaatcaacaacagaaatgtctctttaaaattctcaaatacttagaaatcaaataattcactttctaaataagcaatgagtcagaaaaaagtattttaatctgaataaaaatgaaaacataatatatcacataatatattataaactgtcactaaagcagtttatgatttatagcaataaatgcctgtgttagaaaagaagaaagactcggaataaattatctcagtttcatctttagaaatttgaaaaataagagcaaattaaacccaaagtaagcaaaatcaaggaaataaagatgagaacaaaaaaactgatgaagtagaaaacaaaaaaaatgaagaaaatgcaatgaaaccaaaagttaggttatttttaaaaagaaataaaatttataaatggccagacagacttctggagaaaaaaaaaagaagatgaaaaattcccaatataaggaatgaaggaggtggcatcattacttgctttacagttgttgatgaaaaaagggattattatgagaaattttatgccaataaatttgcaaacttcattgaaattgacaatttccttaaaagatgcatatcaccacaactaattcaagaaataactgggggaaaaaaagccattatatctagaaaaaagttgaagtcttagtttaaaaccttcccacagattgaactccagatccagatggctggctaattctatccctggtaaattctatcaaatgtttaaagaggaactaataccaagtctacagaaatttttccagataattaaataagagaaaatacttcccagtcattgaaygaggccaatattactcttattccaaaataagttaggcattacaataaaagtacaatttaatatccctcctgggtatagatgcaaacttctttttaaagcatagaaaattgaagccagcaataaatacaaagaacaatatattatgacccagtggggattatcccaggaattcaaagctaatttaacattcaaaaatacatcaaagtaattcactatgttaacaaattattttaaatctctatgatcatttaatagatagaaaaaaaawttttgacaaaattcaacttccacttctgattaaaaactctcggcaaactaggaacagaagggaacttccacaacctgatcaagggcatccattaaaaaaattctacagccaatattatacttatttgaaggactaaatgctttttcattgccctttctgccccccaagattgggaatgagccaaggagtctactcttatggcttctattcaacattgtataggagaatctagccagtgtattaaggcaagaaaaggggggcgcaagaaaggcaccccgattttaagggaagaataaaagctctctttattcaycaaaaacatgatcgtaaatccagaaattcctaaggatctacaaaaaaaatactagaaataataagagagtgtatcagggttgcagaatgtaacatgaatatacgaaaaccaattatatttatatgtacttacaataaaaaaagaacttgaaatttaaaaacaaaaccattaacaatagcatgaaattatgaaattcttagttataagacttgtacacttaaaactacaaggtattgctgaaggagactgaagaagatgtaaatgcatgaagggatatatgtgttcatgggtcagaagactcaatattatgaagatgtctgttctagaaacagcacactatccaaataaactcctagtcagctttactggaaaaaatgaaaaggtaattaaaaattcacamggaaatgtaaaggacataaactagccaaaacaactttgaaaacaaatgacctaattcataatttgtcataaagttataataattgagacaatgtggtattggtataaagatacacaaatagatcagtgtaacagaatagagagaccagaaattggcctacttatatatggacarctgatttgcaaccaacgtgcacagactatgcaaagaataaaaatagctatttctgcaaatgggattgaagcaattgggtcatcatgtgcaaaacaataataacataatagctttgacccattccatgcaccatgtgcaaaagttaactcaaaatggatcgtagacctaattctaaagsctgaaactataaaacttctagaagaaaacataggaggaaatctctatgacctttggttagacaaagagtgcttaccatgatccacaagggaaaaattttataaatttgacataatcaaaattaagaacgtctgctttttaaaaggcactattaaaagaatgaaaacttagatgtcagactgggagaaaatatttgcaaatcagttttttgaaggagtttaaaacccttaaaacttaaaaattaagaaagcaaacagctcaataaagaacaaaagagcaaaatatttgaagacacacttcaccaaaggatagatgaggagtaggatgatgaaactggaaggtagaagtttattgattgcctcttggtattagctgggagtgaaaggatgtcactttctgacaagtcaagtaaaagaagcttgagtatattgaagaccacaaagattatcaataaaataaaactggtatctaaaattcaaagcttaggaagagggaggagaaatggtgtctatagtaatttccatatttctcaaagtaggaacccaacagagaatatctagagaaaaagataactaagtccttatataaatcattagtacagaagtaatcactacaacacacacacatgcacacacaaatcctcctggataccaaagtcagtgcccaataaaagcaagtaaaacgtgacctrgtcaaactgagaacatgccattcctatcaataaatagaaataggcttagatcatgtattaaaagaaaagatttatcaaactaactaatgaagcaaaatccaattctatactatatagaagtgagcaaaaaagattaagaaaaggtaaaaattaaaagatgagaaaattcatactagtcaaatcttgatatcacagtagaattctagtcaaaaagcagtaagcaaaacaaaaacactttttaatgctaaaggctataatttacaatgaagatataacttattaatatttgtgtatctgataacacaagtttgccaatcagaaattatggcatactaaaagagaactctccacccacatactgaagactctagaacataggtcagctgtgctcagagaaaaaaatcatagtattaaatatctatatcaaaaaaaggaaagaaactaatgttaaaaaaaaacagaataaatcagaataaagagtagacactgagttagaaaactaaaaaacagtaaaactgataaatgatcaaaaagctattgctttggaaaaaaatccacaaagaacagaaaacmctagcaaaaaaaaaaaaaagcagaattatacaaatagaatgagacaaagtgggaaaacattgaaatagaggactttttaatattttaagataatactttgctaacttaatgtaaataaatttgacaacctaaatgaaataaataatatttaggaaaatataatgtatcaagtttgaatctttagagataaaaaatctgaagagctcaattactatagaagctatggcgaaaattgcaagacttctcaccaaataatacacccggccctgatggtttcacaagggaaagaattacaacttccaaattcttttttacaaaacaaacctaacattgatatcaatatctaactaaatattgccctaaaaagaaaattataaaccaaattcacttataaatactgacataaaaatcttaaaagtgtgagcaaacagtatatgtacaaaacaattgtcatgaccaggtgggattcgttccagaaaagaaagcgattttcgaaagcctaatcacattagtgtktgactcatggtatctatatcttcaagaagaaaagtcatgtygtttcacacgtgctgtgccagttatcaggctgtcgtccctgagcttccagcctgcgctcctcacttcgctctgcaatgctggggctggtaccctgcaaaccgcatcccagctccgctggctgtgcctgctaggccctgcagtagacgggcagaagggaggcggccaggctgggggcatcactcttcctgtttgctccctcttcagccagtatcatcccatcctcacttcttcacctcaaatgtggtggtgtgttccaggagcagcacttgagtccagtttgctgwttgcacttgctcctccagccagccgctgcctccatcagacgtctgggtctggctccaggagcccgtcaggcctcaggacccagcctgagctcagggagtggggggatttgcagagggctgagttccatgtggcccctcctctcccctttgtcccccacccacaacctctcagatgtcttagcagtcccttcttgtcatttagtgaacagttctttatgttaaattattttcatttaaaaataggcatggtttctgcctccacttaactaaatctgacacccattgctggtatttaaaaatattcagttaagaaagaattgttggatacttccctgacatgatttcttagataaacaactccaccctaaaaccagcatcttactgagaggtgaatccggctgggcttctgggtcaggtggggacttggagaacttttctgtctagctaaaggattgtaaacacaccaatcagcactgtgtctagctaaaggtttgtaaacgcaccactcagcactctgtaaaaacagaccaatcggcactctgtaaaatggaccaatcagctctctgtaaaatggaccaatcagctctctgtaaaatggaccaatcagcaggctgtgcatggggctaaataagggaataaaagcaggccacctgggccagcactggcaattcgctagagtcaccttccagtttgtgaaagctttgttcttttgctcttcgcactaaatcttgctactgcttactttttgggtctgcactacctttatgagctgtaaggctgattgcgaaggtctgcagcttcactcacgaagtcagcgagaccagaaacccaccgggaggaacaaacaactccagaggggccacctttaagagctgtaacactcactgcgaaggtctgtggcttaactcctgaagtcagcaagaccacgatcccaccagaaggaagaaactgtggacatatctgaacatcagaaggaacaaactctggacacaccatttttaagaactaacactccctaggagggtccagaagggagaaactcagcacacatctgaacagaaggaacagagtcaggatacaccatctttaagaactgtaacaatcactgcgagggttgrggccttcattcttgaagtcagccataccaagatcccaccgggaggaaccaattctggcccattaccaaatgggaaacgggttccccatgagggcgctgtgttggagtggtagccagggcaacagacaagagaatacaacaagctcttcgctccaaattctgacctgaaactctggaagagacactgttgcagggaaaagaactaggggcatgatgggaaatacaatgtagcccttttgggtaagaaatcatagaaacacacatataaatgtatctccttatattggcaaaaagaaatactcgaaaaacaaaccaaaaactaattttttaaagtggttacataaagagggaaggagaaacaaggtagtgaggataggaatgaaagacttcttagataccacctagagttttgactttaaaaacaaaatgttttacatacaataaataatgaaacgcatttctaaattcatctgaattcagtttccaaaacaattcccaaaacaatctgaaatgaataagcctgattatctacctggttggtaacataacagtacaaagagaagactgactggtagtgactttagaaaactgttgactgtgaagaactgctggttccaaaacacagttccccacagaatccacatcagaaaatggctccccatgctgtgcagctctctccaccgagctmcaagtttaattctccagtgggtgcatctcattgctgggccatccagcccacgtggaatcccaggcacaatgacaactggaaaatacagttttcaggtttctccattctgcacagaggactgtatatcgaccgcagattaaaaatgaattgagcacatcaatccatattatgtgtcacctggtaggctcaggcccttcgaacgtctttcatttgcctcttgaagatttggagtatagaaattttagaggaaaactcatcctgaaaatctgtaacaggattataccatgtaactaacgtgtcttatgtctttaaccagggtcgatgtttagagactgtgaggaaaaaaccatgtctaagatatccagtgtgccctagatagcaccagggcaagcgtgaccacgcacacagtcttaccgtggttgtagttccaattacacagggagggctctcacttggaaagaagggtatataattttgtgctttctaaataatcctaatgggatgtaattttttttttgaaggtgtggtctctctttgttgcccaggctggagtgcagtggcactatctcggctcactgaaacctctgcctcctgggtttaagtgattttcctgcttcaaccacctgagtagcttggattacaggcgccggccaccatgcctgactaatttttgtatttttagtagagatggggttttgccatgttgaccaggctggtcttgaactcctgacctgaagtgatccacccgccttggcctcccaaagtgctgggattacaggcgtgagccaccctgcccgaccaggatgtaaatttattattactaataacatcttccaaattccattcattataaattcccccaaggaataccgtttaaaacttgtccggatgaaaaagggaaataaaagttaagcttctgaaaataaaagcttccaatatccctagacccagttatgggttggctccaaatcacccacaatactttcaggggtcttagaaccaatctcagctatgatgctcattcaatgatcattgttggctgatgaatttctttttttttttttcttttctttttttctttttttcttttttttttttttttgtttttttggagacagagtcttcttctgtcacccagactagagtgcagtggcacaatctcggcttactgtaacctccacctcccgggttcaagtgactctcctgcctcggcctcccaagtagctgggattatgggcgcttatcaccacgcccagctaatttttacacttttagtagacacgtggtttcactatgttggccaggcaggtctcgaactcctgacctcaagtgatccaccagcctcagcctcccaaagtgctgggattacaggcatgagccactgcacccggccggctggtgaatttcttagctcaacttcctggtccaacaaattctctcattgcgtaatgtgtgcagtgttctgcaattccagtcttgctctactcgtggctaggtacctcagacaaggcttttaaccttcctgtgccaaggcctcctcttgtaaaacaaaggtagctagtgttcctcccattttttgtgaggattaaatgaattaataaaaatcaagttgtttgcaatagcaaagacttggaaccaacccaaatgtccatcaatgatagactggtataagaaaatgtagcacatatacaccatggaatactgtgcaaccataaaaaaggatgagttgatgtcctttgcagggacatggatgaagctggaaaccatcagtctcaaaaaactatcacaaagacagaaaaccaaacaccgcatgttctcactgataggtgggaattgaacaatgaaaacacttggacccagggtggggaacatcacacactgcctgtckggggttggggggctgggggagggatagcattaggacaaatacctaatgtaaatgacgagttgatgggtgcagcaaaccaacatggcacatgtatacctatgtatcaaacctgcacgttgtgcccttgtaccctagaacttaaagtataattwaaaaaaaaaaaaaaaagaaaaatcaagtgctttgaagagtgtctggcacatatgaagtgctgcacaattgctattactcttttcattatgtttattactactgttactccccaatgccagcagatatcaagatagcaatgttctagatacattcagaattcaagaatcacaaacactggcagattgcctgccgtccgagataatatttctcccttggaaaagaaaaagaaaaatgtagtctatgtagcaaagattatctagcaaatattataacatgatgaatcctttattagtgtttataggggaaaaagaaagaaaatcattttccaaacagtagaatttcgaactaagaacaattaggtctgaacattcctcatggctcagaagtgacagaccaccctggtggcatcctccttcgacaggccacaggctgagcatccaaaccatgcagtcagcagttcagtggcaagggagcctctgccttcaacacaaataaaatccatgaaaatgaggagtgagggggagagcctgctgcctaacactctacatcctgatgcctctgaatacaggaattgcacagatgagaagagaagaaagaaagacacagcgtgtatctcactgtcactgggcagggaccaggttggggaggacagagtggaaaaagtctgatcatttctgcaaaatggtgtctatgtttgtccgctgtgctagttacagtcctttccctgtggttatttcttaaaagatggaactaaaaggccaatacttagaaaaaaacttaaaaggatttaaaaatcacaggcagaagttcagatgacacaccacattcagactgatggtgaggaaacctttcccgatagagacctcggtctctttagaacttcacatctcagaataatgaggagcaaaactctaagtaaagcaaatcatttttgcaattacatagactttgccagaacaactgtgaggaaactgaatcagtaatattagactctgaaagcttttttccctccaccaastaccacggacaattttatacaggacaagaatttccagccaaaataaccaaatattttctttaccacctggcatgctgcttcttccagcttgtgtggtacattgctagaagtttctctgcagaataaaattaccctctgggagctgggtacatgggttggtggttagagctactctggacctagtttggtcacttggcagggaaagcatcagtaaacagactgagtgaggaaccatgggtaagccatgttttcaggaagcagacagtctgtgaggtaggagatttaaaagaagaaaaagaaactgtattgtgggcggcttctattcttcctgggctaagaagtagtaaaggagtagtggccaaaaaataaaaactgtgctatcaaaaagagagaagaaaaagagagataccaacaaccagtagaaaagtgagcaaaaccgcatggacggttcagagaagcaaaagtgcagatgctttcaaatatgggaacagatttcaatctcactcttaaaagaaaggcagtggtatttttcacttaacaagttggcaaaattcaaaagctgtgatggcaaactgtgtgagtgatggtgcggagagatcaacactctcctagctattattgcaagtgggagtgcaggtttacaagctcaggggagagcaggctggcaaagcactcagcaccagaagtgtttgactcaaggacaccacttctacaaagtgagaaactgagtatttttttaaataagtctcaaaacaatctaaatgttcacaataggggactgaataaattatggtgtgatcatacagtagaatattatacaagttcgtaaagaaggaggcctgtacgatttggaaggttctgcaaggtacagggtcaagttcaaaaggaaaggaagggccacaaaagtaccttgttgtgctaccacttgcatatgaaagctcctctgaacaaatgcagatgtgctgccgaggtagcggacayctctggaagctggcagcaagggctgcctggagggagaggaaaatagtgaagcaagagatacccaaacccattaaaaagtgtgctgtatgtctggtgtctatgtagatgcgtgcacataaatagaagaaatattgagcgttcccacaggcgtgagctgtgttctgtctgtactgtaagcttatgggtgacttgtatcttcttccttgtagtattttttgagtttgtaaatatttcacagcgaaattagatgctttaaaacaaggattgttttccttctaaaattctcaattatctccaccaaacaaaatacctgggccaggcacagtggctcacgcctgtaatcccagcactttgggakgctgaggtgggccgatcacctgaggtcaggagttcaagaccaacttggccaacatagtgaaaccccatctctactaaaaatccaaaaaaaattagtcaggcatggtgatgggcgcctgtaatcccagctactccggaggctgaggcaggagaatcgcttgaatccaggaggcaggggttgcagtgatccaagctcgtgccactgcactccagcctggtggcatagcaagactccatctcaaaaaaaaaaaaaaaacctgctcagttaattcagtcaaaacaagccttttgattgtggcacactcgagttgcacagtgggattggagccggaatccccatctccaccctcggaggacagtcagggctcaccacccacccacctggggagcctggcgcccagcagccccacactccctgtgttccgccaggccccatggaggctgcagaggcagggcgggatatttggggacagagttccacttattgtctctctcaggtaaagccttcccaaacggtgctgctatcggaattgaagacttggagctattttggttgcattcttggccctgagagacaggtttcctgttaatactgttttgaccgagattgtttgggcctctccagcgggagaccagatttagatcaaacgcacaggatcctcctgctgcaacaagaagggcctgggacacccagggaagtccaagcccccgctgttagagggtgggaaacgggactggggtgctttctctgctgccccaggaggccctggtggagaaaggcccgcccgcccggagccacacaaagcccaggaggctgggccggcagtgtggaggtcaaagcatcccgggccccatgtggaaggtgagtcccccctctggggcccagggcccggctgaggaggctcacacagtcatactcagagtgccagccctcacacaggactgtttagggcctgccactggtcagccaccatttggagttgctgccgggaacatggaaccaaggagaccttgggaggcagggtctgtcctggcctctcagactaacctggcagatgccctcrcacaggcaggaagagatgctgatgggaggcttgaacgtcccagtgttcccacggacacttcattctcaaagggaaagaagaaaagggaaggcctgcctgcccaattcgggtgtacagagagggaccgcaatgtatgcagcacagtagagacagctctctggagatgactgtcgggtgcaccatgcccaggctggggagacctctgaagcaggcaggagggtactatctggtaaccacagtccctggggtagttgagtggccaggkcctaagcagaacctactctttattccatatttgcattccatgttccctttgcaaggctggggaagtggctccagcatctgaattagggccttgaccttttcacaggagccagtaatgactgcagtgaaaccttcaatagagcctgcccataacctgctgaagtgtggcttttggaagagccaggcttatttgtttccaaagtcttttcctttgagtctttgtttgatcgtggacctgggaactggcatctgccatctctttcctaatgtgaccttaaatcatccaagtgactgtgggaaggtggcctgcagcacccagcctgggcctctagaaagagattgtgactttattgccagaggctggaagttagtagacraacttgtgaggcacagttattttctctgaaactggaggaacacagccaaagtgtcttctcccattgtagatgacaaactgtgaagacatgtcttaaagtctggcgagagtcacccctttcattgcaaagttaatgaaagaaaaccatgtgttcacaacaagacagccttttcctaaaaatcctgagtcgttgtgtcaccattcaaatgtcagagaagtgtccgtgctccacttaagcagaagacaaaagtaatgtgaaaaaatagaaagaattcaggtgtcagaagaatggtcttgcaatatgtatgtaaatgaaaatggctttttacctgaagtaacccttcaggtcagtggtcctcactcaaagccaggagcatgatggactcacccgaaatctttgatagtatgctgacacctgggcctcacccagaccaattaaaccagaatctggggagaaagggggagactcaggtatctgtgtctacctcccaggttatctgaacgtccagttaggattaagaagcactgatagatttgaactttcacttaggtttactttgtaataaatggccttcccatctgtgacctcaggcctgaaatgaataggtccggttcagtggcccaccagggactaacccaaggctgtcagagtcccagttataaatgcacatcttctctggaaccctgccacacaagtaaaggaatcgcctttcttccaccaaactgcagtccgtgcacagaatacccagccagccggccagcaagaaggaggcacccgtggctggcagggcaggcccaatgctggccgcaggctccactccatcagccctggcctctattggccttcaggcttgagccctggtgtgtgaacataagtgccctgctagaggcctggagggcctgaagacacatgttctgggtccagcctgtggcccactcaggatcagccaagggatccagttaagtgggtcaagactctggatttggtccctagtaagccatttagttttttagagaaaaactgtctttccgtacactttgattgttccaccacgaggagacatccttcccaggaccgcttcaccgatccgsagatgctgctcctgcactgcggcatccgaatatgcaaaacgatgatcaggtgtttccagagtattgtggtaagaatcagagaaaaccaagtgatacatcctaaaacaatattggaatgcagcggataattacatgatcatttttcaggaaacatatcaataatactttaaactgatggtcaatcatattggtgtctcaggtacacacagaccaaaacttagcaaactgtaccctttaaccatgtgcagtttgttgtatgccaattataacttcatgtaactattcaaagaaaaaatctgtgtcccagcactctgagtttgggacacagttggtgatcccagcagccatgttctgttactggaatctgtgtgtttgctgagtggatagtcctggaatctgcccccagcactatccacgcagcaaacacacttatgagggtgttgaccacagccccagttccaaggtgtggggggtggggtgggggtgggttgtctaaagcccaccagtcctttgccatagtcattggtttagggttagccctgtgccctgagtccaccaagcaggctaggtctcatcactactgccagatcccagacagtttttgtcctccctctgaggtcatagcatggggggtaaagccctgaacatttgccaccaggggagaagcagctttagaattaagcccacagttggtgggaacgtaaaatgggatggtagctatggaaaatggcccagtaatccctcaaaatattatacatagaattctatgaaacccaacaattccacttctgggtacccacccaaaagaaatgaaagcagggactcaaagagatttgtacacccatgttcacaacagccttcttcacaattgcccaaagataggagcaactaaacgtccactgacgggtgaatagatttttttccagtgtggtctgtctataccacggaaaattattcagcctgaaaaaagaagagaattctgacacatcctacaacatggatgaaccttgagaacattaggccaagtgacataagccaggcacaaaaagacaaataccatgttattccacttatatgaggttcctagagtagtcaatttagagagacagaaagtagaatggtggttgtcagggctgggaggaggggaatcgcagttatttgtgtaattggtatagaatttcagttttataagataagagttctggagaaggatgatagtaatgattgcacaacaataggaatgtccttaacatcattaaactgtacccttaaaatggttaagatggtcattttatgtgatgtgtattttaccacgattttttttaattaaaagttttttaaagaattaagcccacataacagaggacagccaagcctggagaacagctgagaaacagacctggagccctgtgatcagctggctctgtggctgacttctcacatttccacattgcttcagccagtttgtttcaggctttctgctacctacggcttaagtcatcttcattgctaccttgtacatgaaagaaggcattaccgtgagcttccagaacaccaatccagtggaacttctagtccaatgcctacctctcagtcagattaaacattacctgatgtccaaacaagagttggtcctgtgggtgatcaaattctgaccctgactttcaacagttcttagcccctagaccctactgcacttcacctgtccagtccctgggccacaccacagactttgtcatcaaacataatctccaaaattgcacgctctgttcctttatcacgatccgctattctcacaaccctcccatcctcattcccacacacccagcctatgacactcaactctgaagtccactttccagcctaagctctacgatgttccgcgttggttcatgtgctaagcacctcggctgtcctcagcagttcctatctccctggtcagttcccrttcttttccctagagtggctctccagatcctacagcctcctmcgtcctccagcacgctctccgtcccgagtttccaggtcatctctccctccctctttctctcactctggttcgtatttccagcctcttgcccacaacctctacacttagtcacgtcttcccgtttcccatggttaggaaaacacgtttctccacctgctgttccctgccagctgccaccctgtcgctctccttcccttcacagccaagcagctcacaacattcgcctgtgttcccatccccacctcccaacatttccagccaaccactgtcaggtgtccagcccccagccactccagtggaaacattctgttaaaatggctctcacccaaatggctaagcccatggaccttttccagacagcctcctgcgtgaattctctgtcacgtgtggtgtggttcccttgactgccctgcgcccttggctccggggcaccttctaagctgtcctcccgcctctgacattcttcctttctctgactctccctgggaagttggggtgctctatagagcactgtctgcggctctcctcactttccatcctctgtacccatcctagggacttcatcccatcccacatcttaaattccaagaaaggtctggcttttgcctgactccaggagtaaacctctaacccctggccttagagtgtcctgcctgagaaaastgtcttttcctggggccttgggccatgccacatactttatggtgacaatgtgatttagtcaagcgggaggggagttggtcccaggccatgtggtgtgaagttgacctccacaggggctggagactaagcagctaaggtcggtcgcttgggcaccccatgcttaggtgaccaacttgcagtgaaacccctagaaaccagggctgagactgcctggctgccggtcctccatgtgttgtcactcgtcattgcrgggagaagtaagtgcttctgtgcagacccactgagagagggcaactggaagctgactcccagcctcccctcctcctttcactgtaataaaccataaccacccgcttcacagcttttctgagttctgtgagtccttctagtgaatcgctgaggctgaggatggcctctgggacccccaaaayagcacaccatgtcatcaagtcctacactaatgactcataaatccatattttcttctgcacatgtctcccaagaaccccatctacacacataacaaccaagatgtctcagtgacactagagatttgagttgcccaagttggtcttctgcattctgctcccaactcatttctccttgtgctttgctgcaaatcaagccagtcgtgtctaagacctggcaggcatctcaccctccagccctcctgtgcctcccttccctcacctgtgatgctacctgtgggcttctctgggtccttcctgccttctgggctcactgctcccctcaattcagccccccaccatgtcagctggaccacgagatcaatactctctgggtaggtctccctacatccaggccacacccctccaattatccccactacagacaacakgaacctttttaaaaagcaaaatcaggattctagttcaagagcatgaaattgaaatctataggaaggtataagaggtataaaaacagtaagaacctataacaatgaagagaaaggccattagtgaaaaggacatttcaacagtttttagagtcaaaagtgaatgagaacaaattaacagataaatcagagtggagaaaaactcaccttgttgtacaaccctcagcaaagccttgcactttggagctttccacaagagttgaccaggatgtttattaagagacactaagctcaggacctctgcagatgcaacagttactcattccaggctttagggagtctatacccagacactgacttcctgccttcacacactgaagtgacatttgcccactgacaatcccttaacacaaactggggcctccagccagccatcctctcaggaaagaatcccacctgcagagacagcagtgtgaagtcctggacaatagtgtgagatcctacctgcagagacagcagtgtgaagagctggacagcagtgtgagatcccacttgcagagacaacagtgtgagatcccacctgcagagacagcagtgtgaagacctggacaacattgtgagatcccacctacagagacatcagtgtgagatcccacctgcagagacagcagtgtaaagacttgcaccgagcaatcagtccctaacacctaaatatgtactatttggtttgtgaccataggaatatggtaatttacaatcttttagcttaaaaaaaatgctgtgcaactgttgtaagtactttccagtttaaaatccttcagtggcttcccttggcctgcaagataaaaatccaccttctttcttagcatcaagaatctcctgctacagaccatgttctcatcaaaccctgtggtattttacagttcacacatatgggtcagctggcaacattatgcttcttggccttgactcagcattctctctgctcagaatgcacttccccacacctgccattagatgaacgctaacacagctcaaaaatttgtccaagtgaagattacttacaaccttccctctcctaaaatcatttaaagtcagtcccttctacacaagcttttaccagtgttcccatgatattttattacacttgcaaatttttttttttttttgagtcagagtctcgctctgtcacacaggctggagtgcagtggcacgatcttggctgactgcaacctccacctcccgggttcaagcaattctcctgcctcagcctcccaagtagctgggattacaggtgcccaccaccctgcccagctaatttttgtatttttagtagagactgggtttcaccatgttggccaggctggtctttttggccaggctggtcttgaactcctgacgtcatgatccgcccacctcggccccccaaagtgctgggattacaggcaagagccaccgcgcctggcctacacttgtaaattaacctgcctgtctgcactttgtgctctgggagaaacctgtgcaccccaggcttacgatatgggagagcctcggtatatttccaaaaatgaatgagcaaatggcatttagggatggacttgtcattccctgtgggactgatattggctccatcaggtgtcttatgtaagtgggaacaataacgccagctacaatgtaggatttttgtgaagataataatgatggataaaatgtatcaaatacagacaatgccaaacgctacccgcagcactttatacgtgtttaaattcattctcataataacactgtatgattggcacaattatctccattttatacttgatgaaattaagactcagaaattaagggacatggccattccagcatcagagggagcgtctggtgcatggcaggccctcaacaggcgctagctccctttcctgcccccacctctcaaatctaggagattacaatgagataactgggagacacaagggaggcatagcttgtgttgaggagactatataacagagaagctaaatttcttaatgctgttttataacttctaggaaaaacacatctcccagaccaaagcaagaatcccctgcaagtttcacctggatctgtccacctaggcttggaatagaggtttcatgttcactccacatctcagaaacacccttagttataacctctgggaagagatctgtcaggttctattacatgccggtgagtctctctgaggccagggttgttagtctgactgtaataataataacagttatagtaggaatagcatggcacccacagcaatagaaggaggaatattaacagaggacttactaaccaccagatcatggctaggcacttgaattaacatatttcatccatttgagataattactaacagcaatggcagcaacagtagtaacagcattgtcagtggtggcaatatctaatgttaactgagtacttactctctgccaagttctagactacacccttcacaattattagcacatttgacccctatcaaagaattactattatctacatgttgcaagtggattccgtttctgaccaagagggagtaaccgggtcttgatttaccctcttgtctgaacccacaaaaataataaataaaatatatgaaaaaatagtttttaagacactggccaacaagcaatggaggacggtgatccccaagagatgggcacaaatgaggtgacccatctgattgccccagcttactggagacctctccagccatggggcagggagagggatagcaggagaatacaggactcctaagctgaggcaacaaagaagcagaaaacacagtgagaagaaaaatcaaccaatcaacactggcccagaactgatacagatgttcaaataagcaaacaaggacactaaaacagttattataactgcattatgtatttgcaaaagttagctacatggaatctgtaaaagaggcaaattgaacttctagagataaaaactataatgtgtgagatgttacaatgaaaaatatattggatgggattaacaacagattagacattgcagatgaaaatattagggatcttaaagaaagagaaactatccaaaataagacaccaagagaaagaaaataatcaaaaattgaaatgaatagagggtgtggaacagaaaaaatatttgaagaaatatggctgaaaatttccaaattcaatcagagctataaacccatagatcaaaaaaactcagcaaactccaagcccaagaaacttaaagaaaactacaagacacctcagtattaagttgctcaaaaacagtgataaagagacaatcttaaaccagagtaaaaagacatattacatacagagacagagatgaggatgacagaagatttcttgtctgaaacaatgcaaaaataaagcaacatttttaaagtactgaatgaaaaaaggcatcagaaaaggagattagcattatgtagagctgaaaccaaaagaagacctagttaacgccggatcccatctatttcagggtgcctagaaatttaatatcagacttacagtttcaaaaatggactttattaactatcataaacaaatataaattacagtcagattaaagacataaatgtcagcgtagagttccatatccagcaaaaaatatgtttcaaaaataaagactgtttgcagaaataaaaagctaaaagaattcatcaccagcaaacatggactaaaagaaacgttaaggaaacttctcagcagaaggaaattgagaccgcatggaaatctggatctatgcaaaggaataaagagtatcagaagttgttaactgcatgagtaactgtataaggttttattcttattaaaaaataataatgatgtaattgtgtcatttacaacatatgtagacataaaatgtatgacaacagcacaaaaagccaggagggggaaaatgggaataactatcatgagattgtaataccgtctataaagtgctataaatacactcaaagatcaactatgataagctaaggacgtatactatgaaggctaaagcaaccattcaaatgataaaacatagagtcacagcaaacagaccccagtcttcaggtcatctcatgcctgtgagcaaaaccacgctccaagcagtgtgaagcagatggaaggaatgagaacctggacagcaaggaacccgaggcctggggctcaggtttcccctcctggagagactcacctttgaagctgcaggcctctcattacagttccatgtgcttctcagcctctcatattcttccctcttgaaataccccatttgtgctttttttcaaagaacaaggatcagaagagacttctctaattctttccttgctttccaaaacaagaaagaatttcacaccttcttaggagctaaggacataggcttagaatggcaagcagtggatacctggaataactgcctcacacatccaggtagaaaggacttgagggtggagtcgactattctcaaaatgtcagagtactagaatccccacatacccctgttgtctatcagtgacctggtctaggaagaaataagtgaccaggtgtctggctgagcagaccagttttttgtcttgctgaatgggtgtacaagatgaagggcagtgtcaggaaggacacagagagccagcaaaaaaggaggagagagagattctgtaaaaaagaaaaaacataggaaagctgagtatgctgctacggggagaattgaggaaaagaggaggccattagagatgtggtgacaatgttggttgtaagcacttcctcctccgtctcccccaagaacctcagtaaatatctgcattgcctcttcaagtcagatctggggcttggtgaaaaaagaacagctaggactatcctcaagggaggcctggggtgcccggtcacacttatgtcgagaaaggtggttgacattcactcaggatttcattggcttgttcatctcatcagtaaatgtttaataagcatgttctgtgtgccaggcactgttctaggtgcttaggtttcaccagtgaacagcacaaatgtccctacattgttgccagagaatgcaataaattataaagagaataaataactatacacagaatgttagaacatgatgagtagaatggaaaaacgaaaaagtagaggagacagtgattttaaacagggtagtcggggtacaatgcccccttggtaaagtgatacttgcgttaagccttgaaggaggtgagggagtgagctatagtttggatatttgccccgcctccaaacctcatgtcgaaatttgattccgatgctgaaggcagggcctggtagaggtgttcgggtcttgggagaggatccctcgtgaatggcttgtcactggcctagaggtaatgggtcagttctcacatgagagctggctattaagaagagccaggcactaccctctctctcttgcttcctctctccccatgtgacctctgcacagccttctccccttcacctcccaccatcagtggaagcagcctgagtcccccaccagaagccaaccagatacggcaccgcatttcctgtacagcctgcagaaccataagccaaataagcctctttttttataaattacccaggcttaggtacttctctatagcaacacaaatggacaaagaaagaatggagggcaatcgaggtgggggaaaggcaatgcaaaagtctggaggtagactttcccaaaactgtataatttcataaggacataatggatggagaggagaaaacctatggtggctattaaggccctgatgccacatatgtcaaatggatatcttctgatggtcatgaatttgttgtaaaaagacaacatgcattaacatcaggcgtgataaaagccatgctgagtggcccaagtcaacatggcttgagaatgaaaccagtgagttaattttagagagatcccttaacagtgctatcaccaaatctacgtctgattggtgtacctgaaagtgacggggagaatggaaacaagttggagaacactctgcaggatactatccaggaaaacttccccaatctagcaaggcaggccaaccttcaaattcaggaaatacagagaacgccacaaagatactgctcgagaagagcaactccaagacacataattgtcaggttcaccaaagttgaaatgaaggaaaaaatgttaagggcagccagagagagaaagatcgggttacccacaaagggaagcccatcagactaacagcggatctcttggcagaaactctacaagccagaagagagtgggggccaacattcagcattcttaaagaaaagaattttcaacccagaatctcatatccagccaaattaagcttcataagtgaaggagaaataaaatactttacagacaagcaaatgctgagagattttgtcaccaccaggcctgccttacaagagctcctgaaggaagcactaaacatggaaaggaacaaccagtaccagccactgcaaaaacatgccaaattgtaaagaccatcaaggctaggaagaaactccatcaactaacgagcaaaaaaaacagtgctatcaaaaatatttgtgtattttacctataaagtt

SEQ ID NO: 6948 - DNA, 18724 bp, Homo sapiens
tcttgctcttggaggtgagtcctcctggcacccactcagcatcctctcatgggtcctgtcacactcagactctgcatggtggagggacagtcacccctttctcccatgtttgaagacacatatcagtctcaggacagattttcaacttccagggctgatatcacaggacattctagcaactctatgtgtggggactttcaacccaggccagagagtcatgggatacaaataaaacacacaaacaagctttaatgctgcctttaagtctcagtaaggaacaaagagaagggtcccaggacaaaaaaaaaaaaaaaaaaaaaaaaaaaaaaggaagtatggaagtatggaagtattacagagtatcggctagaaacagaaagacaatgtgggggaggcgaggcagtgtttctcaatatgaactcaaaaagctgttttttctcatcaggccactaaaaggatagaacttttaagactgatgattggctccagagatgcacaaaaaaaagcaggatgggtgcatcaatcaggacaggtaccaaatctacactgaaatctgtggcctatctcaacagtttatttctcactcatgggatacctaaagcaggttggcaagagactcaggaactacctaaatgtcagctccactttggcctgggaaataggagcacagagaatcacccaacagcttttaaaaacatcactaactcaaatgggcagacctagtgttgtttctcacagcactgtaagggtgccaggaaacgtggggtatttgggtatttgctcaccaaatatccctctttcctccttccacacacaacataccttctacccaaggaagacaaccccaaatcccatagtcactacactctgaaaaccctgggacatctctagatcaaggctggctccatctatctcccactggtccagagctgtattaaccaaaaacatccctcatctgtgctcctctccacataccccaacacagtgaagagagtaatgcatccccatgctcaaagcgcataggagaccttagtctgtgacaatttctctgctgtcctgaagggcatactgctcgttaaattattttgaatatcactactgtgcacagccctgtttgctgtcaaaatgggcaaattcctgaaatgtaagaaagaagtgttggtcctacccagaagctattgcatacacaaaactaatgtgaatagcattgatagatcctcaaaagggccccatagccacaatcctgccaaggagtgacttggatataatagggcggccaaagatcactgctttcataaaaaactgtgatcacctcatgtttacaaaacaccttgtgaatatcttgttgaatggcacttgtcaacaaggccataacaaggccaacttctatggccctgcactcaaatgcaaggccaggaggaaggcaaagttcaagtttgaggaaatcagaaacaggcaaaacaagtgatccatccaaaagctgtgactttagatctattgtctaaataattaaaacaattccccagaagaaaaataaacagaaggtagtagtatacaaaatatttcattttttattttcatgaataattgtcattaatacagcagaaaccgatatgattataaaagataccaaaaaatcagaagaatgttagcattcaatagaaattaaaacctgagctgagggctcattagagtctgacacttggcaccattctcatggaagtgaagaaacatgtttgccggactccttaaaacaattcatgtaacacagaaagagttaaatttcaaaggagctacaatgtactgacacattacgactcttgttgttgacaaacatttaagcagggctatccaaagctcacagtcttgaaggcagggaggtgtgtaaattgtaggtttttaattaagcagtaagcaagctgagatttttcttggtaaaatagtttgtttattcatgtagatctaaaaggctggctcagtttgtcagagcacaggagaatgccagaagaggtcaagggcatggggatgtatcgacatgaatccatcccaacttgtggaaaacaaacgacacagcagttaccatcacaaagaactctattagtaggaatagaagacttgaggtccaattcagttctcatttggattctatagtatctctaagaatttggttaaaaaaaacaaaacaaacaaaacaaaaaaagggaaatccttactcctttcattaacaactgtccacaaggagaagaaataaaagacaactaatatagataggccttactgattaaaaatctgtgagcttgaatacattttaatatgttgaatctagagtgataaaccaatggttaatatactacaaaactttacaaacaaaatctcatctgttgcagaacttcaaaagtagtggaattgatttcttctcccttttaattttttcttccacaaaagtcctaaaactgagtagtcattggcatgcctgcactttcacaaatgtatcctcaaaacatgatggtttttctcaaaatgtatctgcaaaacatgatggtttttgaaaatggaagtaatttcaaatgaggtcaaggatgtcatgctccctcaaaacatattttcagttctttgtgctccatgtcacataaaaaagaaatgagggtagctggactcatgtaatttctttcagctcaataatgtcattaaattcccaatgttttcacactagcaaaagatccagtatttaagtgatctactataaagcatctctatttctaaaaaagattcctttcattttttactttttattttttcttaagaggtctcaaaaagctgtcaaaaagccctatacttaacggagaccagccacagacttccttcctgtaccagctttccaagagggtaagtgagtcttcaccctgatatttttgccccgggttttacgaggcttctcttctttatgcaccttcatgtgctgcctcagatgagagctctgactgaaacatttgccacattcactgcactggtagggtttctccccagtgtgggttctctgatgttgaataaggtgggagctctggctgaaacaccggccacactcatcacactgatagggtttttctccagtatgaattctctggtgctgaatgagatttgagctctgtttgaagctttctccacactcatcacatttgtagggcttttcccccgtatggatccgtcgatgctgaatgagattagaactctgaaagaaacttttcccacaatcagcacatttatgggatttctttccagtatggatcttctggtgttgaaaaagagttgaactctgactgaaactcttttcacattcagtacatttatagggtttgtcatccaagcttcttctgagtctactgaagcttgagtcaaatcgaatagtcatgccccacttctgccgctgccggcctgttttgcgcttgttctcataggcctttccttggcttgagctccgagaaatacccgctttaggctttgctaacctcatggtgaataaccaaatgtatttgtaagagagtttacaggcttcttctgaactagtgtttcatttcctagaggtgtacagctcagaattttctgtgtgtagaaggaaaaaaaatttagagatgatcagaaaaaaaattacagatatctgttaactattcaattttaatatctcttcaacccaccaaaattgcattcatgtttaaatttaaaaagtataaatgcaaacaaagataatatggggggaaatttgggggaaatacttgcaaagtaattctaacaattccagagtttaagcttaacaaatatcaccaaattttgactgagtttaccactggagtttctgtctattgggacaagacaaattaaaagtgatcaggtgaaatataaatcttccaagcattaccaaatgagtacataattttgaagaactaaaaagtggagataaggtaaatcttaatgggaatggagtaactccaaaagacaatcaaaatttgtgtaacagaacattactatgctttaatatttagttccatgttaaacttctactaactagtaactgcctaaggtatccaaatgaataagaaatgacaaattacactactttatgatatcttcctgtttatctgtatttagcattcgatttccatagctctagatgacagtttagctctaattctgtagcataaagtgttttgaaaattgaaacttctctacagggagtggtaggtttacttagtctatgaagacacgctttattattggtttttatagatcctaatgatccaagaaagcaatttgttgaaaacccaaaacgaaagtactgttttcggagacagaaaaactgcaaaagaacttttaccagaaagtggaatgaaactgagtagaaaacgcatggtaggtaggacacaagaaaaggagaggggggagaaaatgagtttacatgtaaaactaggatggaatttttagaatacccaaatgctgcaaaattcaaaatttcaaatgattttatttatttataaggctgacttgtggctatttaaaataacggccaaaacaaaccaacaaaaacccctacaaaccccacataggtggcaatgtcggaaaatctagaacttcaaaagcaataaaattattggaactatttttcattatcttgtgtcagaatgtggaatttaaaatagaaacaattattctgggtttctttgcatacaaacatataaagcaaataaatgaaaacaaaaacataatttttcttgccttcctttcatcttattgtataattgagactttaggtccaggactttatctggatatttaataattacatcagctgtaattatggtcagcgtaagagtaagccgcatataacacaagattacagttaggactacccactccttaacttaagcaaatatttacagaacatctaccacacaggagacattgtgttaggtacatggtgttggtgttgcttttttttttttttaataactataatggtcattatacataaaagcacacgcatttaatacaatggaagtcagatctagtcagaaactcagactgtcaaatccacctacggatgaggcaatcatactagtatgtgccagacactgtgtaacttgattctgtgctagctctttaattctcctggcacctttatgcagttatttccgttttaagttaaggaaacgagggcacaatgctagaaggcactggccgggttcccagaccctagcagtttgactccagagcctgtactcttagtggcagccacatcttccattgctcagtccagcgcggcgacccgtgctttgcatagctccccagcaggggcaagcacgaagttaaacctgagtgacagaagctgctgttcttgcacacccagctaactggaatgtgcctcagtttcctcgtaaaatggggagggtaatgataaagtggcaacaccatcaagatgttagaagttgcaatgagtctgaatctgaaaaccgctcagagcagccctgtgctgcctaagcatttgttccacgtatctagtcctcgaacgctccgagcgacggaaggggccggggctgctgctcacccgcccagttccacccgccgcgggccgcgcctcgcccgggcccccagtccaagcctcccgttcccagcactccgccggccgctcctcattgacccggcccgcccgccgcgcaggccgcggccccaccctgggcccgcgtggccctcccgcccccgcccggcggccaggccctgcccggaggcgggagacgcaagccacgccatcgcccgggcccgcgccgccctcgttgcggccagcgcgctcccgagcggacccgagtatccgacgcaggccccgagcgccccaagtgccccaatcccactcaccgcgcgggaccagccaccactctggctcgctgggcgcctcccgcgccgccggaagtgagggcctcgccgcgctctggcgccgccgcggtcgctctaggaaagtggcggagcgaccctctatggtcccgggcccacccgaaagcgttgttcgtttcttcctgtggttttgttttctcctccccccaactcggaaggcgtcctgtgacccccgggacctcaagagctgtaaccgcccctgtgtgtggtcgaggcttttgaaaccaaactctagcctctccaacctagaaactgcatactttcyacaaawtttgagatttttgagaccctggtacttttcacgaagtcaccttaattatcaccaaaaagctcctgcaagatgggagtggttatactccatttacaggaaaggaaccaaggctcagagaagaaatgtgctccgttcaccgtgtgtaagcggacgacccagaattggaatggttctttgtggctccaaagtctgatttcaacacaccccttttgttgctcattagtaatgatctctctttgttcttatyccttccaggctcctcctcagccatcctggccgtgctcagtcatctgaccagctgacctccgtgttcccccactccctggggagctcctccgccttttggcttccaatgctattgctgcatgctgaagactcccgcattggtaactccagtctgactgtgggacataaatgttattgaactttagacttgtatatcgaactgattactcaagagctgcatttgcatgtgtaatggacatcccaaacctaacataccccccaaatgaattcctgatatctacctaacctgttcttgcaacagtcttcttcccagggatgggtgaagatcccatcatctttccagttgctcaagccaaaaaccttgatgtcactgttgtctcttctttttttcatccaaaattcacctgtgatttatccacaaattctgtcggcttcatcgttaaaatatattcattatcaagccactttcaacacttccactgctataaccaccaagccaccttcatccaccttctggattattatattggcttccagacgggttgccctacagtctattcacggccccagagtaatcctcttaaacctaagttagatcatgtcattcatttgttcaaaaccttcaaaggcttcccaacttattagagcaaagccaaggacctcgcagtggcacccgatgcctctcatgatctgtctctttagttctttattgtgtctgcagtgctgaaaacagtgctcagcagggaacagacactcagtaaatagctgttgaatgaatgaatttataagatgccttattgtttacaaagtacttttacatcttatcttctggttattcatcttcaccatagtctcatgaagcacagattatcatatctgtcttgcaaatcagtaaactgaagcaagagaggctgacctgcctgaagtaatacagtggtttgttggtggaggctaaactaagtcataggttcattctcttaagttggggctttctgctctgtagggagctgtctctgcatatggcaaagcacaaagctgaatgaggtctggacaaagaagctccactcgcaatctagagagtatctggactattgcagtgattaaatgaggtaatgtaaggcacttagcacaatgtataacacagaagaaatgagagtcgttgttacttttattattaaattgttataagttggttgatgctggtggttggagagtttggggtaaagggcaatggccagagatctagaaatggtttaggaaaagcgtcaggagcaaacatgacccgttgggactgtctgctctatgtacactaaaataaaaagataatttttaaaaagccattttgttagtaaggtagttactaattaaaactaactcctttaatgtctacataaagatggattatccctttttcctatacctgaaaacaactgggccagccatagaagggccagaggtatgtcaactaaagcattgggtaaacgaggatggattttttaaaaagagagagacgaaagtcaggaaataaaggggtgtgtgtccctaagtgtggacagagtcctgggcagtaaggatggagaggagggagagccagaaaaatatatgaaggagaggagggtaaaggagaatgggaaaaagacagggagagaaagcaggtagggttttatgccttcagcctagctgttagtataataatagttaacacttattgagtgcttattgtgtgccaggcactgtttgcagcatttgaggatctcacgtgagattcctgaggcatgattattcctgagggtttgctccaccttctctggttttggtccctgcactttgtggtgtgactccggtgcctcctggtgaaccacatgcctgtcccactgatgttgacttgaccactgatttgaattggctgaccgcatgtgactggatgcaaggggtacatcacatcccagaagaaacttcaagtcattgtgtttctgccaggactctgctctttccctctgccttgagaatagcatgtcccaagtaggggctgcccctttagtctaggaaccaggatgataagacacatggagcagagccacagaagctcacatgtaaccacaacggtcccacgtaatgttagagaaacaaatgctcttgtaacactgagattcttggtggtattattgcattaaagttgactaatgtacctcccaccaaccgtaagagataggaattgttattatcctgtgatattgtgaaatacatagttgatcttctccccgtttcctgacatacaacttctaaaatccttagaatctccaaagtgatgtctttttatatgctgatgagttgactgatgcctggcagcccctgggtagcttcaggatggggctggtcactggaaagaccacagcaggattagaaggatggcaatttcagctccaccccatcaacatctggggaggagggcaactgaaggtgaagtggatcaccaatggctgatggattaatcaatcatgcctgtgttacaaagtctccataaaagctcccaaaggactgggttcagagagcttctggatacctgaacacatggatgttactggagggtgccacctggggtcggggggtgcaaaggggaaggagtatggaagctccgcaccctttccttcatacctcactatatgcatttctttttctatatcctttggaatatcatttgtaataaaccaggaaatgtgtttcgctgagttctgtgaaccgctcttgcaaattaacccaaggagggggtcacgagaatcccaacttgaagtgggtagttcacaagttccagaggccagggcttgtaactaatgggaagggtggagaccatcttatgggactgagccctcaacctatgggaggtgatgccatctccaagtagatagtgtcaaaactgaattagaggacacccagctggtgtccctgcagaaatgattgcttggttggtgtgtggggagaatccctcaccccgtttggtcacagaagtcttttgtgattattgctgctgagtgagagaatagtagaaagcactttgttttcttccacacagaatccccatttcacagatgagaaaactgaggcaagaaactcgcccaaggtcatgcacatttgtaagtggcaaagccagactttgaaatcagaaagcctggytccagagcctattaacctctctataacagtctatctcccaaatgggattctaggcaatttttatgcaaattaaattattgaaaatggtcacgcatgatatttacaaaacacaagggagaaagggaacaagggtgtgggaggcagggggtggacacagtctgggcatctttctgcacatatttctggggattctggcccaagagaggccagatcccttagtggctgggacatctctgggaaactacccagcagggaccagtgtgtccctgagcccagtggtatttgaagggttcattccaggaaaaagagtcttctggggtgagaaaaatcctggcaagacagtttcattttcctatgtctttgtcccctgcacaccactggcttgcgcacacacacacagacacacacacacacacacacacacacacacacacacgctgtctcagcagggagcactgctgccttgggtctgtgtttggyaacatggatccccagcccaagtgccagaaaggcagttataggtgtggctcatgtgcggtaacaacagtggtccgtctcccaccaagaactctcagcccagggatcctgaacaatggttctttccaccaagcctgagacttggctttctgtttcctttggactctctggraaagaaaaccctgggagttcccattcctaggtctgagaaaacatctctgttaaaagttgaccaggagggcacagggccctaccctgcacaacgtgagtctcaggcagggcacgtgagcagctagcctgatcccaaacaatcgcagctctcagggcctaaatatagcccatgcatctggctgtttttatactcagttgcttggctctgatcgaccaagcttcctgtctgatcaccactgaggaactgagggcagggggatgctgcccaccactgcacctggcaaggatatcccgctgcccctccgcagctgcaaggcacctgcgtcctacacacccgggacacattttgcagggctggttcctccacaaatcatctggtcagactggataagctttgggccttgtttccatgggactaaggggccagatgtatcctgggtgaaccctggctctattttgccagtgggaaggtctttattccattttctggtaaacattccaatccggtagcatatggttatcaccaaagaaaaacaagatgtttttgatcccttctggtaatttgttctgggcaaacaaacttgtttttcctgagtccagtccttttgcaatcatgctgatttcatcctgtgctgtttattattctctctggttcttgaggcctggcctggcaagacagtcctrttttaggagacaacactctcccatagcaatctttgctttatcttcggatacgtttattacctgagacactaggtagccaatggggcatatgagaaataccctaagctctatggagaaagaaagcgggagctccccacaggaaccagtaggaaaccacagagaccagcctctaacgtttgaaattatggggttgaggtgagctgaatttgcagcttttcagattgcctctgaacagcaaatatgatgttgatttagaaaaaaaggtgtgaactcctcagctgattgcagaagtgtaccttttccctttttctgagccacttgctagtgatttttctgacccataacgttcagaaattagattgataacacctactttaaaagtgaacttatccgaaaaggccttaaataatattgtaataactttcaaaagcaaaccaaccaaccaaacaggctggtacttagggagggtctcctgctccactggcttcctgtgtgccaggacctggcctgctcctagctggcaggtgcatcttggcctgtgacgccacatgcacttcttagccaactctgccttggcctccacctcactcccaggagctttgccggttcgttgctcagctgatctcttgacccttccagtgtctggccttcttctcctgatgagaagacccctagacacaggacagactggctccatctttgtgcctccagggctgagcacaggcctggcacaaggcagtcactcagttacagctgaacaatgggacaggagctgtcctccacctgagattgtaaataatagcttgggagtacaattacctgggagctcctgtttgatttgttttgtaccctctcctaggccctgcttccatcccacctgagcccctggcctggaagattcttggggccctcctgatgctaagattctgtgactcggggtgactctattgctcatcatccaggtcacctctaggctcccaccagtgacgcctgcgtgttccatggcagcctctcctcaggctccaccctagtccccagggcatgcacagaaatgaaggagtcatgtcggctcctagagcagcgagttgtggctcttctgccaaacatggccacacatcctttaggataagagtttcagaagttagagccgggggtcagggtggatgcacagaaagcaaaaaaaaaaaaaaaagcttggttctcacttcttcagttcaatacagcacacctttattgagcacctaaggatctatgctgccagaggagggcagagtcgacaaaacagtgggcaggcctcccctgcagctctctgtgtctgtgatgatggagctgggttggggaaatcctgctgtgacatttgccctgacgcagttccgcacagcatggtggcttccaagctatgctcttgatgggcacccgtaaggagcttctacatgcattagagatggagcctctcctatctttgcaagcctttgtggttcttccctttaaatctgccatccacggacctcaacaggagaataatttggtcttcagtttgctctgttttagacaaatacttcacatgactgatgtaaactgttgcatagtttcgcaaaggctttctcattcattcctgaaattctccatcagtcacaaacacaaattgttcagtatctggggaattcaaagccctttcctcaaaacagacatttctccttatcattcttccttcaggggaagtattgaaagtcattgaaagtcatccccacccactagaggagagaaacgcaagcccagaaaaggcaagaggtacacaggcatccacgggacagtggtgatggggctgagcactgccttccagagctgctgctgggcattgagcgggcagcaccctctcaatgccatgtggaccctcctcaatgtgattgaatgaccgtgtttcttgcagcaagctccttgtaagaatcgctttaggtctctctgatgaagtaaagattgatttctgcagagaaagtgagatacttgtggccttattcctggtctcacctctgtgttggggctgagctgtgcgaggctcacagggtgatattggaggcttagaagccggggacactgtggcaaggtgatggctgaaagcaggctagatctcatacctgctggcaggccctgcttttcccagcagcattcctgtggggcagcgtgatatgagggcagacaagaatctcatatgaaggaagaggacaggggcttgtggacccacaggggctctgggacaggcaatgtgcaagcagatgaagcctaagccgcaggggctgggccagcactgctctccagtgcaggagaggcatggtgtggacagggctggccacacagatctgacccagcaagttcctggcccctcaggcctgggtcggcttcctgtgggtgctcatcttggagccaagagctggctgtgggaatcatggtgctcaggcttcagagaggtagacacacaggcactcgattcgtcaggcggtggccatcagtcaatgtgaccggccggggccagcaaccagggctcagtgtacacctgccactgctggggactttggaagaggcaggtgttggccagttacttggcctccaccagctgctccaggcgctgcagcatcgtcagacgcagggcttggaacctggagggagacatcgccaagaggactcactgaggccagacagggcagggaggtgggcagcagagcaagggacctgcagatggccagctcaggagatccctgcagcagcctcatctctcctctgccaaggagggggaaggctgtggcctgcgcctcatgaggtgcagtcaaaccaggctgtggactgcacagagcatcagagcagagtgttgtcatttctattgcagactctaatacagacaacagcacactggagtggacagggcggtagagcagagatcgggaagcccatgtttcagcccagattctgccataacctatgcggcaaccttccttgtgctgggcctcagcgtccactctgtacgttgagtggacccactagttgccccccagatccctttcagctctcaaatcttacggggtcaggactgactgcagaatggaagattccctctgactttggtctcctctgcctgtttggggtctggctgcacagacaggagcctgtggaggatgtggctttccacgggtcattcaaccagaggctaacatccatcctttccccacacaccccaggccctctcagtgagctcctgccctttccttcctagctgcctccccaccagccctggtggggtgccctccacaagtcctggaccacacttcactttgctgagggggagacgtcattgggactacagcctggctaactcatgcatccggaccctggcgtggtgtccccaggagctggcaggtgagacctgctcaccttttcattgaactagccctctgcacctgaaaacatcggctgaggctgggagttccagcatctgccactttggggaaggctcagaattcccactaggacaaaaggccctaatcaggccaagtctgcctcagcatgcctgctccttggagccacatcaccagcagaactcagaagcttgacccagcgcccacttgggttcctgcctgactttcctgccaggtgttctgcagctcatgcctgcgctggtgaggatgccaagactggatgggtgatcggggctgtgtcccactgttttggcaagctgtcaccccagcgtggtggcaataccgagcagggggccagagggtgatgctggggagctagggttagcaggccttcccgtaccagggtactggtgcccatggaggagagagacctcccagccggcactggtgctgtgctttgcagacctgccctgatgttcaggacccatgactgtctgtttaagtgctgcttacttcatggtcagtttgattatttctctttcttcctcttcttttaatttttcaacaaaactgtccagcaccggcatttcaaacttaatgtactgagcgacctagaaaatccaagaacattttaatgtgctttaaattcgaagccaaaagtatgttttcttttcctcaaggcttccatagtggcccatccagccaacatcttgtatccacagaaggagctgccgcttttcccaccccacccccacactgctgtgttgtgtacagatgccaggacgggagcctattactatctcaaaggcaactgttatccctgggaggaaatattaaactgaatattaggaagagcattcagtacagcagcattgtcacattgggtgccctctgggctagggggtagggaggtgggagcaccattgtttctaacaatggaatgcaattgcagcagcctgagggatacggggtcactaggcctcctacttgaggttcaaaccctgtaagcatcttctatgcagaggagtttggaaatgcactcactgtctggtcagaactcaggctgttggtaagacttaaatatctccctgttttccacaggtgcgaggtagggcctagttaaaaagcctttgcataggtctctcacataatgacaacaaaatacattccaatgaaggaaaagactttacttccctagaggaaaaggacaggccatggttttataggacccaaattcttctttcccctaagctgctggtgctggcggtcactgatgggagagggagggctggcgcctccctgtgctaggctgggagccctttgggagagtgtggagctcctggagacatcaactgacagggctctggccaggagtccttgggaggccccgtcacccaagaacccctcaccctagagcaggcctccccagccttggcccccactcacttcatgggggacttccacgcccaagtcagcttccatcaggaagatcctggcgatcttctcacatggcccatgcaggattctggaaatcagcgggtactcgcagtcttttaattttgtccgctctgaaaaagaaggtggtttacaaaaatcacgggagattaggatcacctctgtctgttccagattaggaactgatagaaaatgtgcgtctaggggcgcagggaaccctaagaacacagacctcgctaacagcgctgccctgagagattcctgctcatgcagaagggaggcagaacagggcccccagatctgccactttggcataaggattaagtggagcggctggcaattgagaagaagaagatacaagtgaggctctttgccctcccctatttgccaaaaagcaggacataaatttgtcaaggtgtgcccccgtccctctctaggcaatgatggagttaatcaccagagacaacccgagcccctcctcagcctggagagggcaccagaggaacctgcacagcacgtcccgctgaagcccttcccttcccgcagctccccgtgcggtgaccttcccacccttcgcctccccagaaactcaggcccttctcctctgtcttgtcacttctctaaaaacttactgctcttttgtgaatatgctatttaagcccaaattctgaccattcatccctggatattccaaagggcatgcatgatgcaagtgttaacaaacttctgtttgttcttctccttaatctgtcttttgttaatctaaatacagggccccagccagtgaacctaaatgggtagaaagagaagataattttcctcccctacagtgtcattcagcaaaggtgcagcttgaagagaaacaagatctgaggggtgggagaaaggaaagctgagacgggagggccagggcctgatgcactgcgacacgcaccccacccttcctgactcggcgccaaggagctaggtacccacccatccatttctctggaagaggcggagagggaggcttcctatagcttggtgggattctccttcagaatcctgaaagaattaaacttaatgtactgagcgacctagaaaatccaaggacattttaatgtgctttaaattcgaagccaaaagtatgttttcttttcctcaaggcttccatagtgtgcctgggtttgggtgggggagaaatgttcatgctgggaggcacagtgtgccctagcccactaggcaagccagcacggagcccatctggaagggagtacagtcagtggttggtggggagggggcttgctgaacaggtagagaccttttgcttttacgatccagaagtggggcaggtacttacccccagactcgtgaacgatgtagagtgcgaactcactggggccatcttccacctgcacaggcagtcacaggaagtcagatcacggtgcttggagatgggagagaactgagagggtcccctgacagtaactacacccccagtaacacacacgcaagttgcaaggaacctgtcctctcccaacctcctcttgcttgaaatccgagaaaccaaagctcagcagagggacccttgctagaccttctgcccaggcagcttctgccacgggcagctttccccagaaccccacccccaacagaatagcagaccactggcatcctggggcaaggctgctcctgaccaggcttaccctaaatttgttcagcagcagggtgagcacctgcagggttgtcatggtgctgttgaccctcacattggtcacggatccataggctggagtaaacacggaggtctgtaccaggaagggagagaagttcaggtcaggcccagaggggacaagggactgacatcacaacggtgaacagaccaaggcagcaggtgacgctgagatctgggaacacctgcacctgtccattcacgctgatgcacacataagctgttcccagacctgggagacactccgggaagctgtagtagtgcactccttccagaggcctaaggaagatgtctacacacccagaagggccagctctctggacccgaggaaccagggccatggaagtcattcacaagggtgggggaatcagtctctccatcactctttctattgattaagtcaccagttgtctgttgattctaaggctgaaagttacccaatctgtctcctcctcttcattctcccagcagtgcctagtagaggcactggtcacaccatatcagcttcccagcttgttcccttctggtctcagtccctctaatccgtagtctgcaccgctgcctacaggaacggacttctaaaacccttgcacctccaagtgacgtctagcccagctgcatccatacagtctcggctcccttccctaccctgctccataccatctgaatcagagtctgcgtctgtagaacacaaggcgaagcgatctgtgcagttcaatgtgagaagcactgtttgaaagcgcgggtctaaaagtatctgaaggcttcctggggactgtgcaataacatctgtagttcttctcattgtctcgcacgtatgacactatggttgcctaacaagcaccatgtgctccagtcacagagcttcttcacaatttggctggggggtggggggacacattatatttttgcaggtatcttgcctttgcctaagagacaccatatatgaaatcaaccaggactctgcctgacacataataggtccgtcctcaataaaccctagctgtgtattgaacccgctaagattttacatacaatcattgatttaatattcataacaaccctttgaggcagctataactagtccccttttcttagaaaggaatcagaggctttaggaggttaaccagcttgttcagagttacccacctagaaaagacagagccctgactcaaaggattccatgattcctga

SEQ ID NO: 6949 - DNA, 12597 bp, Homo sapiens
acagaaacaaaagagatgaattacctaaacttcaagttggatttattgattttgtttgtacttttgtatataaggtaagtaagcaaattatttgaattaaatacataaacatttggatgagaaattttctttcaaactgtcaccaaaatttagaagtcacccatacggaaagccattggggtatcactgtttctccaaagcagtttgaggttttaccctaatctcattcagggctggaataaaaggagggaactcagatgtgagcgaactgaacacttccttaggcaggcagtaaagacagcacgtgtctctttcccaaacttcataggcccgtggttaaacttatcctagcagctctgagtgctgtaacaattccttacagctcactctctgcatatgaaagatcctgaaaattaactgtatgatttatgtagtttctgacctaaaattccttttaggagttctcacggtttcacaaagaaatcacacctatgctgagtggtcttcagaataacagagtagaatggaaatcactagctgatgagtatgatgcaaagatgaaggtcattgaagaggaggcaaaaaagcaagaaggaggagccgaaaaaggttagatgggctctgtttttgctccctgtaatgtagccagaagctaggctgagcttaatggcatgtgacaaagccataaagagtcaccacaaacagaaaacctgctttactggtgcagactgatcattttaacaggccgattagtggttttcaggtccccctggccctgccacagacaacatcttatgtataactccagatcgaattgaccggtccagttgaagtagaggttggagctaggcttcttcatcttgctagaaggtggctcctctgcagaacactgggtgcttagggataatatgtaaactacagaatctgggggattagagttaggtgagaaaaaagtttttgtcccaacattatgcattagctgtgagaccttgggcagcttgcttaacctcgctgagtttaatattcttctccatgtaatgaggtggttttacagatcttcagcttaaggaagccctacatgtagagtaaggctgaaattgccggtctcccaaatgtctcattgggagatgtttttctggcatgagattcctgtgccattttttttctggcatgaaatttctattcctaaagtcactttgtcaagtttaatgttgtttttggattcttaaaatgcttaggattaactattagttcatcagatggcccaaacatcattttgaaagtggaatgctaatttctgtcttgaaagtttatcactctgaaggttttgtaagcaattgttattgcttaacaaagaaatcatctctatgtggaaaggccctgacatgttccttttaggtggctctattgcatttagtgaaattttaaataattcataggagaaaatatttttcttaacaaagttaaggatgtccttcagaataaaagcaggagtttttgactccttgatatccattcacttatgtatttatcagatgtcttctctgtataaagcccggtgttaggcaggccctggggaaagatgggatcctttatcttgaacaatttaccatttggtgggggaactaaacattgtgaaccaatgcacaattaacgatctcgaagaaggcactagtgtgcacatgggccatggagaaggctttcctgaagaatgcttacgctaaccacagaaagcaggcattggggaggaagagtaagaaaatatgtacaaaggcttggagtaggaataagcttggtgcaattgaaaaatttttaagctgatatagctggagtctagagagtaaagagtgcgaagtacatatgaagctggtagtgcaggtagctgccagatactgtattgccttgaaggtgggctaaaaatgttcatgggtcatttgagagatttaaggtaagatatgatttgcatttcaaaacaataagtgatttttaccaagcaagtgaaaagtgagggtatttcttagtactattagatttaacctttatctcaactttattatgaagagatgatcaggtcctttaagtgacattggatatggatctgtattttatttgcacaaaaatttacttctgagtttttttgctactacatagagaattctttgtggactaagatcattattttctatcaccaggcatggagctttgtgcatcaagctcagatttccagactgcattgtctcagtgagaaactaagatgttaactggccaaccattgatcagattctgttttttatttatttaatttatttttttgagacggagtctcactcactctgtcgcccaggctggagtgcaatggcatgatctcagttcattgcaacctgtgcctcccagattcaagcgattctcccacctcagcctcctgagtagctgggattacaggcacatgccaccacactcagctaatttttatatttttagtagagacagggtttcaccatattgaccaggctggtcttgcactcctaatctcaagggatccacccgcctcagcctcccaaagtgctgggattacaggcaggagccactgcacctaacccagattttattttttgaatggaccaactctgaatattaattcaagtttttacatggtcaaacccacagtacttgctaggttaaaatgactaattagtctacaaagttgacactactatcatgggaatgttagaataaaaacactgtatatccactaactcctaataatattgctttccttgattttactagctgctgaagattcaggaggtggtgatgacaaaaagtccaaaacatgtttaatgttgtaatattatctaactggtctaaacttcaaatatcattttacctttgaagaaaaccagaaaacattcaaaagaacttcaacaaatcatcacgtaacaggatcttcagaaaaactaccctgtgactatgaagaaaatatatattgctagcccaaaaatcccaggggcaaaataaagttcaacaaaagtgcaaaatatgacaaaaataggtacatttttggtgccaatttattttaaattaaaaaatatgcaatcctgaaactagtcacaaattcttttttaaaacattaattgtatttatttgctaaggctgctataacaaagtaccacagactgggtgcttaaccaatagaaatgtattttctcaaagtcctgggggctggaagttcaagatcaaggagttggcagggttggtttcttgggaggcctctcaacttggtttgcagatggccatcttctccctgtgtcttcacatggtcttccctctgtgtgtctgtgtcctaatctccttttcttataaggactccagtaggactggattagggcctacccatgtgacctcattttagtcttaattacctcgttaatggccttatctccaaatacagtcacattctgaggtactggggattggggcttaaatatatgaaatgggtgaggggtgggggagacacaattcacccataacattcgtaactgtgattcatacctcaagccactccccgaactaaaatctctcaacatcttaataaaagagtaaacgcagtatagaatgtatagtgttgtaaatatgatatagaaaataatgatgtcattttattcaacgtcattccatctgaaatgcttatctcttttctctacttttacccttgataatagaatgatgaagaccaaactattttttggcaatatttattaaaactatgcctttgacctacactcctccttcaaagtttgaaatcaattattttgggtgtaactaagaatattttttacagttcagaactattcttttcattaaaaagattatcaatgcacaagattctaactggataatcataatgcaagttaaagcagctaatgaatattatgcgttaagaagcatgtgattggattatgcaagaaccttatcaaaaatagtacagaaaaacttcaaccaagatgactttctaaaaatgattaatagacctaccaggcattctaaatattaaattgttaagacaaactaagggcaatcaactacttcgactgcatggtatatgtctgtctggatattcgagaaatttaagatttcttcttttacttatctataatcatagataaaattagaaaatagaataatatagttatgccatatattttatcatagaatttttttgtcacaagctatctacagtctaaagaattgaacatcaatgaacctatatattttgtaatagacaagataatgttcaattttgagcagccaagaaatgaatcgccatttatttttataagttaggtacttagaattgtcagactgcttctctcacattagaatgtaaaatttatgaggaaagattttgtctattttgtctgttttgttcacagctctatctcggcacctagagcagtgcctggcacaaggtaggcactcagtaatatgaatgaatactatgtgaataaatgttacaacaaacagatataaataaggtatgacagtaagtcatatgtacactcaaatgagtattgtttattaaagtaatcaacttagctaagtgatgcatgctcccttatttccattgcttaaaataattttgaaattccacttccagaagcactattattttaaaaaccacgtaagaaacgttattcctttagccctatgtaattttagaccccaaaacatcagtcagctcaaacaacttcccctccttagtcaccagaaattgtattgagggtagagatgtccaccactgaaggtctgccaaatacatgaactctgcataagagcaagtataagaaggcctaacttcaacacccccagaccagtggtctgctgaccaccactgaccgcactatagcaaagtttgagataggtgtgtaggagaattactttttaaactcatcatgttagaggccttttcaagactccttaaaaacataactcccattatctgtcactgtgtatgcatggattaagtattgtgattttatataaatttataaatgagcctgatgtcataaatctacttgaaataccaaatacactgatctatttttaaagggtctttagatattcttcctagttaaattcctaattttaattttgcaggaattttactttctgacaaccactaaacaatggacatatttttaccataagaatgtttaactgcatatattctactactaatatcagtcttgcggctggacatttcaaacactttttcaccggaaatacagattcatttttacacactacaagtagtgaggtgaaaaaaaacaatttattcaagaagtgaggggactatcaaacaatgttaaacactgataaacccaacactgatttacttttctgaaacaggttcagaaatgattgcataattacttcctagatggttcctttacagccatgcccagctcagtgcctcacatataatagaagcctgataaatatttgtggaattaatgaataactgtttaataaaaggaaaatctctgataataaccattttaaaatgataccaaattactcattttgcagtttattgccaatcattccgtgtttaaatgttatttaaaatagtatatcttcaataaaatacttgcttatgttcagttcattttctatatgtcctttctcttattcatcaagtcaagcatcttctcctatatctatccatctatttgctctttataaaagcagatctttgctagttttcagaaatcaataaatccttttgaaaatctgatttttgaaaatttgaaatttatggacttttcctccaaaaaacatacacagaagtttgcacagattctaaaaaggcttggatctcctgaagcacctccatagacccttgcgactaggaccttatgttaagaagttacattttatatttctgcatagaagttctattagtccattttcacactgctgataaagacataccagagactggggaagaaaaagaggtttaattggacttacagttccacatggctgggaaagcctcagartcatggtgggaggcaaaaggcacttcttacatggcagcagcaaaagaaaatgagaaggatgcaaaagcagaagcccctgataaaaccatcagatcttgtgagacttattcactaccacaagaacaatatgggggaaaccgcccccttgattcaaattatctctcactggatccctcctataaaatgtgggaattatgggagtacacattcaagatgagatttgggtggggacacagagccaaaccatatcagaggtatattcatatttgcatgagtatatctgaggcaagatacatgcacatagtattattcagttaaattatcttactgcataatctctgccggggaggcaatttttgtgaacacatgaactgttttagactactgggacctcactggctccctgtggtaataatttacttaatagtaaattatccacaggctaggaagtcaaatttgattataacaaactctcttaagtggtagaggttaagaaggaagcaagagacaggcaagcaaaaaacctcaaaaagcagctggaaataggtggtaatgggagagcaggtacttaaaagaagggtgccagtttatcaatgggaaagaaagaagttaaagacatacataatatactttaatcctagtaatttaaaataattggcagagcatggtggctcacacctgtaatcccagcactctgggaggccagggtgggaggaatgcataaggccaggagtttgaataccagcctgggcaacacaggaggactccgtttctacaaaagaaaaaaatgaaaaacaaacaaatccagtattggtggctctaaaaaagagaaaaagaagaaataataaaataaaataatgaaggcaagagaagatacataatgaaggcagtgaaaaaaaacctacaaaatgtaggaacaatggaatctgtccagctctatcctctaggagctacaaataaaacagaattgtagataagcaattgaaaagatatttaaaggacaggaaagtctttaattgaactaatgaacttccaaagcctctgacattctgagagaacctggatttttatttccaaagacaaaccacacaagctgtaacttgcagataaaaacttatatggaatttcaaattgcatgaagtttaaaacttcatgaagtttcacattaaggagcggaggcttctctctctcgtctcatagaaacaaatcctgaaaatactcatcaaattcttcttccctatttaaaaaaaaaagcatacttaagatcaatagagtaaaaaaattactacatgatacattatatgagattaataaaaataaaatactttaagtcaacatattggctgattctgctatatatcaatatatcgccatgattcagccatcaaataattcttagtttctagaataatcataactatacccagattgattaaaataaaaatatttcatatggtggcacctctccctaaatgtattacctaaaattttgctttgaaatacttgtgaaatgtcattgcttctctttactttgtgggcttactttataacttctctgttcattctcattttaaattatagtctgctcaagaagtgaataaaaaagaaactatttttaaggaaaaatgtaagcctaagttatattggggaataactaaggggaattgggtaaatctccttaggctgtagtttttttactacactgagcatagtaaatatattatgtatttgtaacagtaaatattattattttactttttaaaagaccagtgggatagcagtatagaagtgtacttcccatgcaagggattcccttgcataggtttatgataatcacagtatgatggaataggcttctctggaagcttaggaaacagccatctctgaagaaatccaagcaaggaccagaggttcatctgttaaagtgaactgatgaaagatttatttaccaggaggaagctggatgtgttggctgcttatgacaatggctgggaataagctctaatcttaccaggctaggcagtccttggcattaaatagatcaccatgatgttgtatttttccattaataaagctgtggttatagcttcctaaactgattgaaaaggtacatattctctattaatatcagcacttactgtgatttttcatctgtctctggtagtggacccttccaaagttcagattctgaagcactttcttcctcatcagagtttcctgttcatttaaaaaagatgatttttaaaaacctattatacttaaagcacattttgaattattcgccaatacaattaactttttatttaactcagcttcaacttttatgactctctagaaatttaattcactctcacaggtacaataaattcttttaaaacatatataaataagccaagggttaccaaagaatctcagcaaaaaggccaaggattttaagtctcatcgaaacttctctaagttacactgagttaaagtagcaattccaatatcaactcttgtaagtcaattatctcttgcaatatagttgtctctgatctagtttcttctttttcttggttacacagaagacacgcaagttaagatttacatttgtagagaacatgtttacattaggattagtaccttaagaactgagctagtatgtaagaccagctagttaaattattttaaaaaaaattgtcagacattttaaaaaaccaatgctgattacataatgagaagaagcctgtttcagggaagaaactggcattctcacacattgctgggagtgaaaattctgtaaacctttttctggagaaaaatctggcaatatagatcagtttaaaacgcataccctttgaccagcaatgctgcttttaggaatttgattacttacatacataaataagcacctctgatacatatgtacaaagatgcacactgtgtaacaacaacaacaaaaaacctaattccccaccaattagggattaaggactggttaaataaatactatacagctgtttaaaaacattagcatatctgtatgtactgcaatagaaaaatgtccattctatatcaaatttttaaaaagttacaaaaagtatgcatagtataatagatatgttaaaaacatatgcacatcatatacatacatgtaattttatgtatgtattgtaagtttgcaaaagccaaccaaatttaactgattatattacctgtgggcctggaatacttttactttctattttaaacattttcaaattgtttgtattttaaacaatgagcatgaattaccttcaaaatcagtaaaaacaataaagacattttattaaagatgacaaaatagatatgtttcaaataaatcacctgtattagtcaactaaaaatttaaaaatactgcaaaattatcagacaataacactataactcacaaagtagttacattagcagacaactcctctccaataatgattattagtctaaaaaagaaatggcacaaatgtggcctgtcaatacagaatgtcctttagttaaacacaacataaaaataaaacagcattgatttgttacggtagttctagccttttacctgttggactctgatccctgaatcaacatgtgtgtctgaactttgctcctaactgaatctattctgacaccaattctagcaaaaatggcaaaagtgggggagggcattttgtattctaatgatctacatacaaatgataaaattttaatcttgaaaacaagattcctgactcaatgacagccatcactggaatggccagtgtcccaaattgataatgtgagggaaaaaaagaattaaaatcttctcttatttttatgaaaactcattaatatgagataaagaaagcagagaaaaattaattaggcctagcaaggttattactattgtattactctgctaatgttaatgatgccagagaacgaaacctacaaggcctttagaagtggacagctgttatcttgttcccttccaagagtacttcccacatgccagctttcttacaccagttttctgataccagtcaattttactaaaaaatcaagtcagtttagagtaacattataaactaactgtcttaaaaaatccccactaaaaaagtggccagatatccctagagaatcaagtctacaagactggactaaatgacctttaaggtcccttataaccctatgaatctatagtatcctggttccctgagggttggcagtcactacaaatcattgctatcataactgttacaacctgccaggggcgggaggagtgttactaaggaaataacaattggaagaacaggcaacacaaaagaatgcatcactgtcaaatctattcagtgattattggtaagtagggatcagaatttaagtcactgactttctgagttgaaaggggaacctggaggtcatttaatccaacacttatccaatgaatgaactttcactgcaacacctccaataagtgccaatccagtccatgctggaacactcgctactccagaggcagcccatttctccattccttttgtcagacagttctaagggacaagtttttccttaaattaaggcaaaaatctgtttttgggcagttctgccaacccagagtcataaaaaataagtctcctacatagtagcagccttgcaaatatccatacagtaatttccatgtctacttcctcacctcttccctcccatcctttcactcttctcccaggtaaacatctgcagttcctccaacattcttcctacaatataatttcaagttttctccatacctcagtttttttcttcttgacctgcttcaagttttcaatgttccctttagagtgtggtgcctaaaattatatacaatttttcctacatgttttgaataatgaaagtaggtctatcatcttggtttttgtggatattatatggtaactaataacttgcaccactgaagaaatggcaaatgtctccaataatcatggtaacaaatggacaggtcagatttttatagacttaacttttgatttcatcaattctagagaacaaacacaggatttatatgtctgtatttttcttttctctgataacaatgatagctacaggttatcaaggacttactttgcgtcaggcacatactttacatgtatgttttctcatttgattctgataataatccaacgaagtaggtctctttatacccattttatagacagaagtgaaacatagatcaaatcatttaatgtggatctgtacaatgcatatgccaaaactgaggtataaagaatagacatacagttgatttcactgatgaacagttattgattgatgatacaggtaaagggcatagactttggaattataaacttatgtttaatcccagctttgccattaactatttgaccttgggcactttacttcaattctttggttcttgggcgatctcatgtgcaaggtgactaaagataacaatacttgaaatttgttaagagggcagcaaatcatcaagttgtatactttaaatatatatatttttaaaaattgagtttcttcattcatttaaagacattctctaggtcttgatttttctcatctacaaaacgaggatattatatgcacattattaagattaaatgaggtaacatatctaaagcacttgttactgtcccaacagaaattgagtttttctccatggatttggttttaataatccaggtgtcaaatgggttaagaaggtaactgagtattgtccaaatggaaataaagagcaaaatgtgaggtctgaaattgccaagaccatgtaatacagatgactgaccacctgagaggatatctggggttggcataccataacaatgtatatgtttcatgcttgctatggtaaatagcgtaccggctgccaaacagcaggtcagcttgaagtggatagtttgttttttcaagatcaaattagctaggggtttctcagattggatatagtcttcacagtattcaccctgcttctactagtaaaaatttgacttagctgaggagaggtaaaagagcattaagggctatttctaggaagcagggaaggattcaaagggcagggggtgaaagacagtgggaaggagaaggcaggcagaagaaataaaagaataatataaatcagtgattcaagaatttgccccaaaagactttttaaggataaaaaattagaactgaaaaaggggaattttttctatattgcataagcattcacacctctcactgttggaaatggatgaaaactaaaatacgctctcccactttagcctgtgtacacctttgttgaagtatgtatctatgatttcatcctgagataacattggtccactggtcttatacttgaatgtattttcgaaactgtcactacattttacctaatttaggaaaggacctcctgataaattagaatttacgtggagagaaagagtcagtgctttaagacacttcaaatatgttgaaaacaaagttcgtacaagcaaaataattataaggaatatactatattcctaagagaggaatacct

SEQ ID NO: 6950 - DNA, 13650 bp, Homo sapiens
gatgccatgatgatcatattaatgagggtaaaaattaggaccaacaggggatgtcccctctgcacatgtgtacaagtgtgtgcctttcacagacaatagaggctgaagtcagggaggcagcatgcacaggcaggcctggctcagacaggggccacgtcccagtcagacagtctcctgccacgcgttcccagcaaggatgtgaaaacagccctgccactcgctttccacccacacccctccatgccttgcctttctccctctttttcatgagggaggagagtgtgctcgccctcttctctcccaggatgacagtcaggcctggaaaacagaaggcaggaccaagggacaaatcagggtgccctcaggtctaatgccagccatgtcctgccatactgggtgcctgcggaacccacatacccctctccaggctgagaagatggccacctgacctcctttgggaggtcattcctttggggtggtcatgttttgggggaaaccagagagaacctgaagtgaggaaacagcttggggatgaaggtgctgtacagacaccgggccagtcccgccggctactcatgtttactatgcacagccagcacacccatgggcgaaagaccttcggtgccccctgctcctaagagctaagcactaaatagtgcatccgctgctgctccctgctaactctcccaatggaccctcacgctgccccactagggactgggatttgaagaggtaacctttaactccattgttgagtgaggaaataagggcaagggattttaccctaaaatagggaatatagactagttggccttgggatctaaagccaggagtcccgactcccagccagggctctccccatgagacatgggagagttggccaagctttctggggaagagcaccatctggggttcggttttcctagctagccaaggagaaggagccggccctgacaaactcagtgacattcacacagggcatcgtgggaacaaataaaagccacaaaccacaattcaacacaaagcaggctggatcctggcagctgcagactgatcagcccaatatgtcccgggggtggggcaggagaggactctgagatgcccgggaaggacatttgtcatgccagccagaccaaggctgccccgcagagtgagagcaacaaaggatgcagatccaggaccaggatcacaggcttagctcagctgcttctaaccaggagccttggacagatcacttggcctctctgactctcagtttttctacctatagagtggggataatgcatcttccttacaggaacaatagaagtgctttgtaaaccataaacagcacaggaaaatgaaggaatatcctagtcctcttgaggattagagggggagggaagaggagggaaggaagagaaaaaggtaggaaaggatccacaatgaggctgagattttgaaacccaacctgctggctttatagccaagcttttcatcatcactggaaactcaaacctgcagcaattatatgctgaggtcataaacgtgattaaaaaggttgtttgcaaagctgattccagggaaatgagctgcagatggcggtggcatcaatgtccttttgcagcaggcagcagctggctgtgtggactcagggacagctggaaggagttgtgctaatgcccacccccagctttggaaggcgggggcaagctgactgccctctctgtgcctggggacaggggagacttgcagagagctgaaaccctaagccataaaaccgccatttgttccagagagaaaagccagtttttcaattccagcccaaccaggagggcgggccaagctcagagaaagaagagtggactgagagcacgagtccttccacggcagcctgcctcgggcgggacaggctgcagtggctctggctgtccactgggagtgtccttggtgagggaggaaagaaggcaaagccacatctgaagtctctcggccagaagaaccctctgttctgaggccaacaggtagccctggtataaggagaaggtggaaaatacaggcaccagaaccttctctgctgcttatggcttcatagaatgttttgcaggtgacatttcacataagtgggcaccagcctgtctgtctttgatggaaagacatcaggaggcaggacccaggtctctgtcagtggcttcctgtcagagtggccaacacgggatacttaaaaatgtgaagaaggagacgtcgatcaggataatacaatgagcccttggcccaaatttgggaagggccctctcttttgatgtatctcactacctcagctgccatccctctcctggtcacttctacccatgcttcagccacagccccacttactccaggaagccctccctgatgagtcacctgcagcaacctcctgtcctgcagatcctcaccccgtactgctcactgccttggctgctgctcccaatcactcatatgcgtgcccatgtctgtctgacaactgggcgctccctaatggcagaagcacatccatatgacatttctcaaatgttccctatagtacagggaacccagagcacgtccaatgacgttgggatgtgagcctgcagagcttttcacaaatttgcagaacaagctgtgtccttcagcatcattacctgccctccccctccgactgaacctggagaagagtcaacagcctgctaccaaaaatcccccacagcccggactcggatgattcgcctacaaaggctggggagcacagtcccaggcttactaatctcctctctaccccatccccattttttccagtccccagaaagtcccaatcaatctctcagcaaattccacaggatctgtcagattcagatccagtcaactgcaggccgagtgctcttcgcatctcatcttatctactgcaggaagcaacctgagggcagcaaagaggaagacagctggtatgaacgggctctgaaacctaccagctgtgcggcccagagaaagctacctaacctctctgagcttcagctgcttcagctgtaaaatggcaagtataccgcctttctcaggtttactgttgaaatcatgtttgtaaagtgtttataaagtgtttagcactcttagaaagtactcaataatggtaattaacatgaaattatcataccaatctcttcaggtaggtattattgtcttctgtctaccaatgagggtgaaggtcagagacgttaagcaactggttcagagccacacagtatctgctcaggaggcagagctgggggttcagacagagcagcagagcgtgccctcagccctggggaagtttgcaacctcaagtcacagggacagagtagctgtgggaacttgggtcaggtacctccacccctccccaggttcagcagctccccaggaatcctggaacatgaggcatggcctcagcaagtctccatttgagagaatcagctgggatctcccagattaagtgttgttgcaggcagctgggccaaaccgcctgccctggaccctagagctcatcagattggcacctgctcttcccacacaggcaaacacggatggtgccactggccgaaccccgccatcagccttcacacagttgagctcaccaggaaagcagaatctctaaaactccagctgcagtgcaagcccagcccccagggacaccgctgtccacatctgaaatagctggcgatcatcacggggtgggagacaggatgcagtgggcaccttccacattgaaacccactcaattaaaaccccacgtgtgggggacagacacacacgtacccatcacacccagtcttacgtgtccactgagaccctggttacgttagacatggcctcaaaggaagtaggtactttcacaaacatcatctcctttgatcttctcaaccaccctgaggagtatgtacttttgccccactttacagatgaggaaactgagaagacatcaggcaatttttccaacatcacacaaaggataaggaaaatgttaggatgccaaccccatgtctccaggtttctttccactacagcatgctgttcatttgtgatctcgttcattcatccatccttccttccactcattccttcattcactcacctatatttttccctaaacagctacaggtcaccactgtctgggttgtttgctactaccttctgctgctgcctgagaaaacctgggagactgtgatcacattttttttcctgtagagctgcccgaatacagctcttctcaaagccttgcagcagagatgatacagccatcagcagctgatcctggaatgagtgttgagagcagcacagaccactctacgtttctgctctgaccacaggtctggcctagaatttgcccctccactgcacaatgcagctaaaaacctttaaaaaaataaataaatggtctctgagcctcccagaaatacagcacttagaatgttgtttttggagggggcatgtgataaagaatgggaaagataataaagtagcctgtcacccagctcacaggcaggtgcatgtggctgcaggggatcgtttagtcaatttaatgacatatttgttgagtatctattactgtgcctggtacgggatggagtgggtcagggaataggggagggcacaaagggagtcaaaaagaatagaaagaaagccgtcaaagggctgacggtctggttgagggaaaaagacaggaaccatctgcttagacaacacagatataaagtgtacttgagaaattcagaggatggtaaggtgcctgcaagtggggacacaaaaatttcattcagaccatggaatttcagctagacagggaaggatggccagaatttaaacctgggatggtatagaagaaaattacccaggccaggcgcagtggctcacgcctgtaatcccagcactttggcaggccaaggcgggcggttcacctgaggtcaggagttcaagaccagccccgtctctactaaaaatacaaaaaattagctagccgtggtggcgcacacctatagtcccaactcctcgagaggctgaggcaggagaatcacttgaacccaggaggcagaggttgcagtgagccgagcacgcaccactgcactccagcctgggtaacaagagtgaaactctatctcaaaaaaagaaaagaaattacccaaactgcctgctcaacaccattgctaatgaaaaagcctgccttggtctctccttccctgatcttagcttttctttctatctctgcaaagcctccgtatagaaatctggttttattgtgcctggtaagggtcctagttcagttctaaaacaattaacaaccatgaagggacaaaagtccgaagtgggcatctcgcttatggcacatcagcctctagtcatagtcaccctcagaccccatctagcggctgcccgaattatttcattcagggatctgtgtgtttggctgataaccaggcaccactggcccgtggggtgctatgactattgcagtgttaaaaacaaggcacttggctgggaagacgtctgccgttaagtggcaggctcatggacaacggcctcaaggtatttttccttcagacatttggtcccactttggcaagacatcttggcattgcttgggcaagatattacgctctgcttcttcagagcgttgggtgggagataccccatagacagctgaagggactgggaccttgggaaatcacatttaaaatttttggacttgtttaaaattgtttgacttggtttaaacacagttcaaagcccagctgaggcattaagggtttgtcacctaaggttgtcatctaaaatgggaaatgtgtgctctattcctccttgtggcccggtaggatgtattctgcagaattgggctgcttttagctttgagcttgtgaaaaagaaaaagttttttttattgcaatgcttcctggctataatattccctaggacctggggaatggtagccaggatttggatctttaacgtaaagccaagagctaaagaaaattttagttagttgttagtcatggtggacacatttattggacaggtgcaagcctttccctgccacactgagagggtttcaaaagccttactgaaagaaattttcctcagatttggggttccattccccatacacagtgataacgagagtgcctttattgccactttattgccacttttttttgagacagtgtcccactctgtcacccaggctggagtgcagtggtataatcacagctcacagcagcctcgaccttctgggctcacaggatcctcccacctcaacctcccaagtagctggggctacaggcacrcaccatgtctggctaattttttttttaataggaatgaagtctcactatgctgcctaggctggtctcaaactcctgggctcaagcaatgctccagcctcagccaccccaagcctgttgatttcaccataattaacccactgtctaatttctcattttctgactcaactacaaattactgcataacagaaaaatagcgccgggcgcagtggctcacgcctgtaatcccagcactttgggaggccaaggcaggcagatcacctgaggtccggagttcgagaccagactgaccaacatggagaaaccccatctctactaaaaatacaaaattagccgagcgtggtggcgcatgyctgtaatcccagctactcgggagcctgaggcagcagaatggcttgaacccgggaggcggaggttgctgtgagccgagatcgygccattgcactccagcctgggcaacaagagygaaactccatctcaaaaaaaaaaagagagagaaataccattacatgtcccttgcttctaggagctaccttgatcaagtttgccgaagaaggaatcatatgcctcccctttgtttagtttactatcagattgatgggaattctagatgcccttactcttattactgtsattccctaacagcctgttcaggaatgcctccaagctgtatcttggatcgagttaaattcagcaactccttactacaaagcaacactcggaaatagacctaccaggtccttggtttaatccaatccacgaagccctgctacaagattctaaacttaatctatacaatctttctgtgttcctctgtgcatcctcagaatatctatttgtttgtaggggataacaagaaaccctctggatgtatgaatgtattgacagctagcatataggaggaacttgcctgtaagratactcatttatcccagttttctgtacacaaaactgctgaaaccaagcactggaaaagctccctaaaattacttggtaaaactaaatggtccacaactcactttcgagatatacagattcatacttgcctggtaccaagaagacagagctgggtatttcttcagataaactttgttaccttggcggagaacggtgccccatgagcgcagaattagaaatctctccctttatgaattcttgtcaaggaaattgcaatcgcagcccagcagagaggaattaaygtattgggtcaggttgtcttagataataggatagccctagattacatcttagcggagcagggaggagtatgtatggttgcaaataccgcgtgctatatttacataaacgaatccgtggaggtagaaactcatctaggaaaagttagagagcaagccacttgggtacaacagcctcccagactgtctctgaggactggttttcttttctgttttcttggattcctcgtggaaaacagtctatgttttctgggtggctaaaactaggcatgtcagtcttgttaattgtgcttatgctttctattatgaccaaatgtgcattaaaatgttgtagtgaagctgtgactaaagcaactaatacaatgatagttcagcaccacggtgccatgcctgggactcgtgaatattgtgaactccatgctattatagaaactttctctcttcatatcctagtccccgatctttgccccaattcagcaggaagtagccagagtggtctgttcccctatacccctcaggattgtggagtgacaaggatggaactgagctgcaacaggggcccctttcttaggagcctgaagaccccaagcatgaaaataaagaaaaaccctaagttccttcaagagaaattccaggcacctcactatccccagaagtaaataagaaggtaatagtagcctaaaacaagagccaaggacgtttgagttccagagatgtttgctttccctgtaggaactaaagacaacagctgaacatacgtccttgagttgtctttcagaaacccccactgaggaaccacaccgaacagatccactggcatttagacctcagataagggggaaactgaagataaaacttcttcctgatggggcttagagaaagtcacaccccatcccagccagttaacatttttctgcagatcccaaatttttaaacaaagcttctcttctttaaccagttgcaaatccgaaaatcttcgaatctacctatgacctgtaagcccccctcaagatatcctccccttttaggcctaagtcaatgtgtaatctccatgtattgatttacgattttgcctgtagcttctgctttcctgaaatttactcctgcctttaaaaacccttgcctgcaaaccattgggaaggtcaggatttgagcatttaactgcttggtcctctttgcttggtgccctgcaaatgaacacttttctgtcactgcaaaacctcagggtagatgtctggttttactgcaccaggcaagcagaccccagttcactataacagaaggcggtgaggaagaacttaggtttttattccgagtttagcgggaagcagaggctattaagctgagttacgacatagtctcaccattttagtccaagtcttagtcctagcaaaacactttggctgctgtgtggaataacgcttataagaaaacaagcatgaagccgaaagggaagtaagggcctgggcgcggtggttcatgcctataatcccagcactttgagaagccaaggtgggaggattgcttgagctcaggagttcaagaccagcctaggcaacatggcgggaccccgtctctacaaaaaatttaaaagttagctacacatggtgctgcatgcctgtggtcccagatactcaggaggctgaggtgggaggattgcttgagcccagaaggttgaagttgcattaagccatattcacgccactgcgctcccgcctgggcaatagagcaaaagcttgtctcaaaaaaaaatttgtttaaagacaagtaagggaaatcttccagtattctaggtgagaggtgatactctagactaggttgaaagcactggtaataaagaatagtggatggaccggggatatattttgggagtagggccagaagaatttgctgaatgcctggatggggaaaacaagcaccagggagagctcatgagtgtctagctagagctacggaagaagatgggagaggggcaaggcaaagggtcgaaatcaagagttctctttggttcaggtaaatccaagatgaaattagatgtctggacaacatgccgaaaagaagaaaaaaaagaaaagagaaattagatattgaggtggaaatgccaagtgggcagatggatacacccatcctgagttctgaggagaagtctgccctagaggctatggacaaatctacgcaaagatgacacttagcatccaagaattgcagaagattagccacggagggagtgcaggtgggaaagacgacccaggcctgagcccagatggaggggcctggcagaagcagaggagcagttgccaccagggcagctctgcagaaccatctgaacttgacaaaaccccagaggcagcagtagggagccacagatatgactgggattaagcttcatacctgggctgaatgaaggcttagagtcagaaatgttccctgttacagaaaaattttaaacttgtacttcttggccaggtgtggtggctcaggcctatgattccaacattttgagaggccaaagtaggagaattgcctgagcccagaagttcaagaccagcctaggcaacatagggagaccctgactctacaaaaaatttaaaaattagctgggtgtggtggtgcacacctgtggtcccagctgctcaggaggctgaggtgggaggatcacctgagcccagaaggtcaaggctgcattaagatgtgatcattccactgcactcgagcctgggcaacagagcaaggccctgtttaaaaataataataaatttttaaaaaatatatgtgttttgagacagagtctcactctgtcgcccaagctggagtgcagtgacacgatctctgctcacggcaacctccacctcccaggttcaagcctttctcctgcctcagccccccaagtagctgggcccacaggcacctgccaccacacccagctgatttctgtatttttagtagagatggggtttcaccatgttggccaggctggtctcgaactcctgacctcaggtgatccacccgcctcagcttcccaaagtgctgggattacaggtgtaagccaccgcgcctggcctaaaataaaaactttaagttgtacttcttgcatacctgagtctgaggaatgagatttatatccactactcataaaaataattacataaaattttatatatacataattaactaggttatgtatatgtctttatatgagtgtcacaaaataatcagtgccctgaaggcaaagaaagaactaggaaggagaatgggaaggggctcagtcaagatacagccttcaggggaggcatctcttaagaagtcttcatagcatttctcctttccaatcagacctctgcggcaaacatcctccaccagatcctcggccaggccaagaagcttccaagcttgatcctcctcttaatatttattggagctggaggtcctggagcagcactgtatgtcttgcatctggcactgttcgatcagatgttagtaggggcagaaagaataacccaaaaaccctgagacaaactgggtgccaatgatcagtacaagttcaactcggtgaatgtggattacagcaaactgaagcaagaaggcccagatttctaaatgaaatgtttcactctaaagctgcttagaatgaagctcttccaggagccatccgcacaatttcccacttaaccaggaaacatttctcctctaaaatacatgaaatcatcttgacgtattattttggagattacactaattaatacatatccgagactcgaaaaaaactaaaaaagaaggtttcataaacagaagacaattcaagggagttcctgtgatcctaaagggaggaaggatttttgccaaagggtgagagaacagagagatgaaagctatggaaaggacaacagcgcaatttaaagcttgagaaaccaaaggtaaatgagaatggcaaccacaacaaaaactaaacctgagattgaaggggaactgagtcttcagaggaaagaaagcaaaggaaacatcgtttgaaaggttaaggatataggtagcttgcaactattctcaactgggcttcctcatccgaacagggttccttattcctcatctgacccagagtacatgacataattcgagtgattatttcttaattcccataagaatggcaaattggccgggcacagtggctcacatttgtaatcccatcactttgggaggctgaggtgggcagatcgcttgaggccaggagtttgaaaccagcctggccaacatggcaaaaccctgtctctactaaaaatacaaaaattagccaggtgtggtggtaggcgcctgtaatcccagctacccgggaggctgaagcaagagaatcccttgaacccaggaggcggaggctgcagtgagatgagattgtgccgctgcactccaacctgggtgacagaacaagaccctgtctcaaaaaaaaaaaaaaaaaaaaaaaaggcaaatctagaatccagaaggatggcactgatctagatgcatggagggtgaagttgatcaattccatgcaatagatgacatcgggcactggggcttagaatccagattttaaaaggcctgctgttaagatgtctgtttgataaaaaatcataataccagaaaaccagaatcagcaactaaaatttaaaataaaaatagagatctcacccaggggacttttaagcttcactgaggcaatgtggtatgattctggagtggagtgaaagccttttctgacccagatatcctgtcattagtgttcacagccaacacggtctcagttgtgcctacctggcttgcagcattgggctctgccccccggcctctgttatttcgggaccctatcatccccattgctggcagcaagcccagcgctgtaacagcatctcctgccatcagcctgccctttggaatgctgggcggcaactccagggcttctctgtgatgctggtgccctcctcaccaggccatgacttagcacgccggtaaacggagtatgctctgggccctcctagggaacactgtggggggtggattttctggcctctatagtctaaccagtttggcatgcccactgctctggacatcctgattccttccttcaccatttgctgtggcagttcttccaattctacctcacttaacgtgggtcaatacttttccaggcctctaagaggcaacctcttagaggttgtgatgtagtagtatgttggcgccatctcccggggtcctcgtcagggtgtaaattccgtaccgtaaaagaaagttctcccttttccaatttgtattttgtttcctttggttcagcaccctcaagatccagtcccgtacatattcccccagttcctgatggttcacattgaccaggcctacaactacttttttttcttagcaggtttgttttcttagcgggcccagcacttctgtggctgggttatgttctaacttgcccttagcttcgggtctgatggccaagagaggaggcagagctgaatcctgagcagagcacgagttttcttgcaagacacgatcctccacatgatcttcaaataagccggaggctctagcctctaacagagaggagtggatcacttctgcaggccctcttccccacttattaccggcagccttgcactcacaggaatgcctttcttcacaggcttccattccaaagatcttattatcgaaaccgcaaatatgtcgcataccaacgtctgagcccttttaattactgtcattgcctcctccctgacagctgtctacagcacccgaattattttctttgcactgttaggacaacctcacttcacggctgtaattgtcatcaacaaaaacaaccccttcctaatcaattcaatcaaatgcctaacaattggtagtatttttgctggatttttaatctccaacaatattattccaatatcagttccccaaatgactatgctccttcacctaaaactcacaaccctcagcgtaactattttaggcttctcactagcaatagaacttaaccttgtaactaacaacctcaaactcaagcacccatcacaaatatttaatttctccaatatattaggattttacccaatcacaatacaccacacaacaccacactcaaatttccatgcaagacaaaacctaacctctcttctactagaact

SEQ ID NO: 6951 - DNA, 24403 bp, Homo sapiens
gattttgatgaggactcctggaagaagcaactgcagtcgtaaagttctgtttcttgcgataagtggtgctaacaagagtgtttgcctttataataacccattaaattatatattcatgttatgtattttttgtatatgtgatttaccttacaatgaaattatgaaaaaggtaaaataactgaagttatttcaataagctgtattccctttttctttaaaatgtttctcttacattttaaagtttatgtgtatgtcataaacttgcttgattagtgccaagtctatagaaaatattgtctcaggtggaagtaattccaccaacctttttcttaaatatttctacaggaggaactgaaaataagtaaccttgcattttctttattgttggatgaagaattaagctctagagaaaaattcctgaacaactaccttacaaggaaacagcacgagaaagtaagaatagtgtctgaaatctgaatacaagcattttctgatagacatgcccctcatttagcaagagctcacgtgtctagacccttccttccttccttgcaccattcctacataaccatgtgcatcccttggctccctgtctggaactttgctccagggccaggtgaaagtaaccattccaatctgttaataaagttaggtgattctgcatctgcaatcatttagccaaaagaactgtgtagctttcatatgacatggtttataaaatgaggccatatagcttcatggttgaaagcactggctgtgggacctaggacaaggcatataaccttttaagctatttgcaagctcttacctagggaatgtttttctctctggacacgctaagatttactaagatgtaagcaatgggcttgcgtatagaatgaaaaactgccgtattatgaaaaactctaaatatgagcttggatagatatggttcattaaaaagacaatgaatacaaaatgtttatcacataatgtttctacaaatgtcagcttttgttagtagtattagtaaagagcatttatgaatgtgtgacttaaaaatgacatgaacttttttctaagagcctattaaacagcatatgcaaagcttcttctaaatacaactttacatatagcaaccctgcagcatactagatttctttcacagatgaggataccatctcagagagtctgggtagcatgcctaagtcagccactagtgtgtaatagagcagcagctggaactgtgggaataagtgaagaacatccaaatgcaaatgagcagatgctgtttattcagagcttggcacagcaagggactcatccaccatcagttacttttggcagactcaaaggcaggaaaggagtaggaaagctttatagtgcaaagaagagagggcttcagatgcaacatcattggaagttgttggcatgaggaagctagaggcaaaccaattagaagcgggacaactcattttactggtttagggaacatatttggctttctctggatggtcctaggttggaaatggggacaaaattatagaagctggtggtaatgatcaagccctgaaagtttgaggccaatccttaaaaaggctgtggtttagtttcccagctgatgattgtagaggttgtgggtcagaattctgttgttacatatggtctggcccttgtttgcatgtatatccagtctctcagaacccaggtccatgtgattccgaagcctgtgcactttcatcctccacactgacttaccaagaatgcagtgtgctccatagacactcacacactcatacacagagttggctgtacttagaaacaggtgattgggtgttctttcaaagtccccaattggtgtattttcttctataaatcttatcttcatgaataaatacttcacagacatatttctcttgtactaggaaattccttgctctttttagtatccccaatatttttgtttatgctggaaagtctccagtttcaatcaactattcctgatgctgttatagagccagacttcagaagctgttcggaaatctagagaagacctggatgtgtgcaaggagcactatgacaacttactggcagaagacaaagtgagagttgttgtcttacccactcaacaatgcagtagagttgttgctgcctggattggaggaaggttaaaggggatataatataattttctcacagatttttctcccacttaattctcagctatgggtgaacttcattctatgccattgtatatttttgaaaatccatgtgtaaaatgaatttttataagcttctctggtttaagctttctgttatacaaaatacagggaaatcatctagcctttaaggcttttcaaactttaggttgcagaccccattacttggccatgaaatcaatttagtaggttatgaccagcagttttataatggaaaagaataggatagaatagcataaagaagacagatggaacagaatggaatagaaaagaaaagaatagagtaacattcatgttttttgggtaaatatattttgggacacttctttgggaaacttctggatgatttctaagacctgttatatgaaataatatttttaatacacttagatgcttcttatcaaaacaaatctttgagacatcattgcacagagaatggttaatgtctaacaactttgtaaatcaaggtttcatgcatttttaaaaccaaagtgctaccacctgtattttgaagagtattgtcaacaaataaaaggtttccaaaccaagttgcagtcctcaaatgtcatgtttgtccttaggttatggatcgcagctttaaaaaggaattttctgaaattcctggtcatcaagtggatatactctacaaactttttaaacgccgaccaaggtttgtttctccttcactattgtgtttctgagaaaaaagtttgcaaataaagaggagtgttactagatttcagcttttttctcccaattaaatggaattattcagtgtaatatcttttaggtggagatgtttaagggttttgatcctaattcagtattttttgagattatgtctatatcttaaggtagagaataatgatttattttcattatttaaaaatagttaaggatctgtgtaagcacggtactattgtagattctgctttgtacattaaggaagttcctcttacatcatagatggcacacagatttaaaaacagttttttctaaagtgcgttcaaacaaacacaagttccctgatgtataaatcggaactacttgtaataggcttccaggactaactaagtttggggaaaatactgggttaaaaaaaggaagttaagcagcttttcttttactgcagaatgtattattggcctttggatctccaagtgtaagaaacagagtaagcagcgttttccaaacttatttgaccacaaattgcttttcctcagagtatctcatgtgcttgtgcctaaagtttgaaagatgccagtataaatggtagaaaataaccatttgaaaagagttctaagaaagtatcactgatttccaccattataaatgcagatttccagttttcaatcaaatgtaatctagaaatcaaggagtttgtcacaaagatgtagtcagctagtttgtgtttgagatacaaactctgacaggttataggcaacctagggaatttaacctagaacatgcctcttgttttggttttcctttttttttgagacggagtctctgtctgtcacccaggctggagtgcagtggcacgatctctgctcactgcaacctccgcctcccgggttcaagcgtttctcctgcctcagcctgccaagtagctgggactacaggcacatgccaccacgcccagctaatttttgtatttttagtagagacggagtttcaccatgttgagcaggatgatctcgatctcctgacctcgtgatccacccatctcaacctcccaaagtgttgggattataggtgtgagccatctcgcccggcggttttcctatttttaaaagagtgagtgataattagcccaattacataccttctccttgtggaaaaagaagtgagacctcccgcagcagtgggaaaagcacaagctttcttgtcaaacagaatcaactttaaatcctaacttcaacacctgtcagactgatagccttgggccatgagcttctctcccaggctgactttcctcatctagagaatggggatgataatatagtttcaacctcacagtgtactgtaaagcatcttgatagtgagtgcctcgcccaaatctttgtacccttcttccctttccagctgaagcacagggaaatgaaactaatctattaatgtagataaaaacagaattggccaggtggtggctcaccactgtactcccaacactttgggaggctgaggtgaaacgatgggttgatttatttgcctgcttacagtatacagaaaggaaatgtgtcctagcacagacacaattgtctgtcagtgctgacaatagttggagacatctgtagtctagccaaggtcacgtctgagaacctggagagtatggaagaagggcaaagtggatccctttatctgtggaataacccacctaccagccatcacatggcaaagggaagagccatacaatgtgttatgcctgtgctaagggcctaattgtttcacattgatgtttttatgagaatgtgaaatgttgatgggcttttcttggtaataccaggatttccaaacagaaaacgcactcagaaacaaccagcgttgtccctttcggagaactaccaggatctggcaagttgaataaggatgcctttgcccagttaatgaaagctatggatgagttggacaatattagtaacatgccagaaggcttggaccctttggtctggaatcatttctgcatgacaagacgagcaaaagtggaaaatgaacagaaagtatatactattttaacttaatttaatttttagtgtactaatatcaaatacatagtttacattggtcagtgtaaccaaaaaagctaattatttaggtttccctgctagggtagtatttggtcatagtaataagataatgaaatactatattaaccctggtgctattgaaggctaagtgtaggcctgttgcttttagactggtgccgttcaaaatagtgtccattagccacaagtggttattatgcatttgaaataaatattgccagtcctaactgagatgtgctgtaagtggaaaacatacacattagaaggcttagtatgaacaaaaagaaatatgtctcattaatatttttatattgattataggttgaagtgataatattctggatacatttaattaaaatatattagtaaaattaagttcatttctttgatttcactttttataatgcggctactacagaatttaaaattacatatgtgactcacatttatggctcacgttatatttttcttggacagcactgttgtaggttatctcattttgcatagattagaattatatttggctcagcagaaccaactttatagttttgctagaatgtggcaacgagtaaaaatttaagagggtctttatttgggaagagaatccttcctcttgttgcttcttgaccactaccccaaattccctaaatttaatgcccacatgcatcaggctggcatatttttgttaaagtacctaggattctataatttcacttaaagtgatgagaacaaattttaaaaataagatataaaagaatttatagttgcctgcatacttgattttcaccaagaagcaaatttgatactttcaaatcgttcaaattgttacataccatgtaagttttagacatttaaatttaaatgttttattactttcttcgaaagatagacctgttaaggtttttaaatttaaaaagttaaaagatgtatgttgtctaaaattgaagctccatatgttctgacatgtttctggcttggtttctttaggtaaagcagaaagcagctgacttattggaaatggcaactttcctccagaagagagttgaggaggaagagaaggtgcaacaggagattgagagagtgttccatgaactcatcctgtaatttgaagctttctttcatgttcacctattcaaagtctaattagggctaaatcaggttgtgttatcactggggagaatgcctactgactgctttacagcyatctcccttccagcactgtgctttaaaatttctattttaaaaagcctgctttgttacatagaccttgattcaggatggaactttcccacgttttgttgctcttattacaaataagcaagtttcagaaaaatcttagtattgttttaagtcggccccttccacataaaaatacaaagaacctgtttttcagtactttggggctcaaggcatataagctaaccatgtggaaaattaagcagatgtctaagaactttccatgtagacacgcagccaactgatatatttttctttaggggaacttgttgtttactaagtgattaagatatttaagtccttgcttcattttttggctatatttatagcctcatcgataaatacttctctgatgttcccaaattcattgagaacacatcatttttagatctaggctatagcgaggatatgaattacccagaaatagatttgttaagtaacttacatattaaatattgttagtatagtatcagaaatcaataaataagttcagaattttaatagagttattttatttatttatttatttattttgaaatggagcctcactctgtcacacaagctggagtgcagtggcacgatctgggctcactgcagtctccacctcccaggttcaagagatctcatgcctcagcctcccaagcagctgggattacaggtgcctgtcaccacccctggctaatttttgtattgttagtagagatggggtttcgccatgttggccaggctagtctcgaactcctgacctcagatgatccacccacctcggcatcccaaaatgctgggattacaggcatgagccactgcgcctggccagatttgttatttaaaagtgtctctattttcttcatttttactttacttttattaccgtcaaaattatacaatcttttcttaatcctaaagtaaaaatctataaatgtatttctgtccataccattttttgagcaacccaggtataattctgcatcaataggaagaggtttcagagagacctctaggaaagctcatcatcaggaaaatattctccacactaatctccagcatgttttccttaagctgattcgatttttatattctcagataataggtgaaatttgaaatatattacaactacttgctttgaagtacttttcaattcagattacaggaagagaaagtgagattccagttgaatttgacaatccaaattcttcttaaacaaggacaagtagaactggaaaatttccagctagtactggagtattctgatgcaattctcatcaacaagaacataattgaagacttgaattctgtgattcgggtaattatactttttatttttattttaattcaaggtcttgctttgttactcaggctagagtcttgtggcacaatcatggctcactgcagccttaacccttagctaggctcaatagatcctcccaccttcacctcccaagtagctgggagtacaggttcacaccaccacacccagctaattgttttaaaattagttttttgtaaaaacagagtcttaatatgttgcccaggctgttctcaaactcctgagctcaagtgatcctcctgctctggcctcccagagtgctggaattaacaggcaggagccactgcacctggccaattatacttgtttaaagacaaaacatattgcctgctgtaccaaatattttacattattctcccattttcataagtaattttaattcaattaagtcagtggtttcctaactgtggttgcacattagaatcatttgaagaactttataaatgtgcycagaccccacccccaggatgagtattttttaaaagctccctccataattctaaggttcaagaaggatcacagagctaaatgtccattctagtatgccatcgtttttttaggcccagcctactcaggcaaagataatcttagataagcttagttagttgatttcagaccttacttcttttctaatatgaacatttaatgttatttctgtataagctttaggtataattgagtcctaaaaaaatattccctataagctttattttatctgtattctacaaattttaatattttgtgttttaattttcttttacatattttctaatttctgttgtgacttcctatttgattcatgggttatttaaaagcgtgttatttaatttctaaatatttgcggattttgtgctatttgggaattagatgataatgctactgtacattttatttttacaaatgctataaacacaaaacatattgctattattttttgctttagacaattatcttttagaataataaaaatgtgaaaagaggtattttctatttaccttaattttcactatttcaaaagatctttatttcattgtgtagatccaaatttccatcttgtatcatttaccttctgcttaaagaacttcctttaacttaattgaagtacaagcctgctagtaatgaattctctccatttttctttatctgaaaaagtttttaatcaccttcattgttgaaagatactttgctagattcactggattgccaggttcgttcatttgttctctctctctctcttttcattttaaagatgttcattttcttctgaacatctagatagtttctgacaaggtttctgctatattttttatctttgttcatctgaatttaatgtgtctggctttgagattttttatttgtttttcagcagtttgaacacaatgtgtctaggtggggatagggggcggtatgcacatgtgtgcgtgagattcttgagcttctctgagcttcctcaatctgtgatttgatatttgtcattatctttggaaaattcttatttattatctctgaatatttcttctgcccctttcgctctctctttttctactgggattccaattacacacgtgtcagattgtctgatactgttccacatctcttagatattccatactcattgtttttcactctttgttctctttatgtttcagtttgggtaattactattgccctatattcaagttcattcattcttatgctgtgtctagtctgataatgagcccatcaaaggcaaaatatctgttaccatattattgtagatagatagatagatagacagacagatagatagacttacatttagtatttctgtttaacttatactttccatccctctgctgaaattccccatttgttcatgcatgttgtctatcctttccaaaaatttttgttttagaaaagttgtaaagatagtacagagaattctcatataccccttatccagtttcttatattttattattttccatcagtatggtacatttgccacaactattgaactaatattgacacattattattaactaaagtacaaactttattcacttttccttagtttttacttaaggtcatttttctgttccaggatctcatcaggatgcattttatttagttgtcatgtctttctttttttttttttctttttagactgagctttgctcttattgcccaggctggtgtgcaatggcactatctcaggtcactgcaacctccaccttctgggttcaagcgattctactgcctcagcctcccgagtagctgggattacaggcatgcgccaccacacctggctaattttgtattttcagtagaggcggggtttctccatgttggtcaggctggtctcgaactaccaacctcaggtgatccgcccacctcagcctcccaaagtgttgggattacaagcctgagccaccgtgccaccggccagttgtcatttctttctagatagtgacagtttctcagttttgtcttgtttttgatgaccttgacagtttattgtagagtaatagtcagttattttgtggaatgtccctcaactgtggtttctctgatgtatttatcactattcgcctggagtatggagaaagagaccacagaggtaaaatgccctctcagcacatgatttcaaggatacatgctatcaacatgtcatcactgtttattgaatcttgaccacctgaattgaggtagagttttgtcaggcttctttactataaagttactttttctccactgttccatgctatactctttataaggaaattagtcataattattttaaatttcccatctgatagttctaacacctgtcatctctgatctaggtgtgttgattgctttgtaacttagttttttagagatatttttattgtggtataatacacataacataaaatgtactattttaaccatttaaagtgtgcaagtcagtggcaattaatacatcgcaaagttgtgcagctagtactgctatctagttccagaacatttttgttttgttttgttttttgttttttgagacagggtctggctctgtcatctgggctggagtgccggagcatgatctcagctcactgcagcctccgcctcccagactgaagccattctcccacctcagtagctggaattacaggcacgtgccaccacacctggctaatttttatatttttttggtagagatggggtttcaccatgttgcccaggctggtctcaaactcctgggctcaagcgatcctcctgccttagcctcccaaagtgctggaattacaggagtgaggcaccccacccggcctcagaacattttttatcatcctaaaaggaaaccccacacccattaagcaattattccccatccacctcttcccttagcccctggacaccactaatctgcattttctgtatggatttgcctattcttagtattttgtatgaatggaatcatacaatatgtggcctttgttttctggcttctttcacttagcatgtttttaagatttaaccatgttgtagcatgtatcagtcttcattcttcttttgtgaccaaatcatatttcattttatggatatacattttgtttatccattcatcagctggtgaatatttgggctatttccaccttttggctattgtggtgcctataactgttcatgcacaagtttttgaaaacctgttttcagttctctggggatatatacctagaagtggaattgctggatcgtatggtcattgtatgtttaactgattgaggcactaaaaactgttttccatagtagctgcaccatttcatattcccaccagcaaagtatgtgggtttcactttctctacgtccctatcaaaacttgttattgtttctcttttttgttgtttgcttgcttgctttttaattacagccatcttagtgggtttattcttgatgtaaatttctctaatgactaatgacattgagcatcttttcatatgcttgttgaccatttgtatatctttggacaaatgactactgaagtcttttgcccattttcaaattaggttttgttgttgagttataggagttttttatatgttctggacattaaacccttatataatttgccaatattttatccccttctgtggattgtctcatgtttttggtgttaaatctaagaatcaggccgtgtgcggtggctcatgcctgtaatcccagcactttgggaagctgaggtgggatcacctgaggtcaggagtttaagaccagcctggccaagatgtgaaaccccgtctctactaaaaatacaaaaattagccgggcatggtggcaggcacctgtaatcccagccactcaggaggctgaggcaggagactcacttgaactcgggaggcggaggttgcagtgaggcgagatggcgccactgcactccagcctgggtggcagagtaagactctgtctcaaaaaataaaataaaataaaataaaataaaataaaataagtaaatatctaagaatcaaatctgaagtcatgaagatttatccctgttttctttcttcttttcttttcttcttttttttttttttttttttgaaatggagaaatggattctcgctctgtctcccaggctggagcacagtggtatgatcttggctcactgcaacctccatgtcccggattcaagcgattctcctgcctcagcctcctgagtagctgggatttacaggcgcccaccaccatgcccagctaatttttgtatttttagtagagacagggtttcaccttgttggccaggctggtctcaaactcctgacctcaggtgatctgcctgcctcagcctcccaaagtgctgggattacaggcgtgagccactgtgcctggcctcagtccctgttttcttctttgaagtagggaaatgttagccatccaactttttgttttcaatattgttttggctattcatgatcctttgcagcttcatatgaatttgaggatcaggtttttccatttgaaaaaaaaaagccattgaaattttggcagtgattgcattaaatctatagattcctttgaggagtactgtcttaagtcttttgatccaagaacatgggatgactttccatttatttaatctttatattctttcagtaatattttgtaggtttctttgtacacacactttttagataaactttatttctaggttttttctttctgatattattgtaaatggaattgatttattaattcttttccagatttttcagtggtgatgtataaaaatataactgatttttgcatattaatcttatactctgcaactttgccaaatttatgtattatctctagtagggtttttgtggattctatatgactttctctatatatatagaytcattaatctgtgaatagaaattgttttacatcttttcagtttgggtgccttttatttcttcttcttgcctaattgccatgactagaatttttattacagtgttgaatcaaagtgacaaaaagtgggacatccttgtctcgttcctgatcttagttggaaagctttcagtcttttatcattgagtatgaagttatgatgggttttctgtaaattcccattatcatgttgaggaagttcccttttattccaagtctgttgcatatattttttttaatcattgaagtgtgctggattttgtcaattttttttttctacatcaattgacatgatcatgtgagtttttaaatttgttctgttaatgaggtatattatattgtttgattgtgcggactactcttgcaatcttaggataaatgacacttggtcatagttataatcctttcaatgtgctgctggaatcagtttgctagtattttattgaacgtttttgtctttgtgtatgtattcataagggatattggtctgtaattttcttgtgatgtctttctctggctttggtatcaaggtactgctggcctcatataatatattagaaagtgttccctcctctyctattttttggaaacatttgagtagtattggtgtaatttttctttaaatgtttgatagaattcatcagtgaagccttcttgtcctgggcttttcttttttgggaggtttttgataactgattcaattatttacttgttttaggtctattaaaattttctattactttttgaattggtttttatagtttgtgtgtttctaggaattttctatttcatctaagttacctaatttgttggtgtagaattttcatagtattctcttataatccttttaatttctgtaatattggtagtaatattcttgatttcatttcttattttagcaatttgagccttttttttcttagtcagtctagctaaaggtttgtcaattttgctgattttttaaaagaaccaacttttggtttcatcattgactattgtttttctgttttctttctttctttttttgagacagggtcttgctctgtcacccaggctggagtgcagtggcatgaacacggctcactgcagccttgacttcctgggctcaagtgatcctcctgcctcagcctcctgagtagctgggaccacaggcgtgcaccactattccaggctaattttttgattttccgtatagttgaggtcttgctctgttgcctaggctggtctcaaactcctgagcttaagcattcctcctgcctcaacctcccaaggtggtgggattacaggcatgagacaccacacccagcatcaggtgggaggacaatgaatagggatacaaatgcatacaggttggtagattgggtgatggcaaaaaaaagttcctgcctaattgttgacatataaagtaaattggctctgctatttaaatgtatcttataatcccttctgtttagtgactatcatgctttatagtgatcagattttgcccaagaagccatttttaatgtctgtttcttaaaaagaagacagaattatctctgtgacccaagtattttctaaaaatagcattcagcctcaaatattctatgttctatatgcagaatcatattatatggatatctaatgtacttttttaaagactcaaggacaaaagaaagttgctagcatgatggaaagtaaagatgtacacaaaagaatacttcagattgagtgggaacataagaaaatggagatggaaagggaagatctaaatcagaaggcttgggatattcagatgctatttttttcaagagatcgtcaaaaggtaaattctccctacccccctacatagttttaattttattcattaatgtattcattcatttaaccagtatttaataagaagcytctgtgatatcaagcatattctaagccaggagtgtttcaaaatatatctgtgagttatttttcttccaacagtttacatttgcagcctccagttcttcatgacccatttagtagaatcattctactcagagctaaggatttcctgtcaaacccggtggtccttcaattctctgtagcatttaaccatcttaatttctcattcctttggctttcatcaccccaaattaattttgcttccaacatgtcataccactctacctcttttactggattctcttttgcctctaacacttcaatatagccgttcttcaagattttgcccttagctatgtttgtgtttctttccatacctctccctgggtgatgtcctctgtttttctaacttcaacgatcactcctacaaactaatccaagttctgtggattccaagccatgccccatttctatagttttcacctcccagcagctcttcttagtttgccttttttgtacatcccaaatctacttttcaaggtctagtttaaataccaccttctccttcataaaacctttcttgattttccaagcctggagaaattccatctcattacaaaccacctttgaattagcatgacactctacatggcttctggcaaccaatcatatctatgtgatcattttcccatgaagactaggacatgttatctatctttgtatctccctcagtgtctttaactaggactttgttaatgtgggactcaagtggmacacttaaatgtttggtgagttgaataaatgaattaatgaatgagaaaataaagtaggcatttgtaataattggtgctttgatgtaataattagtgtacatgaatgtattgatggctaaatacagggaaatattatggcacaaaagccaaatcaatctttttttgttttttttgagatggggttttgctctttttgcccaggtggagtgcaatggtgtgatatccgctcactacaacctccacctcctgggttcaagcaattctcctgcctcaccctcccggagcagctgggattacaggcatgtgccaccacgcccaactaattttttgtattttttagtagagacaaggttttaccatgttagtcaggctggtcttgaactcctgacctcaggtgatccacctgcctcagcctcccaaagtgctgggattacaagcgtaygccaccacgcctggccaagccaaatcaatcttaacttgcatagatatttgttatgaaaaacagtaactttcaaagctaaaacaacctttataaagtcatctattgaaagagagaaaaatatccttacatgtttttttttaatctcaaagtacctaaatgaaccaaactatgaggctctgattagtattcagattggaataatggaacaaaccattgctgttttagataaggtaagtctcaaagacgttggttattatatcctaacagttgtaaatcatttgagcaaagtaatagtgtttcaaatcatgaatttacctagaccctaataaaatcttggttatttactagtattcatgaggtaattaaaagtccctaagtagtatctttgcaaccgcaactaatgaaataaaattaagcacttcctttaatattagaattaacccctggggacatatctgagtgtaagtggattttctattttacattaggttaggatttatgtaataggagtgttggtagtctttccttggcattggaaaggttttatttaatcatcactgaataaaaatggtcagtttttattatgtagcatatattagaaacaaagcaatctcaagcttttaaaatattctctcagtttaagaatatacaaaatgttttttctaaaatttgttattaacataccattctacctttcaacaaataactcgagtgcctactatgccaggcactacagatatggcggtaagatgttatcttaatgatgataatgtatttaaaatataagaataatgtctttataggataaattacatttttcaaaattaattttgtggggtgtcatgggaacaaaaatttcagatgcacaaaaagaatgtggaaaactgcaagaaactactcaaaaaacttggaaagttcagcaatcaaaaagatatagcaaattatgccctaagctgcaatctacgagaagagttggtagctgtctcagagagaaaagacatctgtaatgcaatgggtaagcatgcttttttttctttaaccaactgtaggtttctttaaaagtaatcagtaatcctaaaatgtatacaacagttaaaaagctatcagcatttctttaaaaatacattgtttaaaataatttcaacttttattttagattcagggagtacatgtacaagtttgttacttaggtatattgtgtgatgctgaggtttggggtacggaatgattccgtcacacaggtactgagcatagtaccccataatttttcagcccttcctccctccctgcctcctccctctagtagtccccagtgtttcttttctttttttttttttttttttttttgagacagggtgtccctctgttgcccaagctgcagtgcagtggtatgatcttggctcaatgcaacctccacctcctgggctcaattgatcctcccacctcagccccctcaagtgcctgggaccacaggcaggaaccaccatgcccggctaatttttgtatgttttgtagagagtaggttttgccatgttggccaggctggcctcgaactcctgagctcaagagatccgcccacctcagctaaccaaagtgctgggattacaggtgtgagccaccacacctggcctccaagtgttccctgttaccatctttatgtccatgagtatccactgtttagctcccatttataagtgagaacatgtggtatttggttttctgttcctgtgttaatttgcttaggataatggcttccagctacatccatgttgctgcaaaggacattatttcattcttttttttatggctgtgtagtgtcccatggtgtatatgtaccacattttctttatccagtccactgttgatggggcacctagggtgactccatgtctttgcttttgtgatagtgctgctgtaaacatacaagtgcatatgcctttttgctaccagcatttcttccacatgtatgattctgagtgctgcttctgtatttgaaagtattgataaataatcgaattcctttattcatttttgggatagggtctaaactgacttgtgaaaagattgtcaaagaacggtatgaaaacatgatgcaacagcagaagttaacaaatatttcaaaacaacaagctgaacagatttcaatactacagactgaagttgaaagattaagaatgaaaacatttcctgctcttgttcaaatgtaaaaacgctggcaggaaaacacaaggccaaatcaatcatttaaaaaatcatttcatttgggtaaaatgatttccttttctttcttactgggaaattgaagtagcatgtcctctgagttgcatgttttagataaaaaattgtttaattttagccttaattgtatacaaatttttgtcctgcatgaataaatgtgtaaaataccatgaattgctgtttttattcaagaataaacaagacttgaagtcagaaagtattcaagatctattttactcatttaatctgagttggatcaaagatattttcatagttatggtatagaaagtcttaaaaagaaattctttgccaaactagcatttctaattttatgaaactgtcagaaaagttatgagattatgggtaatttttatctttatgctcttctgtttctcattttcttcagtaagcatttctttcataatcagaaaaaaattacgagagtatttagattattctctgctgcaccaatgagaacaagacaaattgttagagctttttccaagccttgtatcatttgtaaattacaacatattttggccagacacggtggctcacgcctgtaatcccagcactttgggaggccgaggcatgtggatcacgaggtcaggagatcttgactaacatggtgaaaccccatctctactaaaaataaaaaataaaaataaaaataaattagccgggcgtggtgggtggtggcaggcgcctgtagtcccagctactggggaggctgaggcagcagaatggtgtgaacccaggaggtggaggttgcagtgagccgagaatgtgccactgcactccagcctgggcaacagagcgagactccatctcagaagaaaattacaacatactttagagacataatctacatttcttttatgttgtaatagaaaattcaattttgtgctttacccaatagggtttaaccaacagaaaaatactttcttatttccatgaagtagtttatcacttttagatggtgataattatataatgagatgaataattggccataaaactgctttgcccttccataacctgtggactgctgtccacagggatcatggaccacaatctccaagtgatgtcactgtctcactgttctgcaatttatgaactcaacgttaagtttaatcctcagtaccatatccaatatacactgatgtagataaagcaagagagctactataaaatcttctgtttagcaaaataaatctttagaagatgtaattgatcacccacatagtgatctgtgctggatggggatggtaagggaaatgataggaccaacactttgatgattcccctcctttgtactagacggactcatgaagtagtcagtttggcgtattcagtagggaagtgcccatgggtaccatttcctacatctggggtccttcaaaattatccctgagatgagagttgtggggacagaccccagggtaggggtgcaaatactttatacttaagatggtattgccagaagttctctgtcctgttggtttgagtcaaccatagatgtactagacttgattttttttacaatcttttctggtgacacaaactccattttcacctaagttagctgtctggagactccatttgctagtagtgccacaaatttcactagataatgctctgtggattcccaggtcttaacaaagcagccggcatcatttctatttcttagtcatcaacctttgttgactctggcaatgttccttgcttgactgccttactttgaggcatggatggagtggggcttagtgggcacctcttgccatcaagccctattccagaagccctttcaacgggagataccttctggttttggggctttggaaggacatgtgggtcatgcacagtaactcctctcttaatactgttcatggtattgactcctctcagcttctgctgaacagcaaatatattcatattttatagtcctttaaaatattatttatattatcaactagtgatataattaactggatcagacacagtatggctttatgcataggaattaaaattataggatctattcctgggcttcaaatcttggctctgccattggagttttaaataacctcttaattttgaaataactatcttatatttcttcttctttaaaactggaatattctagttttttaaaattaaaaacaagtgctatgttgtattagctctcatttttataagtaaagctgtcatagtcagtggtttttaataaaagcatcccattaaatccaacagagcagctgctgtgctgttggaacctcagcacccagtcaatgccctggaaatccccattaccatgcccctaagctttcccagaaccagagtctcgctgatgctgtatttcccccaagtgtatatatatgggtggctccaggtgatgtgcctgtcagcagtgggcagctgcagcctctgagatctggagaaataccataatgacctacaaaatgccagcaccaccacaaggggcaacatttcccctgccacatttaggcccctggttggcagcaagcagtgataagaggctggctgataagcactagaacagtagaagtccacaggggtgcccatctaggaatcccagtgctagaggcagctcatatgatgtctgggccagtctcctcagattcataaaggccagcggcacaggaatttgtgtatgtgggcagggtaagagtttactggcatggcactaacaattagaatggacacaaaagcagggccctggcgtctcctgctgtgccaaccattcaacactggttagattatgtggagggactggactgaaagtgggatgtacttgaggggggttcagaggagtgctaaactagtagggaagtgcttttgaaaaagctaagtaaagctgttttaacacttaaaaggacccaaaagcagaaatccagaaagctcttaagaatgactagcaactaaaaccaggaagccactgatccataaaattctctcctatcacctctgcctttctcggtaagcacactcactgcccttaagcatgtcagctctgctgcttccaggtatatatacaacagctgcagtcacaaaaagagatgggctttcttttcctgagctaaattccaaattttcagagactggcccagtttgggtcctatctccatatatggccaaaatgataggtacaactgtataatttggcagcagaaacccaacctgtggaggtgggttcataaatagaataaccaatctaaatttaacccatttcacagatgaagctagaaaggcaaacaaatgcgaagaaccttatatgccatgataccttcatgtgggtgggagataaggaaatgtagttttataagaagtagatggtttagccgggtgtggtggctcatgcctgtaatcccagcactttgggaggctgaggcgggcagatcacctgaagtcaggagttcaagaccagcctaaccaacatggagaaaccccgtctctactaaaaatacaaaattagccagggtggtggctcatgcctgtaatcccagctactcgggaggctgaggcagtagaatcacttaaacctcagaggcggaagttgcggtgagccaagatcgtgccattgcactccagcctgggcaacaagagcaaaactctgtctcaaaaaaaaaaagaagaagaaatagatggttgtttcactaaatgatgaatatgcaaaacacatttgaagagacagggaagaatatggttttggacatataagtttaattacctgctagactatcagatggaaatatgtggtaaatggatggaaacaaggtacataaacttaggaggcagaaatttttaaactttagggttagacattcaccagattggacaatttttaacatttaaaataaaactttttgtcataaaaaacaaatgtattaaaactagtttccagaactgcccaaatgactttttaaacatgacttaaatgtcgttttgacaaatctatccaaaatactaattttccttttagaacttagtttataatttatatattaaagtgcccttaattgatattcattgggataccttcctctgagccctaatggttttgggaggcctaggcggtggatcacctgaggtcaggagttcgagaccagcctggccaacgtggtgaaacccagtctctactaaaaatgcaaaaattagccgggcatggtggcgggcgcctgtaatctcagctactcgggaggctgaggcaggagaattgctggaacccgagaggcagaggttgcagtgagtcaagatcgcaccatcacactccagccaggatgacaagagcgaaactcagtctcaaaaaaaaaaaaaaagtgcctaagtatcttttaattaagttgtcattctcaaagatattctggagcaaaaatcaggaattaaacatctataaattcttcttcacttctgttatagtgtagtaatttatcatctaacccatagtggtctatcaattgagtaaggcttagtttcttgttctcttcagacacagctgactgcaactcataaagcaagagctggctacagcttctccacttctttattaacaactgtaactgagacagatcattctgaaacagaaaaaaaaacatgtatgtcaataactagtcatgctagttcaacttaattaaagttgttaaattagtggatgtgcaggtttaaaggctaacatacacagggatgaatgggacttctatctaggaaaaagtaggatggtcatatgtagaatggttacaatgtcactcaacttgagttctatggctattttgttggcttaagctctgggccatctttatgataagggaaaaatcaaatcattaaatagggccaaaactatgtcaagaagcaataatacagggaaaaatctactgtattacaactgtactttttaaaaaatgacactatgctttccactaaatgttgctatgaacctaaaactgctctttaaaattacaatattcaagttaaaaatatttttttaggctggggatggtggctcacacctgggatcccagcaccttaggaggccaaggtgggaggactgcttgagcccaggagttcaagactacactgtgcaaaatagcaagactctatgtctacaaaaaaataattttaaaaaattagccaggtgtgatggcacatgtctgtagtcccagctactagggaggctgagttgggaggatcacttgagcccaggagttcaaggctgcaataagctatgactgcaccactgccctccaggctgggcaacagagaccatgtctctaaaaaaagaatgaataaataaataaaatatattttttcaacattcaatactcctaaattttattttttaaaaactccagaatttcaagagaacaaatgagatacactatcccatcacttattccacgtaattcagggaaaatgagctattgcatatatatgaattttccaggtaataaagattattctccttccaagtacccaagttctatttaattcaacctatatgggttgaaatctaaaatataatatatatatatatatattttctcaaataaaatggctgaatcacattaattatttgggggagacacaagatcattactaaaaataccttttattgtactctacagcccatttttagttttactaattcactgtcagctttcacttctgttcccattgtacttgcatctaacatttaatacttctaatattgctgtgggctagaaactagagagaaaagtttaactgcatattaaatcagagctgagattcttaaaaagttttacctggtgtttaagggccttttctactctaaatctggagttgaattaaagctgttggaagccaggtttctgaatatttggcttattgcttattatggtaaaaaaaaaaattctatttttgaaattactttcctgtaatttatgtaaaaataaaaattatgcaatggtcctgaaattcttctcacctttgatctatacattttgactagttttagcctccgaagaaggtcttctttctcctgaacctgcttcaccaatttggctttttcagcgtttaatctttgtttaggaagcttctcactcacaaactcattttggagagcactgcatgatccagaatcaagtgactgagattcacagacattgagattc

SEQ ID NO: 6952 - DNA, 13111 bp, Homo sapiens
aagtgaacaatatatcaaatgaaaactagaggcacaatgttggacaacatatctctataactaaattgttttgcatatcttaaactttatacctgttgaatggcaactttccatttctccctccccaatcccctagcacccaccattctaccctctgcttctctgtgtttgactatttcatatgcctcatataagtggtatgatgcagtatttgttcttctgtgactagcttatttcacttagcataatgttctcaagaattcattcatgttgtcacagtgcaagatttccttgtttttcaatacagaataatatttcattgtatgtatataccacatattttttatccattcacctggtgatgaacatttaggttgtttaaacatcttggatattgtaaataatgatgccgtgaggccgagcacagtggctcacacctgtaatcccagcactttgagaggctgaggcagggagacctctcgagcccagggtttaagaccatcctggggaacatggcaaaaccccgtttctacaaaaaatataaaaattaactgggtgtggtggcacacccctgtggtcccagctctagggaggctgaggtgggaggattgtttgagcccaagtggtcgaggctgcagtgagccatgattacatcactgcactccagcccgggggacagagcaagaccctgtctcaaaaaaaaaaaaaaaaaaaaagatgtgatgaatatgagagtgcagatatctcttccagctactttttattttcttcatgtataaacccaaatgcgggattgctggatcatatagtatttttatttttaatttttttgaggaaatgccatgctgctttccatagctgtgacatcattttacatttatatcaatagtgtacaagcattccttttccttcacatcctcctcaatatttgtgatctttttttgtttattgataatagctttcctaacagatgtaaggtaatatctcctggttttgatttcattttcctgatgactagtgatgttgcacattttttcatatactctgagtatctgtattttttctcttgagaaatgtctattcgggtcctttgccattttttttattgggttatttgttttcttgctattgagctgcttgaattactgatctgttttagatattaactccttatcagatagatgtatgatttgcaaatgtttccttccattctataggttgtgtcttctctctcaattgttgcctttgatgtgtagaaaatttttagattaatataatccttcttttctatttttgcttttgttgctcatgcttttggagtcatacccaagaaattattgccaatccaatgtcatgaagtttttcccctatttttttctaagaattttacagtttcaggtcttatgtttaagtctttaatccattttcagatgatttttgtatatgttgtaaggtaaaggtccaaattaattcttttgtatatggatattcagttttcccagcatcatttgttgaaggaactaccttttccccattctgtattcttgacacccttgttgaagattagttgactttacacatgtagatttttaaaacatttttaatttcatttttaattgataaataacatgtggattcatttctgggctctctattctgttccattggtctgtatgtctgtctttatgttagtaccatactgtcttaattagtgtagctttgtaatcttttttgaaatccagaagtatgattcctttgtagcaggacgagccgcagacaaaacctctcagacactgagttatagaaggaagggctttattcagctgggagcatcggcaagctactgccttaaaatccgagctccccgagtgagcaattcctgtcccttttaagggctcacaactctaaggatttcacatgaaagggttgtgattgatttgagcaagcaaggggtacacgacaggggctgcatgcgctggcggtcagagagaaacagaacagggcagggagtttcacagtgttcttctatacaatgtctggaatctgtgaataacatcgatttttaagttatgagttgatttttaactactgggtttaggccaggcaggcccaggcctggtttcaggcctggctctgggctgcctgtctttggttttacttccttgttgttttttttaaaaacaggtactgagtataaaacaatataaaacaatatgagagggtctctctcttccctcctttcccccctttgaggctctcacttttttattagtaggagttctcacttttatttttgttactttttttttttgtaatagattgatagtgatttatatagtacacttgtgctgaagcattttggtgaactaagatagcgatgaagctttttatcatttgaagaagtacaggtagcaagcaaggaagcagtaagtaggttcttattactatcataacttttattataagagttttaagttctcctagtgctgggaactgatttttaaacatggcttcagggtccaattcgtgctacacttatgcgggcacatgtgtcagttttgtcatatttttaactatgtctttaactacttgcctttgattatctatgtgtagacagtaattagtaaggttaaatttcttatagacctctctttcagctgctagcaagtagtcgagagcccatctattttgatagatagcatttcttatctgagttttttgccaggccagaatagtcaaagcttgaccggttttattagtgatgatttctaaaacagcttgcaaccgtatgattcagttgagcatgtaaatgggggtccagtattcccatgagccatcttgtgtctaagtgccaggcctatagtattatataattttttttttggaggtcatttatcatctttccaattacctatggctatgcttcatttttcgcgggaagcatagacagggaagccaggagtttgcctgtttttatgggcagtaggaagaaagatggtttaatagtgccagtaacacaactacctgtccactggtcaggcagcttagtgtaggctctatgtctacatattcagtataacccggtgggggcagtccagtcccggtggaattctgggtgggccgagacagtctgcaaccttggaaatttactgaaaggatctctttctatgtaatttgaactccaccatataactgctttttttgtggtactgttatacagtttttgccccagacaactaagtcctcctacagaatgagtgaattctttcctttttctagctatgcaatattgttcaataattgagacttttagaacctagagatgatcagggtgatttttttgggctgggaattcatcaggaactggctctgtaggcactaattcttgggcttcttatggccattgatctcttattacagtttctccacaaacataacatgaagtgacatttagagactgggctacatgcgcggctaattgcaaaaacaaattcctggtttttcctagagtctctggtactggcacatttagttcatcatagaaagtctgaaatactggttccggagagagtttacaaacctcctcttttactaagatatttactgtaggacctagtcttttcctattgatgcccagagatatgtgttctccttttttctaccttgggtttaagggatttgtaattattaatttcaaggggttgtagcttccactcatacaggaggggctgccttctccctttcggaactaaacaggacctttttcaccttttttaaagtagtctagatgacacaagaccagtaattacacatgtttgcacatgagcttaattcatggcagatatacttatttgtatgttgattttgtactctgcaactttactgatacgttttgttggttctaacattggtgtatttgtgtgtgtgtgtgtttgcatgtgtgtagtctttataatttccttcatgtaagattatgtcatcttcagagacaatttaacttcttccttttaaatttggatgctatgtatttctttttcttgcctaattgctctaactaggacttatagtactatgttttacagaagtcaaaaactgtactaagagagaaaggaggacattatatagtgataaaagggttgattcattaggaagatacagcaactataaatatatgtacccaacatcagagcacctaagtatgtaaagcaaatattaacagaactgaaggaaaagctagatagcaatataatataacagtaggatattttactatcctactttcagtatgagtagaacatacagacaaaatatcaataaggaagcagcagacttgagcaatactttagacttaatgcaactaaaaaaacatggacagaacattccatcaaaaacaacagaatatacattcttctcaaatgcacacagaatattatccaggatagactacatgttaggttacaaaacaagtatcaacaaatttacggagattgaaatcttaccaagtattttttttttctgaccacagttgaatgaaactaaatattaaatattagtagcagaagaaaaactggaaaattcacaagtatgttgaaattaaacaatatactcttgcataaacaacaagttaaagaataaatctaaagcaattgaaaatattttgagactaatgaaattgaaaacaaagcacaccaagctcatggaatgcagcaaaaccagtactaagagggaagtttccatgactgttgacattcaaaaagaagaaagattttaagtaaataatctaactttgcatctcaaataagtagaaaaagaagaacaaattaagcccaaagttagtagaaggaaagaaatggtaaagattagagcaaaaataaatacaagagaacatagaaaaataatagaaaaaaatcattgaaactaagagatggtttttttgaaaagatacaaaattggcaagccactagcaaaagtaagagaaaaaaagactcaaataaaattataaatgacagagtagacatgacagctgatacaacagaaatagaaaggatcttaaaagactactgtgaacaattctacactaacaaattggataacccagaagaaatggctgaatgtctagaaacatacaacttagccaagaatgaatcatgaacaaataaaaaatctgatcattatatgtaactagtatagagattgaatcagtaatcaaaaacttcccaacaaagaaaagcccaagatcagatagcttctctggtgaattctactagatacttaaagaagaattaataccaatccttctcaagctcttctaaaaattgaagagaagggaacacttctgaacgcagtaacaaatgacctagggatgacaaactttggaaggcagctatgctaaccattataacaccaatgcaggatgccaaacttagtaagttttactttatgctagaaaaacttagaaaaaaagtactgataaagaagatggaagccaatcatggataaaacaattataacacaatctgtattttcatctgtaaaatgaataaacaacatatcccaatctacataataggattatttggtaactaaaagaagaatgaatgtaaaacacacacacacacatatattaatacaaacacatatacatagtatatacatgtatattttaaataatacattaatgacacattatatctcggtaattattaatgataacttaacatttctttggcctgtactagataatttacttattgtcatgtaatcattacaacaattctctaagtagctagttaaaatgctaactttaaaggtaaaagaattaacaaccactttgtagttgaattaatgatggcaccaaggcagcctgactctagagcttctgctctttacctctcttccttagtatccagttaattcattcatttgataaatatttattgagcttctgttatgcacctggcattgtaaaagtgctgaggatatattaatgaactaaagagacatgcttcttgttcttgggaagccaacagcctactggtaacatagacataaacagtagtcctctaaattaatacgtaattacgaatggagtagaaatgaaagaaatatacagggtgctaaaaaaragaaacaatttgaatttaaagggaaagaggtgatgtagaaaacctctctatgttagaggccaaaaggataaggtagatgttatccaggagaagtaggaggtgaagatgaaaaaacacaytcctaaaaagataacagtttaygcagacatcctcctggggaaaakagctcagtgcccgtgaattctggaaagaactgagtggcttcagttcagagattgagggggcatatagtgttagatgagactgggaggcaggtaggcaaggtaggggtcatgctgggccatacagctcatatgaacattttgggacattaaactgagtgcagtcgctataggattggaggggtgaagaatgaaagggggacctctgcaaaagccgtgtagcgggtttgtataatgaaaaagtaggattaatgacttctatggttgtccatttgagctaaaaaattcatgcgttttattctaatcttcaagcatccaagggtttttccttttttcacagtatattgatttaatctttgtagtgctagtaattcaaaggcaaagctcttattggatttgtaattcaatgagaaatacagccctcacataggtgtctgacttaatgactcctgctgaagttgaattgtgagatgttatccatctcctcyctgaaatatgaattctagtttagcagaattcgttgtccttagggagttggtaatatcacctttggtatgacttaaaaaaaagcccattaacgatatattttaagatgaaaagtaatagaatgmaggttattcatatatttattttcagcttgacagttgaaattacatgctaacattttactcttatcgtaaaagttataaaacattcctaaattaacttataatatgtataggcttgtttaaagtttaaataaaatattgaaatgtatttatattttaaaatacttatacattggatatagtttgtaaaacaaagttttttttaattgagaattctgtttaattttggctgctgtttaacaaataattatattttataagaaattacctttctcccttaaaggtggttgacaaaataaaatggttggcaaatataatctactttttgttccttgaatacttttacattgcattttccttcttatctctgataagaaactctaaaatcaataatttttaaatagtgtacctatgaaaaaaaggaacattttgaaagggagaaaatattccatactttatgttataaaatacaaagcaacttcattttgagtaacagcttaattagttcaataaagaatattgtgttttgctagcaaattaacgtaaaacatactttactccaccacctcttgaagccaggagtaaaataaaatatagaaatctactctaaattcacactaataattctggtgttttgaatttgacaaagtggaggttagaaagatcgctgctgtcggagaactctgaatttaaattctaactctgataccttctctatgccctggggcaaatttcacaacctttctgaaattccagtttcttatctgaaaaaaggaataatataattacctggtcagattgttttgatgatgacatgagataaagtatataaaattgtgattttcaatcctggctgcacattattatcacatgagaggcttaaaaatttctcaagtgaaggcccccacctttgaccaattaaatctgaatctctggaggatacactcatgaatcaaaatgttttgtaaaaagattcctggctaggcgtggtggctcacgcctgtaatcccagcactttgggaggtcaaggtgggtggatcacctgagatctggagttcgagaccaacctggccaatatggtgaaaccccgtctctactaaaaatgcaaaaattagctgggtgtggtggtgggcacctgtaatcccagctactcgggaggctgaggcaggagaatcgcttgaatctgggaggcagaggttgcagtgagctgatatcacaccactatactccatcctgggcaacagggaaagaccctgtctcagaaaaaaaaaaaagattgctgggcgattttagtatgtagtgtgaattgaaaactggtaatataaaagcatcagcacagtgcctcgcctatggtaggcatgtaataaacgttagtttcattctctttctcatataagttagttgtcttcaatttataaaaaacttagattccttctggaaagacagctataagctatataaaggtttactgaaagataggaaaaagtataatcattctctttggcaaagtataacaagtagaagctattttgtgggtaattataaatagtccctttctttatagttagatgttgaaatttaatttagcttatcctatatcaacagagatttaattaaaaatgtgtaattataatactgggaggcattgatgaatatggccatttattattcatttgaaaatgcttaagttttatgataagctttagaattctttgtcatttcataagtcaccatctttatatgcatttcatctaattgcattatgaaataaatccacatttatagattactaattatgacactaaacgtaatgtatgcttttcccaatttattgatttctatcagtggtgttatctttctcccagtgtaacgggcacataatttttaggtcaactttgattcatcttctcttatttcttaaatacaaaaaagtacctaatttggcagtttcttcttattctgtatgtagttcaatatttttcaaacttgatgatatgaagacctgatctttcagtgagtgactgggagccattagacaagagaggtagatgatgaggctgaagggaagtctccaagttcactccctgcctccacttcaaacagcaactctactctcttagtcatatgttagagtttggtgtacaatttcacttttcaaaaggttcctctgctaaaaagaaagtttgacaaacactgatttagattataaactcttacaatatggagctaaattaaagaccacatcaaggaaaacaacaattgtcaactagtggcttcagactttcttttggggagggcagaatggggggaaactggagaagaaaggaacaacagaaaggggatgacacagcatgttatcccctaggggaatggctggagtggcctataagaacaagagtttttaatggataatcttaagtttgcattctatcatgtatatttccttcctcaaaacttcgaacaccaagttttattttgtgtgagtcatggaaaagagctgacttgtacatatggatgctgctctgcagaatgctgtgatactccgtaaactgaactgctttgatagaagctgcagcttagctccctgagcatgtaagcctatggtgatttacagaaaccttggggagcacatcaggctttatataagccatagaaagggaatttgaaggacttattttccagggtgaaaagggatacacaatattactgattattctgaggtcatatgagggagatgaagcttgttttgttcctgattatctgacttgatgtcttgtatttttgtttataaacctaattaaagtgattgggcacttttccacttttccatatgatacttggtgtcatgttattgttaactcgttgtcttgctttttgaaataataaaggaataaaatacattaccttatttttttttattcactgtaagtttgcacagtgctggaaaatttgatggcatacttctcgtggttctacatacagatgaaaattaaacaaaaaggcatattgacatttaaggattctctttaatgttctgtattcctaattgaattattttgagggagatagccaaaggaaggcctttcttctcaccttataagaaaaacaagcactattggaaacatggtcttgaaaaaaaatttttaaagtaatttttagttttaggaggaaatgaagaaaaagtatctgtgtgaagacagccttgggaattagccatctgtgcatcatgggaaaaaattccattatctactgaagaagagttttttgaagatgtgtgtagagctggaactcagggtggggacatacctcttactatccatttatgaacttaaaagaaaggatagccgtgtagattgagaatgaagtcttccaagtaaatcttttaaaaaattcttcccctcataccaaatctcaaaataaggctgataaatctgttaaacatgatgtgttgttggcctccttacatctccccatgatgagtgcatacagataatggaatctgtccatgtcttattaccctatttatcactgactttgggctagtaaactctcacaagttttgtattatacagcatcattgaaaagagaatgttcttacagctgttgaagacttctaatgatctcaactctgatattgttgtgattctttttgactatattttctggtttagaaccttaaatttgaaatggcattataattggattaattctccgttggagaatctgcaagaatgttactaacatgatctttgtggaatgaagggcatttacattaaagtggagatgaatattttgttcctcaaacaaataaactacttggtatttaagcaaatggccaaaataaagtcatattctgattaaaattagtgtttctgtacatgctgattcattcatatttatttatttcctacatacagcatatgtcttaagtatattcaaggtaattcatttcagacaaattaaaagtagatattgaagtaccttatatgtgaggtttgcaaatcaaaattccatggaatttccaaatacacatttaagcattaataagtttagcttattaaagagagattgcttgatattccaagtttaataattaaaaataatttttatccttagattaagtaacattaaacactggagataaattattcatatgcataattgaccttaagtaaatcgatcttttataacctttctatactcagtggttttggtaagctcttttagataatttgatttagggaagtgattttcaataaatgtgcattgaaatcttctgatttgtaaaatttctgaatagtgtgaattatttattaaaattctaaataagaatgcctcattatttgttgttttataattctcaaacttgaaaaacattatcaaaatgccagggtatgctgattgatagtgtgttacactcaaattggactaagagagtttgatcggcgcaggagctgcattctttgaatattgactatggaccaggcactgagctatgcattttatatacttttatttatttggtgttctcagagaacttctagactctagcatttactctgtgatgttggacaagctacttaccatgttcacatgcaaatcaggaaatcaactcttagtttagaagtttcatattaccacctttcttttgactttctttttgttttttgagacggagtctatctctgttgcccaggctggagtgcagtggcgcaatctcggctcactgcaagctccgcctcccgggttcacgccattttcctgcctcagcctcccgagaagctgggactacaggcgcccgtcaccacgctgggctaattttttgtatttttagtagagacggggtttcaccgtgttagccaggatggtctcaatctcctgacctcatgatctgcccgcctcggcctcccaaagtgctgggattacagccgtgagccactgcacccggcctcttttgactttctgctcaaactgtccccttacttatagttgaagaagacaagaattgcattttccaagccatgattgttcctagtacctagtagtagtagtagatgagtgatgttcacaagctatattaatgtgtaaaataagtaagcatcatgactgcctgagagtaaactgggaatattggataaattttatgttgggcgtttactttgaaaaatatattttatgtcaggcccctgcttttcttgcctttcacattacctgagtgttgttaacaatggtcacagtggagggctgaatttggatgttgaatttagccataagacaatttatactttgaagattagatttaagctttatttttcattatttaatatgctgaagataagaggagccaaaatgggaaatatgagaaatttagcttaaatgtataaactctcacaaacccagttcttacagctatgatagaagtcctattgtggatttactgcatttcttggcagtaatgcttactgcaagctttattacaaattacctataaattgctatgtgttttcactttcatctttatgtagatttcaccttgggtcacatttgctcccacatgtaagaagagggtagtgcactggatgaggaaattttgatgtgatatgtttgtcagtaaatgcatcttatctgaatattttcatttctctatgcttattgggtattaaagatatttttctgaagaaggaattacagtaaggacaagcctgcattttcaggcaagctaggatttaaattgggagaatcaaagtcattccatcctaaccccatgatctggtaaagagaaactcatacttccatctgttctaatttatgtgaggtacctagatgatcatattacttccctctacgagacactggtgacagagagtcagccttttccttctgcactggcttgggcacacatggagaagtatattagttcattcaagaggacctcaaggaggttgctggctattcaggaaatatatttccttttcctaaggctggatttggttttaggaggatggctgtatgcaatgagaatggcagtttatttgttctgggaacaatgtatttttgggtttttgtgtgtatgtatgtcctaaatccaatttttccccagtgggatcttctttatttttctagttcatatatagcttttataagcaagtgataattaatggaacagacattttagttgttgttgaatcctttccagttctcttcccatcataagggc

SEQ ID NO: 6953 - DNA, 15059 bp, Homo sapiens
gtgaacccattgctttaaattaggaagtacttcccttgggaaagtgtctagagattaaagaaggatctattgactacattattttaaaatataattagtgctgagtaaaaattagtttatcctgttttttgtctttgtggacatcatgtactaggctgaccaatataaaattgccacctttgcagttttaaagtggtcaaatatcagttaatttatgtgattcaatctaatgtaaatatataaacaggcacatggctcagatgtggtcattttgatgccactattagaatgcagagttgtccttatgaagcctaaaagataattatgaactttctgtgtcttttccattgccaggtcatgtgtgcatcgggcattgttacccattcctaggcctcgctccttccccaaacctgggggaagcttaggcaggcctgagagctccagcaaggttgagagttagaatagtactttgcaaggaggttgcagaaagagatgggggagagaggagcaaatgtcatagttgtctcttgctcatgacacttggttataaaaagtaacgcttcttatgaagttttacatataagatgaagtgagtggaccaagaaattataatacattttttatcatcaaagagttgcatcaaccaggctatagcacaaagtctgattttcagtactgcctcatgacagtaaatatgcattttctagaatggtgctgtccagcagaacttttgtgacaatggaaatattcagtagctgccctgtccgaggcagtagccactagctacacatggctactgagcacttgaaatatggctggtgcaactgagaaactgaatttttaattaattgtaactaatttaaattggaaaagccacttgtgactagtggccatcaagtgaacacagttctggaaactggataattcagatttttttacctagcatctagggaattggagatactgacttaaaggatataattattttttaaaatagggcttctaggctgggcacggtggctcatacctgtaatcccagccctttgggattccgaggcaggcagatcacctgaggtcgggggtttgagaacagcctggccaacatggtgaaaccctttgtctactacaaaaatacaaaaattagccgggcatgttgtggtgcacgcctgtagtcccagctactcgggaggctgaggcacgagaactgtttgaacccgggaggcagaggttacagtgaactgacattgcaccactgcactccagcctgggctacagagaaaaaaaaaatacagcttctagtttagtgaagaaaagggcaatttgagggagagaaaaggaactgcgttctgtgtgaaaggacagagaagcctggtgatcagagaataagatcccaaggcacttcactggggctgacattcagggagcctcctggaagaatcatttcaaaagcaattgcagtcaaaacagattttgagagcactcttagacccagaaatgtatagttgtctgcatgtaagtgctaaggctaataaaaatcagaagacatttggaagacatatccttgaattgaaaaaaataataattgaatatagcaaatgcaagttcccacttgttcagcaatctgtttaacttcttatcagagtcattgttaatacttccttttgttgtacatgccagtgcctggatatctaacgtacaatttcttgtgctgtcatttccactttccttttcaccaatatgaccagtaaatacagtaagaaatagacactattgatacagagcctggatagtcattaataacagtaatgttagtatcgtattgagcactcactatgtgtctaagcttttgacaggtatttggaagataggtaagcactggataagtattagttgtttgttgctacatggtgtcttcactctaagagatacaatttttaattgtgatggaaatgtagagggtcactggtgtttatccacatgggagctataactaagaatagatggaacaaattcatactttttctaatgggggaactccaacaatcttagctctgagaatttgcagaatacagatctaaaagagggtggaacgaataagggaggtaatacatccagaagcagaaaaaatgctgaaaaaagctaatagctgtgactgagttgccagggaccccttctgggaccaggcacacatggttgctagttgaagaatcaaacaaaacagttggaagccaacagagggtggggacagttgtgtttagtaggtcaggagtcacataccatactgcactaaaagtatatagctaatgcatactgctgcaaacctgcagtagtaaaaaatttgacttcacattcttatcaagtcttttcattgcaaaaaactttattaggcaaaagttacttttacgttttaagctgaagactagaataactgctatcactaaacagagagagtggatacataaactatttaatcattcttcttgcagttttaaaaacattttctcatctctcattctcccatcccctccaccccattcccctaacatgaattttgtgccatggttccattttacaaggaacagtactagccccctgaggacaccaggaaatggtaacctcacaccctgcattagtagaattgaaaatctgtttttctgccatttatccttacagtataactctcctctttcacattctgcaactgatctagtgcttaaaacaaatggagtcttcaaaagcaccaatagacaaggataaaattacacatacagacagagtttccatatgagaacattaatgtaaaactgggcagagggtcagtttcttagtctcttcattctctgagagagttttgtgatggatcagaatgtaattgctccctctttcccacccccagggaaaatatgtgtctgcaagagcttattatgagagagccttacagctggttccagacagcaaactgctgaaggaaaatcttgccaaattggatcgcctagaaaaacgattacaagaagttcgagaaaaggatcaaacatagcaccaccgtctgacccaacctcataggataatgtggtgcctctgaaaggggagtgatggaagccttgctttcacatcagcaggggcacaactaatgagattttctctcattccgagttcagggtgacacattttgggacatctgctggtagcccagtgctgaaggacttgcttttccatgaagaagacgaaaacagcaaacaagggcaagaaggtctgagagggaaggagaatgacatttacacattttacagatttttgtttggtttaactccagatttctcttgatatatctctgtgcttttgagacctggagatctaattctgtttagacattttttgtcccagaaatacagaagcttgaaatgctatgaaggcagagcttctattctttatgggatgaaatatttcaaaagaggataaatcctctgtggtaagccatttggaaaatcctaccaagaattggcttatttaattttccagaaccaggaatgagtatctaatagcttttgtagaaccttccagaatatgtggggaaaaagggctattgctaagtgagctttatctaatatcctcctaagagttttactagtgcttttttgaggaattacagggaagctcctggaattgtacatggatatctttatccctagggggaaatcaaggagctgggcacccctaattctttatggaagtgtttaaaactattttaattttattacaagtattactagagtagtggttctactctaagatttcaaaagtgcatttaaaatcatacatgttcccgcctgcaaatatattgttattttggtggagaaaaaaatagtatattctacataaaaaattaaagatattaactaagagaaatgtcctactttattatcttaatgttcagacatcatgagatttattatttttttgaaaaatatattgaaccattgaggaacctttatgatgtatcacagaaatcttcatagattctaactagatggaaaaagagctctatttatttgtgttcctaggcttaatgagaattctgggcttagaacatcaacgattaatacccagaattctttgttttgagaatattatggagaatgctctaaaaatctagggtaaagatctaaattcaaattttaaatatatatttatatttaagaaataggaaaggcaaagttgaactcacaatttgacatttatttttagtgttatttatttcataacttataaaatatttaatatatacatacacactcttcttttttctctgtacaaagtggttttaatatcagctttcaaaactgatcttataaaatgtaaatctaaattgtaaaatagttaagttttaacagtccctcccaaactttgtgttgattattcacttgctaaagagatgtgaggaatcagccttcagttttttggcagtagtatattttggaagtgaagaaattggaacacctgtttctaatttggtcttcatcattagagacaaaaccaaaacactccaggcagtactgtttatagtgctgagccaggtagcacacagacatagtagcctaaaggctcacataattcgcatgctcaggccagggcagggtaaaaatagccttctgcttctttcaacccagtatcaggaagcactaccccagtgttattatttgttttgtcaaggtaagtctaaataaacaagaaaaacttcttcggaaggcatggcgaagggagtattttaaatgaaaatgattacagaatttgaattagcatgcatctctttgtgtgcaacagtaatccaagaatgtatatgttaccactacaaccatttgtttctaatagttttttcatgttatataacataaatgtatccacaaccttaattaagaactattcttcccccaaaatcatagtcctagtgtcaagaaacatactccagtgtttattgtaaaataacaaccacaccctcaaattgaaaaaagtgaatgtctaggactttattacaacttttcagaataatctgtaatgaaaactcatgcttaaaaatttaatggaaaagactgagccccaaattttgaatagtgattacgccttacttgaagtgctaataaaggtaggagagtacatttgttggaataacagaaatggtgatttcagcctaaaagtttctgagggtaaaggatcacatgaccttcaggaaactctctgcctcctgtaggtgctttcctatctcccccatccttccctaccccttttcccttttccttcctctctttttctctcactgtcactctgtctacacacactggcatcttttgaacactaaaagtaagcactgttttttaaaaaagtaattatttgttggatcagatacttttatcccaagtgaataccttcactgagatgtggccaatgcaatagtttcacagtaaaaacagtgcctataagaaaatagatcacatactatttttcaatgatattaagtgtattttgtaactattttcatttggtccttgtaacatgaaataatacatggaacttacctttataataaaaatggagtgccctggttcatcatagaggtgcatctagtttgcccttaatggaagtatacttgctgtgtggattgatagcaccttcttgaaatggaggagctcagctggcctcatggatgtgcaatttttgcagtcccacagggccttgcatacagaagcaccccgagctcagttgaatgtctgtttgattttttcttatttatttttttgagacacagttccactttgtctttttgtcacccaggatggagttcagtggcacaaacatggctcactgtagcctcgacctccctggctgaagggatcctcccacctcagcctcccaagtaaccgagactacaggcatgtgccagcatgtccagctaatttttgtattttttgtagagacagggtttcaccatgttgcccaggctggtctcaaactcctgggctcaagcgatctgcccacctctgcctcccaaagtgctgggattaaaggcataagccaccatgtccaactgaaattcttaataattaataatttttgagcaagaggtccacactttcattttgcactgggttcccaaacaggtcctgggtaggaaggatggctgaggataaaacaggagttgctttggcctggctgaacakttgaaccaatgatcagagtttcattttatgattgtgttactctgaacagatttgctatttttttccagctacatttagagttcctcatgtatatatcacccctctttttccagtccatctaacctctccttttttttgtgcctagaatcagttctccttgccttcaaaatccctgataagtgtccatttctttttgtatcctttgatgtagaagccacaagaatggctttagcagcttattttaatcttatgaattattcattcaggattttttaaatgattcagatgctttcartctgttaacagtatttataaaacatgtttcagtgatacaacataggtgaactaaaccaaagatgcaaatgccttggaggaaaagaaattgtattatagagaatcctgagatatatccttttgggttgtttaatttaaagcctatcacaaaacaaagagaattgtcgcactttaattccaacctcctgcagtacttcacaacccttagcataagattctgaaatttgtaataggtggtacctagtttgatgcagggttttgcagcagttgtgcgaatgcctctgcgcaacggcctttcagtcagactaaatgagaaaatccaaactgtcctatcaaaactgacccacaataactgtactctgaggcgaaacagagcaaatgtgggtttcctgttttcattgtaaaacattccaggttctcagattgaagagctacattcagctgatagttgacatctgttccctcacacgtagtggctctcaacacgggctgcactttggaatcacctgaggacctttcggaatcttcggttgaatcatcctggctgtcctggtgatgcttcttatgtgcagctaggctggagaaccacyacagggctgacacctggaatgggagcttgtaacttttacaaaataatagatgtttatcatcttttgcaatttttacttttaartctatactaaaatgagccaaaraagtcttaacaatgatgtatggcacaattggttggttgaggctatcattccatgattacaaataggtggttatgtggggtggttttgcacttgtggcaattggactgcaatttggccttaaaatgacacaattcctcgytctcagatggagaggaattgccttgaaatttgcatgtaccagactaagtgccagtatatatatgactgatattttcgtgactcatagaaggtgtccatggtatagagtttatgcctacatctctatctttattttgggcacacatgagcttttgttaattatttctttgtacttgttagaatctgtttttgaaaaaaaaaaaaaaacttttgctttgatttgtggtggattcaccttcttaaaataataaatttagaggatattaggaatgacattcaaaacaaatatagtgagaggtgattttttaaaaatttttgttcctggtttccaaattatgtttactttgatttgattatatgttggtatctcccaaatataggttaacttagctatttaaatggtatcttttgacatttaaaaagaattaagtacctgtcaaatctwgcattgaggttgcagttgaataagataaaagcttaggatgtcaaaaaataatatagagaaatattataagattttatgattattcttgamgtttttgatgcaaaaggaaaatatgctgaatagttcttccaaaaaatattatttccctcaatattttatttgtagccatgtaatttaaagagaacagaaaataactgcaatcaaaagtatggtttaatatcaatcaaagtggcacaacagaattgataagatctttataacaatcaattggctgatattaaaatattgattttaattgatcttttcaattaaaatctttagggcctgtaactcataaaatcagcatccaccacaatatatggtcattattggtttgtaagcatagatcaccattgactcctacctggagagacatgtctatttctaaaaatccagtagtttctttgcattctcagtagtacacgttgtatatatatatatgtaacaaatttggtagttttcagtatgtgtgatgtcctttgggggttrtttatcttgctggtccataggaggggtacactaccccaagaatcaagacatctgagttctagttctagttctagctctgccactgaagagccaccttacctggggcaagttagccattgtctcccagtcatgtttaccacccatgaaaggactcgtcggtttgatgtttccattaagctcaatgagtaactctaatagttactcttgaatctggattgaaaaacaccatgcatctgatgagataattcataaatgttgccccttttttaaatgatacaaccctaaaagtgactgaattgcccaagtgcttgaacatggcagaggtagttactcytattttgcagtttgtgcacttaaaaattcctacagtgattgttactttactggggaaaaaagatgaggtgaaacttcctcccaaggaattaaaatatctgtagaagccatggcttgcttttataatgtggaaatcatttgatttgctgtaattcacgcagatccctccttttgtcagggggaaatgatttgcatcatgttcttttttcataatgcttttacttcctgtttggatcagttgtatgtaaatgtacatttttgttactttggctgtgcccgttagaatttatsttccataaagtatttctcccattgagtctaatgatgtatactttgcctaggtctttccaaaattaaatttatgtaaatgtctattttatataaaatatgattaaaataagtatgtctggtttcaatctctcaagtacttcatggttagtacctactgatgtccatgtcaccaggagtgtctgttttaacaatgttttaaaaaggaccatcttccttccttcattctttcatttactcatttcattgcattattctgtgtgcttcctgtctgctctctttcccttcctccgcacagtgccaattcagtactcacccactccagatccgctcccctatcatgcttagatgctgtcacctctctcttcacagagtaaataaaaggtagaaagcagctgtcccccaatgccctgcacttcatctatacatttacctgcacctaattctatcctttcttttctcctgttatcgtaatggaagaagaggaccctaggttctgcattttgcctcttatggaacttcattccatgccttaacttctccttcatctttttacttcttccttttgctggctcttgtcaatttgtcagttctactcttcttaaagcacatacacaggcaatcaacaccgaaacaatttgaaaaaaaaaatcctctgtttcattttatctgtagctgctatcacatctccgtctgcccttcacagccaagcttttcgaatagcagatcacagttgtcctatactagtgaagatgtccaaattaaagacagatttgctgtacatcacaagtcaccactgtctgggggtagtccagtccactcctctccttggtatcctttccttttctgaagttattttaaacataaaaagaggattcttccatttggatgttttaatataactacaaactcaatttatattgaaaccattacttttttagaaaatttgagtctaaaactaaaactaatggcctggctttttttgtttgtttgtttgtttttgagatggagtctcactctgtcacccaggctggagtgcagtggtacgatattggctcactgcaacctccgccttctagttcaagcgattctcatgcctcagcctcccgagtagctgggattacaggcatgtgccaccacacccggctattttttttatttctagtagagatggggtttcaccatgttggccgccaggctggtctcgaactcttgacctcaggtgatccgcctgcctcaccctcccaaagtgctgggattacaggcgtgagccactgcgcctggcctatggcctggctattaatggtgtgtaattcttattgaatggctctttttccacttaatggaaaggcattattatgtgaggcctgtaagggactaaacctttgtatataagaatagggtctcagttgaagctgtgggttttgaactctggaaacaaagggagttgttctgtaacaggaaatgagacagtgccccaccgcatggagattcccaggtttgaaacaaagaaaccacagagtatgctgcaaagctgtgtgccatgggcagaagagtgaaaggggacagcacctgtgagcctcacggaagggctggccatggtttgaccagcaacttgaatattgctggcctgaccgttcttgcacagcacatgttcaccttctagtccttacccttttgtttagtaaaggctttttggtgggtttcatcttacctcttgctaaaaagaaagagggctttgggtccatgtgggggctctgagcttttattggagaacggtgtggccctggagctggcatggtggttcaaatggtcacccctgtgtgatgactacagggaggaaagtggtgagggccactgttcaggtagccacacatctggacattccctggacagtactgaagcctggaggttcaatgttttattttcacagaagagctgcttaccttaagagcatgctggacaccccctatcccctagacacccaggcatgaaactaaggagtcatctactcaaactgtcatccgaggtgtctttccttgaaataaatactcaaaagaaaatagtgctactctcaagaacagcacagtcccataaaactattggtgatgacagaatgttctgtatttgtgctgttcaatatggtagccactagccacagagggtaaatggacaccttttgaagatgccacagcgacaggcatcattcactttttttagtcttttcttcaaatggtgtccatttaccctctgctctctcctgcagtcacagaggtcattgtccccagtagattgtcacctgcttgtacctgtgcctgcattctctccaccttgactgccttctgttttcccatctacctgctcatctcccacctgcccccattagtttatgtaccctcctacctcaagaagcttttatttctattttacatgaaagtaaaatagagcacttgaacgtaaaatcctccaactggtgctgaaggactggtggccaggttatttgatatatatggaatgtccacttagccttgccttaattttctgacaaaatataagaccattacaaattctggctttgtcttctaacttcagcttaacttattacaaaataatattcatgggaaaaaaagtgatatctcaccactagattaattttaatcatcttaaatgatggatcctacagttttggggccattctgctgaaatggaggacagtactgccacccagaaaatgatgtcagctcaagcctgatctttcctattcactctttgaaaactctagagggtcaagggcaacaagcttcttagaaggggcagtattgtactaagcttcctgaccctccgcctttcagaagtcctgcctgtgtttcgtgtgggggaccagcttcattgcccctgagcttggaccgcactccccagtctgggaattcgcagggctaagcgttccaggccactgattggcttgctgtggatctgctagcaggaacctctgcacacgtgtgagcaccactgtcaccccttgggccacctcgtgccagtctctaaggctgggtggcggggcactgtgacaccaggggtgaccagagagcggcggcagctcacaatgatcaaatgatcgtgaagagggacacctgcgaaccaaggcgccacggcaggtgctgcccataggcaccgcaggagggaataaagggcgagacccccgccttcaccacagttttctcagcctgcagggagggaggacgtgcgaggccggtgcgtggaggctatgggcctgctggccagtgctggtttgttgctgttgctggtcatcggccaccccagaagcctaggtgagcctagggacctgggcaccaggactgcggaggaggctgagcgtgctggagagggaagacttcattactccttgcctcaggaagtcggggtggtatagccacacctgaggcatttgggaagaaagggtgagggggtggtgcatgctcagatgtccccaaaggaaggtctgggccagactgcctttttgaaattttttgcattttagagttcgtttgtaggcacacctgctaatcatgtgtgtactaaggagcctcctccaaggaaacctaaccaagtagaagtaacttaaagacaaatatctcccttccggagtagtataggtcattcctcagtatcttttgttttgtttgtttgtttgagacagggtctggctctgtcacccaggctggactgcagtgatgcgatcacggctccctcaaactccagggctaatgtgatcctcctgcctctgcctcctgagtagctgggaccataggcacgtaccaccacacttggctaatttttacatttttttgtagagatggggtcttgtcatgttgcccatggttctgacctcctgggttcaagtgatcagcctacctgggcctcccaaagtgctgggattacaggcgggaaccactgcatgtggctcctggtatctttaacacaacctaaatttgcatcttcccagagtaagccccaagtcacctaccagaggcagcgctggctccttcctgcccagtggtaacacaggctgaaagggagcagacaggaggcaaattccggtcaacccaggtgactgtgggatattctgaagaaaatattgagagaagaatgtggtagtctgcagctaagtgctatcagaatgtctgtgccaggccaggaaaatccaaatgggaaatcttggtaaagtgaactcttacataaggctctgtgtgtgcacacacacatgctcttctacacaggactgaagtgtggaattcgcatggtcaacatgaaaagtaaggaacctgccgtgggatctagattcttctctagaattagtagttggagaaattcaacagtgactggacatccatggcaggtcagtgcaacaaaggcattgatttcttaatgagaaaacagtgaaatatttcctttgtttcgaaagcaagaatgcacgttgatatgtagtttttctcctgaacccctctagctctctaccaaaaagtttacttcgtaggaactatcttactatccaatttatgtcggtattttaagaatattatgtcagattagaaaagttgatctccagtgtttccgatggagatacatatgtggggagacatattagctgcatttgtaactttcttcttgggtaggtctccctaaaatcagatgagcaccacttctgtggaggaagcttgattcaagaagatcgggttgttacagcagcacactgcctggacagcctcagtgagtaagttgtggatttccattacttgtcaggccttgattcctggctatgcgactggcagatttgttgctctaaatagcaggttcattctcagtccctttcttacttttgcctcccagtgtacccacccactgatcttcctgattcccagaaatgtgtgtctgtcccaagattcccagtgcttcctgttctactgaattaaacaatcccagacatcatctataatttatggatttagtgcttgggtagaggtggtggttacttactgtaataaagcattaacaagaaatgttaaatggatgctccaaagttttaatcatctgggtttaaatcattaggagggaaaaaactgcagaaattacaaatatttgaccagattaaaagagggtactaataagagaaaagaaggaacagttctagaaaaaaacttctgtatcctgttacaaatggcattgcatgtgtgaactatggtttgtatatcaaagaagaaaaggatgcaatatttaaatacttgactcagaaaaatggaaacatgactgaaaactacgattttttctagattaaaaaaaatatgaccattggtaatactcaataataaggaaaaccttcttcaaagactcagggatgcttaaagatacattaatcacttttcatttaattacatcaaaccaagaagacttgcgtaggggaaacaactacttatgaaacatttttctttggttttaggaagcagctgaagaatataactgtgacttctggggagtacagcctctttcagaaggataagcaagaacagaatattcctgtctcaaaaattattacccatcctgaatacaacagccgtgaatatatgagtcctgatattgcactgctgtatctaaaacacaaagtcaagtttggtgagtatggagagttagaatattaaaaatgcagtggaggaaaactgctaattatgtacaagttaactttaatgtctgtgtggctgtctagtaatagaatagctaagctttgtttctttttaaaataattttgttcggtctataacctattgagaaaatactgtataggctacatgtcccagccacaaattatttatgcttaacctaacaatcaacattttttccctttcatttatttccattgatacatattagaagtacatattttcagggtacatgtgataatttgatacattcatataatcaaatcagggtaattaggatatctattaccttaaatatttatctttttgtatatgctaggaacacttgaattatttctctgatctatcaaacatcaggtcttacctcttctaagtgtatatttgtatccgttaatcaaccccacttcatcctccc

SEQ ID NO: 6954 - DNA, 14526 bp, Homo sapiens
aggctggagtgcaatggcgcgatcttggctcaccgcaacctccgccttccaggttcaagcaattctcctgcctcagcctcccgagtagctgggattacaggcatgcaccaccatgcccggctaattttgtatttttatagtagagacggggtttctccatgttgaggctggtcatgaactcctgacctcaggtgatcctcccgcctcggcctcccaaattgctgggattacaggcgtgagccaccgcgcctggccaaattgtgcagacttttgatctttaagacagaaaagctagggaatggttgtttgcattgtaaaaggaatctttgctttgtaaaagggcgtaggcagaggctagtttagctgtaacccaaacaacccaaggaaggctcagggcactcaagcctatccgttagttacattgcagggtgttttcaacactgcttatgtatagagtgttgtccagatacacttttggctgtgtgaagcttacacttacatataatacattctgcttgtaagagtttcctcttcctgaaaatgagagattgaaaatacatcactcttgtgactatggtctgtattattaaaaaaaaaaaaaaaaggtcgttgagatcaagcaagctagacgtggagaaatacagttcctgctgactgcctctctctttcttctctttgtcagagttaaaaccttccaattggccatgcgcggtggctcatgcctgtaatcccaacacgttggtaggccacaacgggtggattgcttgagctcgagtttgagaccagcctggacaacatggtgaaacctgtctctattaaaaatacaaaaattagccgggcatggtggcaagcgcctgtagtctcagctacttgggaggctgacgtagaatcgcttgaactcaggaggcagaggttacagtgagccgagatcgtgccattgcactccagcctgggcaacagagcaagaccctgtctcaaaaaaaaaaaaaaaagtcctaatattctgtagtgctagaaatagatttgatggtggccctgccctgtcggaacttaagactctaatattcatgtccggcatgcacctgtaatcccagctactggggaggctaaggcaggagaatcacttgaactcaggtggcagaagctgcagtgagcagagatcgtgccactgcactctagcctgggcaacagaacgaaactcggtctcaagaaaaaaaaaaagattctaaggccaggcacggtggcttcacggctgtaatcccagcacttttggaggctgaggcagttagatcacctgaggtcaagagtttgagaccagcctggccaatatggagaaaccgtctctctactacaaatacgaaaattagccaggtgtggtggtgggcgcctgtaatcccagctactcgggaggctgacacaggagaatcacttgagcctggaaggtgctgggactataagcacgtatcatcacgctgggctaatttttttttttttttgagacagagtcttgctgtgttgcccaggctggagtgcagtggcgcaatctcagctcactgcaacttccgcctcccaggttcaagcgattcccttgcctcagcctccctagtaactgggattacaggcgcgcgccaccactccccaataatttttgtatttttagtagagacggggtttcaccattttggtcaggctggtctcaaactcctgacctcgtgatctgcctgccttggccttccaaagtgctgggattaaaggaatgagccaccatgcccagctaaaatttaatttttttttttttttttgagacggagtctcgctctgtcgcccaggccggactgcggactgcagtggcgcaatctccgctcactgcaagctccgcttcccgggttcacgccattctcctgcctcagcctcccgagtagctgggactacaggcgccccccactacgcccagctaattttttgtgtgtttttagtagagatggggtttcactgtgttagccaggatgatcttgatctcctgaccttgtgatccgcccgcctcagcctcccaaagtgctgggattacaggcatgagccaccgcacccggcctaaaatttcattttttaacgcatatttatctcaattgttttttgcattttccccatgtggctcatgagcacattattctaagcgtaagtggtagataacctgattcaggtattttgaagaggaaattttgatagcaaaaacaattttttttttttgagacggcgtctcgctctgtctcccaggctggagtgcaatggcgtgatctcggctcactgcaacctccgcctcccgggttcaagcgattctcctgcctcagcctctcgagtagctgggactacaggtgcccgccaccacgcccagctaatttttaatagagacggggtttcaccatgttggccagaatggtctcgatttcttgaccttgtgatccacccgcctcggcctcccaaagtgctgggattacaggcgtgagccaccgcgcccggccagcaaaaacaatttttaaggaaattttgaagtgagaagtcaggcaaagaggccccaaagatcaaattgcaggccaggcctgcacaactgagaaatgagaaagtaccactttcccattttcaaacattataacaaacatttctctatctgattctgaaaaccctgtaagaaagacaaggcagatggttttattcccatttcaagagattgatgatttacccaaggtatatagtttgcaggtacacgtggctgataaatgttggaaactggctttcccaactcttcttttccttgcctgaagctctgtcctggacttaggaatcccagtggtgatttggagtggacaagacttgagtcttgaaggacaggactgcagggagggctggtcctgaggaggaagcatcttcagatacctaggtcttgggatcttgggtggggaataggctgcttggggaagggctgaattggaaggaggagctagaggtctgactgagggaatggagagggggcctcaaaaggaagccaggcaggctgccttcttcccagctccagaatggcaccccctctaaagtcacactcacctacgtacatcctggagtgaaactccttctcctttctgcttccaccattactctaatcctcaaagggttaaccagctttcacacgattttcccatctcccaggtaacttgggcagctgctccgtgctggaaataactaaagacccagtttctcagttcgtgcacttagcaatgcaccccagtagcccctccaacccccagcagagaagcacagccctttgggtaaaagatgcctgggggtgaggctgcaagttggcaggtgcgggggaggggctcccagagagtagggcggggggttgtgggggcggcagggagagtgccccttccctgggtccctccactgggccccgaggttcgcctcggggccgctgccccagagactggggggaagaggaaagaagtggtgtgcgggcaagcaggccgcacacacctggcgccttgtggaatgagagcttaattaattattaaactgagttcccgcgggagggcgcagggccgtgacaggcagggcgggaatggctaggtgggggctggggtggggcaggggcagggaggaattggggatgaagagtgggcgcggggcgccggcccaacccctgggaccctgacaggaaggaaggcgaccctcggtgggcggggcgggggatgtagccgtgaggggtgggtttgcgggcgcgctcggggacccccggggtgagggcgggagaggaatgccggaggaggcggccggggtgaagggaaggggaccgggctgcgaggtcccctccccgcggggtcttgatcccagaacagtagctgcttgtcttcccaggactgggggaggaagcggccggaggagaggagggggcgcgcggagggaggggtcccattatttggcctcctccgcccctaccccgctgctaggaaggggagtgggcaactcggcccccacttctggggagggggagggggatgcccagacaaaaggagcttgtgcctttaaggcggggagtccgggagccagcggggaggggacttctggatccggggtagagggcggctgcgctggacagctcgggagggggcgagggccgggcggacggcggacggcggacggcgggcgggacggccaggacgcgcgggctcggaggaccgcgggacggccggccggccggccggagcccgcgggggcggcggggcgggggcccagggcaggcgcggagccgggccggcaggtgagcgcgctgagggctaggggaagtggccgctcgggctcccggtgcgccaggattggaacgcacccgagcggctctcgacaagagtttgtgggtgggggcgccgaagccttggacgggtcgtctcggcagtgttgcccgagggagttggggttggcaaagggaagtcatggaggcagtgggatcgaggactcctaggtccggcgctcgccacccccgtcgcccgccgcctgcctccctccacggggcgagttccaggctggcccggaggccaggaggatctggcacgtactgggggaggggctggcctgagttttttgctgcggggctgtggggtgtctccgagtttgggggagattccatttaggggagaggaaccggcctgggcagagggagggatgccctctgtctgcgggagtccctctccttcccctcacccaaaaccttgggaatgaaaggggtggggtcggctccccacatcccccaaggcctgccgcagggtgggcaggggagctgactttattcaaagcagactctggggctcgactgaaaggctagaggtggaatcaggcgtgggagcctctttgcccatatcctctccttaccagattacccctgtgagctggagggacctggtgggggttgcatagtaaagggtgatgtgggagccctctgtaatctttagggagagtgaggactggggatgggagaaggcggcagcgggcactggaccgacagatacaggccctgggtaggctcctctacatctggaaaggcccagaattgaagaattgaggcccatgtccgagtatggtgggtggtgctggcactgctgggccccgcctgggcagtgcctcttaccatgaactttctgaagtcgtttttaatcccctggagcctccttttgccaaggagggcaggggcagatgggccctggggatgggatagacaggaggtggccaggaaggcttggcaaggcagtgggcagagccatccttagggctgggccttggccttggctggttccaaactctggtctcagcctgatcagggtttgggagggacttgaggtctgggaggcactgagcctgggcctgccaggctgaatgggacatggctgtggctgtgggagccggtggtatgaagaacagcagatctgtgagagtgcaaatggaccaacactcaggggaggagaaggtagaggcacaaggcttaggagcctgactctggggaggagggaggtggtctgtgctcccagggctcatagtgatgggttgctggacaaagtgggttgggggaccatatagagaaattttgtggcttggaacagtgctctaccctgtttcctgccataccagtctggcatggggtgccagaaatgttgggaggccggcaagttctgcgggatgggcagtgcctggagtggagcccagggtgggatggttgcagttggttggacaattacatagctctgaagctatccccttggggggggtcagagtgttcctgggagggtcatgcattctcctggatagcatttgcccctttctctgtgagtatgagccagatgctaggatgtgtttccagggggcttggaacatggccagaaactagtcctttgggaacaggtccgggccagtgctggtgggggtggtgtgtggggggagataagaacagggaaggggactggtgaatggaggaggctgaagcaaaatgttgtgggtggtggatggtggtgggaaacctgctcactstgggctctgtctccagcagctctggggactgacagccaaggacacagggactgatagaaccaggcatctgactggctagaaagacgtgtgttcttgctcatgatttyctcatctttccatctcttgacgatgacagaggtttgggtttaaartgttgtagagtgaggagaagaactaatatttttcaagtgtgtacttcttgacaggcattattagattctttcctgaggaccattatcatttccattttgcagatgaaggtactgacacagagaggttaaataacttgcccaaggcagtgyggctagcaaataatcacgctaaggtttggaaccctggtctcatgccaaagatcatgcttctaatgaagtattttgaagagcaaggctttctttggtgaccttttccaaatgccagcctgaccaaaagtcttgtattcctgatctgtccttccagatggtgctgttggtgatgttaagaggttgaaggggccaggcatggtggctcatgcctatactcccagcactttgggaggccgagacaggcagatcacctgaggttaggagttcgagaccagcctggccaacatggttaaaccctgtctgtactaaaaatacaaaatttagccgggtgtggtggtaggtgcttgtaatctcagctatggggaagccgaggcagaattgcttgaacccaggaggcagaggttgcagtgagctgagattgtgccactgcactccagcctaggtggggcagagtgagactccgtcttaaaccaaaaaacaaaaggaggttgaaggacgtgctgctctgtgggatataggagaaggggtgcygacagawcttggctgagggtgactcagggatgggaggtttggggtatgcagagaattccccagcctgccttctgcgtgtgggtccctgggtgtctgcttcaagcgctgcccatctggcttgagctctcattctatggccacctggggcaagtgctgagtattcctccatcctgtccccgagtgagtacaaatgtcagtgctgstagctcagcaggtttaattacaagggacccctcagggtactctgtgagcatagaggagtgtggccctggtggggacacaggcatgcatggatgacagtgctgtcagcctcatcttattctgacctgggctcagccaggagtcacattaaaggtatcatcatggagtcctcccacctcagttcatgacatttcctccaggaaatgtgggatctgggactgatttggttaccatgatctctataacttgggccagccatataaaactgccatggacctcagtttttgtttatatatatttttcctttcaaatttgtcttgtgccccagggggcaacaggaccagtttctcagggttttggtgaagatcagatggaattagggatgtgaaaagatcttgaacagtttaaagcatagagaaagtgcatggagtatcattcgtccatccatccagtcatccatctactcaatgaacatttattattattattttattttttgagatggagtttcgctcttattgcccaagctggagcgcaatggtgtgatctcagctcactgcaacctctgcctcctggatttaagtgattctctcacctcagcctcccgaatagctgggattacaggcatgcgccaccatgcctggctaattttgtgtttttagtagaaatggggtttcaccatgttggtccggctggtctcgaactcctgacctcaggtgatccactcacctcggcttcccaaagtgcygggattacaagtgtgggccaccatacctggcctcaatgaacacttgtttaggtccttctaagsgttgtggatacagcagtgagcacagcaggtcaaaatccttgccttcataaggctgacattccagtcaggagagacagaaaatgaacacataagaaaaatatatagaatggcagttgctgattagagctatggagaaaaagcataaagctgggaaaaagatagagagctccaggaaagggggttgctattttaatagggtggtcagagggagcctcactgataaggggacatttgggatgtgacctggaggagctcttgttccagacagagggaacagcaggcactgaggtcccaggctggcctgtgcggggtgtgttgggaaacagcaaagaggttcttgtgactggggtgcagtgaggaagctgaagagccttaggattatcactgttagctggtggcagatcatgaggtcaggagatcgagaccatcctagctaacacagtgaaactccgtctctactaaaaaatagaaaaaatttccctgggcatggtggcaggcgcctgtagtcccagctatttgggaggctgaatggtgtgaacccgggaggcggagcttgcagtgagccaagatcgtgccactgcactccagcctgggtgacagagtgagactccgtctcaaaaaaaaaaaaaaaaaaaaaaaaactccagattttttcttctgcttctgttgagaaaaatcagatcgggacccactgggacccagtggcaacagtctacagctgctgggtggtgcctgccccatgcacagggtatgaactcttttcctcccagttctgaaccataagctgcttcactcattgacttgggcacttgagtttgtgaccaccaacaaacagtgccttttagggaaattttcaagtatactggctttggggtcagacaaatctggtttagaatcgtggttctctcacttatgtggctgctggatctttgggcaactctttcttcttttcttttctttgtattttattttattttattttattttatttccctcccttccctcccttccttccctctctccctccctccctccttttttccttccttccttttttttttttttttcaggctatggctattgcccaggctagagttcagtggtgcacaatcctggctcactgcagcctccaccaccagggcccaagcaatcctcctgccttagcctcctgaatggcccggtctataggtgcataccaccacaccaggctaatttttttttttttgagacggagtctcactctgtcacccaggctggagtgcaatggcgcgatctttgctcactgcaacctctgccacccgggttcaagcaattctcctgcctcagctcctgagtagctgggattacaggcgcccgccaccacgcccggctaatttttgtatttttagtagagacgaggtttcaccatcttggccaggctggtcttgaactcctgaccttgtgatctacctgccagggccttccaaagtgctgggattacggacgtgagccaccacgcctggcccaggctaattttttgaaattttaatagaggcagggtcttgctgtattgcccaggttgctctcacattcctagccttaagccatcctcctatctcggcctcacaaagtgctgggattacaggtgtaagccactgtgcctggttttgggcaagtttcttgtcctgactgtgtcttgggttctcacctgttgattggggatacccttgttgcctacctccaagtaattttatgaggatgaaactcatagcttgtcagtgggaagtgcttaggtaatgagctactagtggtggcagtggctgtgatggtggtattaataccactcctactggatggtctctaatactatctccttccttccctaccagcaacatgtcatggtttagtggcctcctggtccctaaagtggatgaacggaaaacagcctggggtgaacgcaatgggcagaagcgttcgcggcgccgtggcactcgggcaggtggcttctgcacgccccgctatatgagctgcctccgggatgcagagccacccagccccacccctgcgggcccccctcggtgcccctggcaggatgacgccttcatccggaggggcggcccaggcaagggcaaggagctggggctgcgggcagtggccctgggcttcgaggataccgaggtgacaacgacagcgggcgggacggctgaggtggcgcccgacgcggtgcccaggagtgggcgatcctgctggcgccgtctggtgcaggtgttccagtcgaagcagttccgttcggccaagctggagcgcctgtaccagcggtacttcttccagatgaaccagagcagcctgacgctgctgatggcggtgctggtgctgctcacagcggtgctgctggctttccacgccgcacccgcccgccctcagcctgcctatgtggcactgttggcctgtgccgccgccctgttcgtggggctcatggtggtgtgtaaccggcatagcttccgccaggactccatgtgggtggtgagctacgtggtgctgggcatcctggcggcagtgcaggtcgggggcgctctcgcagcagacccgcgcagcccctctgcgggcctctggtgccctgtgttctttgtctacatcgcctacacgctcctccccatccgcatgcgggctgccgtcctcagcggcctgggcctctccaccttgcatttgatcttggcctggcaacttaaccgtggtgatgccttcctctggaagcaggtaggtggccagggaggtagggatggagggcagcaggtggggaatttctcacctcataagcaggtgggggcttagtgaggaagggcgggtgagtcatgggtggaagctgggtgcagggatgtctggctgtatctgggaggaggagcaggaggtgggaggctagggttgaggggtctgcctccatgtgggatctggggtagaggacactgctgaggggagggagggccccaggacccaagcctgaactctgtcaccatgggccccagtctccggctctttagcccgctgaaatagtgcagtctgtagagacagaatgtggggctggaggcaggggtgtggtatatagccccagggccaccgtggggctgaaaaggcagtgcaggctgtgtccaggccttagcatctcagcaggcaagttgacaccagagactgaggcgctggtgctatccctgaagagcagctctaggtggtgatctggaggtatagagcaggttttggatgttgtcagcaagagaggagtcccctctttcctggaccaaggccacttctgggaggacagggaaggtgaagagctggggtcagttctctctgggctggatgtggtttgaatggggttggactgttgaagagaggagcgttaagtctgatcgtatcccaccttccccatgctgggcaccagggacctgggcgcctttccttgaggttctctgtccatgcctgttgctgcctccaggctccaagtgtgtgtgaggtgggactccacggctccgtgtggagtggctgtaggctgacctgcttatccagtgggctgtattcttttctgtgggatcttagacaactagcctcacctctcccagccttagtttcccagtctgcaaagctggaataaaaatagcatctagctcatgttgctgttggggccccaccctttcctagagtggagtagaacccgactgggcagtgttcacacctgggggcagggaggtttggggagtgctggaaggcatggtacccagtgaaggggtttctgggaagtccctttcagagagatgttagtttgtggatctgccatctcctgttacccccctgcccagggagcagaggccagggtccttcaggcgctgctgtaggcacagccccgccatcagcacagcgcctgggtcctccactggaccctaactagagagtgctgtcttgctcaaggttttgaaggcttgtggcctgttgcccaccctgcctcaggcacagagaggaagttgcctggggatcccagggtgagaagctaggttctctggcatgatgcccttctccacccagcctgtgctgcagaacagaacttacctgttttttttgtggtttttttttttttttgagacggagtcttgctctgtcgttaggctggagtggtgcagtggcgcgatctcagctcactgcaacctctgcctcccaggttcaagcgattctcctgcctcggcctcctgagtagctgggactacaggagcgcgccaccatgcccagctaatttttgtatttttagtagagacaagtttcaccatgttggccaggatggtctcgatctcttgacctcatgatccacccgccttggcctcccaaagtgctgggattacaagcgtgagccaccgcacctggccagaatgccagaatgccagaacgtacctttttaaaagtaactttatagcccgtttgtttgtggagcacgtgcccttagggcactgtcagacatcttaaagggccaggtccttctgccccaaagcttctcttccagggtggctctcaaccagggctttatggctggactgccctcctggggaaggagcttagaggtggtgtctcctttcccccttcctctctggccaggcatgggctgggtgggcatctgttccctgctctcgactggcatggtgcccagagccaggcccagtgcctgactggggaggtgcagtcccagggaggccaggactgtgcccgtctccccaggagtgtctggctacagcttcatgtagtggatctcgataggcacattcttggggcagtggcgaaattcactgctgcccctgtgccagtccttggggccagagctgcccatacaacttcctctgggctgagaaacattccctgtgcccatttgggtatgtgggtttctagacaggtggggtttgtggcctccttcctcgtctacttgggcagccccttcccagatccacccctactcacaatcacaggaaggagactttgtcccctaccgacccactcatttagacatactgaacagtgtcacccagtgacccaggcccagcttggagtctcctccggtcccctggcatccattttttctcatagtcagatagggatgtgtgtgtacagagttatttcagtctcgtcccccttccccttccctccaccgtgactcacattttcctcttgggctcctggggccaggaagggaagttgcctggtttgccccccttcccttctcccccactgggggctattcttagaaacccccaagggagatagtgtgcccctctcttcacccctgctgctgggagggggagctcagcctagttgatcctgggcctgtgagctggactgggaagggaagctaggaggcccatcccagaggctggagctggaaatggctaggggtgagccaggcctccccctcagttttacccaagaggaaactgaggtcccaaagtttaagtgacctgcccaattttgcaggactagttctagttcaagttagagcccagaacctctggcttccaggaagtgcttctgctgtttctctcccttctccttaaaccagagccctgccccatccaactctggggtggagccgcaagctccaggttaattcctgagtttccagaaacactgaggccagcttcccttagacttgctctctagccagtgccgctgatgatgattgggggctgaacattcctagggtggggccctaggcctagggcctggcagggctgagtgtcagagggagttacaccttgaggggtggccaggcatggtggaccccatctccaattaggggacatcctttgtatcagtagaactgatgactctcaagccagggctctgaggttgggcttgagagcttgactcagtagagtgagtaggaatcttggaaacctggaatgcactacaaagtatggaatgcagtagatagatagtaggattaggacacaggatttggaatctgattgtcctgggttcaagtctcacactagccactaacagctgtgtgatcttggggaagttacttggcctctctgtgcctcattcccttacctttaaaatgggatattgttacctatttcacagagttttaagaaatgtgttaggggccaggtgcggtggatcatgcctgtaatccatgcccgtaagcactttgggaagccgaggtgggcggatcacttgaggtcaggagttcaagaccagcctgaccaacatggtgaaaccccgtctctactaaaaaaatatacaaaaattagccagtcatggtggcaggtggctgtaatcccagctactctggaggctgaggcaggagaatcgcttgaactgggaggcggaggttgcagtgagccgagatcaggccactgcactccagtctgggtgacagagcaaggctctgtcaaaaaaaaaaaaaaaaaaaaaaaaaaatgtgttattcagtgtatagaagacacctacagaatcctggcatatggtaggcagccaacaaactagctaccataataataatgacaatggtgattattgttactaagttatgtcaagtcagggagaggctttagagatcttctcattcttcctctttgggttatagatgagcaaacccaa

SEQ ID NO: 6955 - DNA, 33624 bp, Homo sapiens
  misc_feature (1)...(33624): n = A,T,C or G, or insertion/deletion polymorphism (see Tables 1-2)
tcatcagagaaatgcacatcaaaactacgagatatcaactcaccccagttaaaatagcttttatccaaaatgcagtcaataatgaatgctggcgaagatatggagaaaggagaattctcatacaccgttggtaggaatgtaaattagtacagccactatggagaacaggatgaaggttccccaaaaaactaaaaataggactatcatcttaatataatccagcaatcctactgctgggtattaacccaaaagaaaacaaatcagtacatcaaagagatatctggccaggcatggtggctcatgcctgtaatcctagcactttgggaggccgaggctggtggatcacttgagggcaggagtttgagaccagcctgggcaacatggcgaaaccctgtctctactaaaaatacaaaaattggcagggcgcggtggctcacgcctgtaatcccagcactttgggaggccgaggcgggtggatcacgaggtcaagagatcgagactatcctggctaacatggtgaaacaccgtctatactaaaaatacaaaaaattagccgggcgcggtggcaggcgcctgtagtcccagctactcgctactcgggaggctgaggcaggagaatggcgtgaacccgggaggcggagcttgcagtgagctgagatcgcgccactgctctccagcctgggcgacagagcgagactccgtctcagaaaaaaaaaaaaaattagccgggtttggtggcgggtgcctgtgttcccagctcctggggaggctgaggctggatcacttgagcctgggaggttgaggctgcagtaagccgtgactgcgccattgcactccagcctgggcgacagagggagactttgtctttttttgtttgtttgtttgagacagagtctccctctatcgcccaggatggagtgcaagtggcgcgatctcggctcactgatacnnnnnnnnnnnnnnnnnnnngtcaaattccacatataagtaaactaagaaccaaaaagaataattgggcttagtagtttacaaatttggtcacctttgccaaagcagtttcaggagacaagatgaggacagaaacctgactacagcaggttcaagaataaagagataaacagtcaggaaacatactctattctttcaaacaaaccctatttaaaaaaaaaaaaagtaacttgagacaacatagacgtaatcttgtttttttgttttttgtttgagatagagtctccctctgtcacccacccaggcaggagtgaagtagtgcaaacacagctcaccgcagcctcgacctcctgggctaaagcaaccctcccgcctcagcctccggagtagctgggattacaggcacgcgccaccatacctagctaatttttgtatttttagtagagacagggtttctccatattggccaggctggtcttgaactcctgacctcgtgatccacccgcctcgacctcccaaagtgctaggattacggtcgtgagccaccgcgcccggccaagatcctgtcttaaaaaaaaaaaaatcccacaaaaaacaaaatcctgtttccatgagcagttactcctcattatctttgaacactatcctcatccccatccctaggcactttttgtcttacagatttgcctattctgaatatttcacataagtgcaatcacaaccctaggtatatttcatataaattgcccccattcctaggcagccactaatctgctttctgtctctatagatttgcctgttatgaacatttcgtaggaatacaatatgtactcttttgtgactggattatttcacttagcataatgttttcaagctttatccatattgtagtatatataattcctctttgttgccagaaatatgtcattgcatggttggatatgccacattttgcttctccatttatcagttgatagtcacttgggttgtttgtactttttttgaatattgtgaataatgcttcacaaaaattaatttacaagtttttgtggacatttgttttcaattctcttgggaatataaatccaggagttaaattgctgggtcatttggtaactctatatttaactttacgaggaaccaccaaactgttttcaaaagcggcagcaccatttacaattttaccagctgtgtatgaggattccaattccaccacatcctcaccactccttgtcattatctgcattttgattgtagctatcctattgggtataaaatgatatctcattatgattttgatttgcatttcccatgcaaatcttttcatgtgcttatgggtcatttttctatcttccttgaagacgtatctattcagattctttgctcattttaaaatttggttgtttatctttttattactgtgttatttaagtgttctttatatattccagatagaagtcccttatcagatacatgtcttgcaataatttttcccaattctgtgagttatctttctatattcttcatgatattgtttgtagcacaaaagttcttaaaattttgatgtcttattttttcctttgttgcttatgcaaaaaaagccagatgagattttaatagaaattgcattgaatctgtagatcaatttggggaatatgccattttaaccaaattaggccttccaatttatgaacatgggattctttcaatccttccaatattttccaatatttatgttcaacttctctacctcacacccagtcagagatacaatccaggtctatagtatggtggtcaaaagtacagattctttcttaagacagatttagtttaatatcccaacacttctactgattagctgtgtaaatatggacaaattacttttcttttttttttttttgagatggagtttcactctgttgcccaggctggaatgtagtcgctcaatcttggctcactgcaacctccacctcctgggttcaagcgattctcttgtctcagcctcccgagtagctggggctacaagagcacgccaccacacttggctcatttttgtatttttagtagagacggggtttcacgatattggccaggctggtctcaaactcctgaccttgtgatccacccgccttggcctcccaaagtgctgggattacaggtgtgagccaccgcgcctcccctacttaatttttctaagcctatgttttctcatctgtaacgtgcaatttttttttttttagacagggtgtctctgtcaccaagctggatggagtgcagcatcatgatctcggctcactcctgggctcaagcagtcctcctatctcagcctcctgagtagctgggaccgcaggtgcatgccaccatgcccagctaattttcgtattttttgtagagatggtgttttgtcatgttgctcaggctggtttcttgaactcctgaactcaagcaatcttcccacctcagtccccaaagtgctgggattacaggcgtgtgccaccacacgtagcctaaagtacaaattttaatacagatttcataggatgtgaggattaatgacaaatatgtgggacacttagcatagtgcctggaacacagcaaatgctcagtctgagctatttttattattatagcacttaacaattactacaaaaagttattttgactttttaaattattagagccccaatttccccctaagcatccttagaatccattgactttatatcttgtttccctacaattttctgtgtcttccttaaggataatgaaccaatctgattttttttttttttttttcagacaatgtctcgctctgtcacccaggctggagtgcagtggcgcaatctcagctcactgcaacctctgcctctcgggttcaagcgattcttgtgccttagcctcccaagtagctgggactacaggtatgtgacaccagacctggcttaattttgtatttttagtagggtttcaccatgttggccaggctggtctaaaactcctgacctcaaatgatgtgcccacctcgggctcccaaagtgctgggattacaggcatgagccaccatgcccggcctactctgatctcatctctgatcaccatgctctttcctagcctttcctcaaacggcacactcccaccccagggcctttgcatatgcttattttgctctgtctacaaatctctttccatagatataaatttggtttcttcatcaccttcttcagggtctttgtttaaatattatcttaacaatgaggctgaccatcctatataaaatagcaaaataatccctctacttatcttgctttatttttcttcttaagctttataaccacgacacattgtatatttactcgtttgtttccccttctagaatgtaagttacatgaggacagagattttcatgttttgttccctgctgtatcctatccctataacagtcctaggcacattgggtactcattaaatacatgttgaatgagtggacttcttctcttggctgggtgcggtggctcacgcctgtaatcccagcactttggaaggctgaggcgagtggatcacttgaggtcagaagtttaagacagcctggtcaacatggcgaaaccctggctttactaaaaatacaaaaattagccaggcatggtggtgtgcacctgttatcccagctgctcgggaggctgaagcaggagaatcacttgactccggaggaggaggtttcagtaagccaagattgtacgtaccactgctctccaacctgagcgacagagcaactccatctcaaaaaaaaaaaaagtgtcttctctcataggcaagtaacttcagtagtaaaacgagaagagagcagcaccaaagtagctctgctgagaggtgaagccagctggacttcctgggtggagtggggacttggtgaacttttctgtctagttagagaattgtaaatgcaccaatcagcacactgtaaaaatgcaccaatcagcactctgtgtccagctaaaggattgtaaacacaccaatcagcactctgtaaaaatgcaccaatcagcgctctgtgtctaggtaaaggattgtaaacgcaccaatcagcactctgtttccagctaaaggattgtaaacacaccaatcagcactctgtaaaaatgcaccaatcagtgctctgtgtctagctaaaggattgtaaacacaccaatcagcactctgtgtctagctaaaggattgtaaatgcaccaatcagcactgtgtctagctaaaggattgtaaacgcaccaatcagcactctgtaaaaacgcaccaatcagcactctgtgtctagctaaaggattgtaaatgcacaaatcagcactctgtcaaatggaccaatcagcactccataaaatggaccaatcagtgctctgtaaaatggaccattcagcaggatgtgggcagggacaaataagggaataaaagctggcacccccaacagcagcggcaacctactcgggtccccttccacgctgtggaagctttgttctctcgctcttcacaataaatcttgctgctgctcactctttgggttcgtgccacctttaagagctataacactcaccgaaagctccacggcttcattcttgaagtcagcaagaccaagaacccactggaaggaaccaactccggacacacttctaggagactacttccagtcaaatggaatgcgcttcctctgatcaagaaatgaatcctaccataagttcaaacatatctatacatacctatacagagtcccatccttttaaattggaagaacttcatgaaattttagagctagttctaaagtgtgcagagagagaactagagatatactaaggttaaaaggtatttgattcccacccctgcttcatcctctccccagcctcataatatatgccttctgtgtatgagggtggacttaatgactttatctttttttaattaaaaaatggatctaatactaacctactttctccaaggatacagtagttctcttggtaataagatcttagatgttcatgcttttgacaatcatggttaacttgcagctggagaacacagcagcatgcctgggaactgaactacaattcccagagtgcatctctaggaggattctgggaagtgtggcagaagcagcaatggtccctccagggaacggaagccgttgaacgtgaacatttggagtttcctcttttgtgctgattcctgaggactaggaaggtgccccgaaaagaattcagagtgagtacagtgaaacagaaacctgctcagcttctaagtgcaggaaggacttcacagggaggcatgatcagaacttgaaaaaaggtcgtggtcacagcattttaacattttagcttaatctcttcctttttgcagaaaccagggatataaccatagttttgcctcataactgtggagctacmtcagtaaccacagctcatcattttctgatacttttttggagagtcatttaaaaatggaacttgccaacctctcacattgtgccttaatttttatttttttttaaaggagggaaaattattttttagaaagcaaactataaagcaggtcagtgagaccttcaaagctgtattcccgtggttcctcagttttccatatttccctgtcccatggaggtccacagtcgtggagaaacggactctaaacacaggcgaagtatcacttggtcgcccaggctggagtgcagtgacacgatctccactcactgcaagctccgcctcctgggttcatgccattctcctgcctcatactccctagtagctgggactacaggcgcccgccaccacgcccagccacttttttttgtatttttaacagagacggggtttcaccgtgttagccaggatggtctcgatctcctgacctcgtgatccgcccacctcggcctcccaaagtgctgggattacagacgtgagccaccgcgcccggcctaaaaaaaggtctcttaaatactagggaacctggcctcttcacggtggaagtaaccactagattcaagatgggctttttttgttttgtcttgttttgttttgtttttttgttttgagacggagtctcgctctgtcgcccaggctggagtgcagtggcgcgatctcggctcactacaagatgggcttttttgtcacgctgtagtactttataatctttcttctggaaagatgaacaggataagaaacgtgtgaatcatttgtgttggggagttcaaagaaactcttaatgttaaagcaccttgcctcatcatttagtagttgggtaagactgctattacctttcatctctatcaaacattgtacttttaaaaacataaatagctctgtgaccatcagctcatgagtcagcagccatgataatctacaactggctaaggttaatttagtagcagaaactaggcaaaacatcaggcagcagttcccaaggtccaagaaactcaccaaatgaattccctttggctcatggaatatggtgaggtgttttggggaacagtggcatggaggtagcctcattaaccagttagtctcaggaactactattttattaggcttttcttttgtcttaaaaggaataagtacacatggctaatttttttttcagtacagaaaaatgaacaaaataaaaattacaggcacctttttcaatatttgtcttcatcccactcccccaaattagtcactctttaatagtttggtatgtatacttctagtcatttgaaaaatataaataaggccgggggcagtggctcttgcctgtaatcccagcactttgggagacccaggcaggcagatcacctgagaacaggagttcgagaccagcctgaccaacatggagaaaccccatctctactaaaaaaaatacaaaattagctaggcgtggtggcgtatgcctgtaatcccaactactcgagargctgaggcaggagaatcgcttgaacccgggaggtggaggttgcggtgagccgagattgcgccattgcactccagcccgggcaacaagagcgaaactccgtctcaaaaaaaaatagaaagaaaaatataattaaatacatataatttatgtatattggtatgtctgtgtccttttttttataaataattaggtcatgttaaccaactgttacctgtttttttctccagctttattaaggtataatattaaggtattaaagtataatatatactttttgacaaaaaaagtatatatttatagtttacaatgtgatgttttgatacaggtatacattgtgaaatgattaaatctagcaaattaatatattcatcacctcacattttttgtgtgtgttgagaatatttaatatctactttcttagtaatttccaagtatataatatattatgaactatagttaccatacaacacaatagatatccagaatttattcatcctaactgaaactttgtacactttgactagtatcacctccaattcctccttgctttttttgtttacttaataatgtgttctaagtctctctccctgttactatatatatatatttttttcactgttatattattttctatttgttctttttcttttttttaagacgacgttttgctcttgttgcccaggctggagtgcaatggcacgatctctgctcactgcaacctctgcctcctaggttcaagcgattctcctgcctcagcctcccaagtaggcaggattacaagcgtgtgccaccacgcccagctaattttgtatttttagtagagatggggtttctccatgttggtgaggctggtctcgaactcctgacctcgggtgatccgcccgcctcggcctcccaaagtgctgggattacaggcgtgagccaccgcacccagcccttctatttgttcttaagtcgcgtattaatccattttatcataattttcagttaacgttcttgtacatatcctttccttcctagggtaaattcctaaacatggaattgctgaggaaaaagagaggcttattatttgacactttaatagatatttccaaatcaacctgtaaaaatatcataccagtttacattctgagtggtgtatgagccagaaataatgactttaaatacattttttatagtatatcacactagttttggggttattaaagtaggaataatacttttaataatctcctagagtgctttgcaacccacatattgcatactgccttctgtgaaagctggctatatatttgttttctctctcctgctagagttccttgagggcagggattttcatcttttacatttttgtgttctttaagggaccctgaataaagtcagtactcaataaatactttgttgaatgtcatttgctaaatatattttacccatggctaggacatagattgtagccaaaactgtccaagaattcatcatcagtgattcataattatgcaaccaagaagtaggactaaattttagatgttcctcggtcatttagtgtcaaagctggctttcctcagacacagtgaaaagggtggttggttatttaactgtaatgaattcttgactttttttactgccaatgtgagaggtacttttcatggggaataaaatactgatatacaatttaaagggaccatcttggccagaatggattatttagttacagattttttttctttcccaatgagcaacaaaaaaatagaaaatatcttggatccatgtgaatttgcatagctgccttctgaaaaaatttcctaatgttgtgactttatatattcttatctacaggattccttctacttcattcttactctaagtgggtagaacaggtttcagttttctagatcatgaaagaagtactgaaatgttgagatcccatagctacttaggggtagaaatgcaatttagaaacaagatcacctgactcctattgagtttgtctttccttaatattacagagtgatcccattctggcttaaagtataaccctcttggcaattcattactttaaatttcatattatgactttttttaaaactccttttttttttttttaaggacctgacaatgtccctgtattgtggaatagcttgcaggagaaaatttttttggtgctataggctgctgtcaacctatgttactaagacacggtgagttttagccaacctgagctttgattattctgtttggcccattaaactattgtgatattatgattttatatatatatttaggtttatgattattatatatacattatatattactatatttgtgtgtgtgtatatgtgtgtgtgtgtatatatatatattcatatatatatatattcatccatggtttctggctcataactcctatggcccttattacagtcttttgytataatgtggggcactttagacctcaggggcaggcctcaggaaacaaaatctcttttaccttctcctgtcctccttttacctgcccatggcaggactctaatctgattgcgggtccaaagaccctcattccagagagggttgtgccccatactccggaggaaggaaggctgcacagagaggccaaggagaacctgaacagacaggcattgctgggtttccggtcagtctattattatkaaatcataaccattttgtccaatcagatttctacatggttgtcaatcatgcctatgtaatgaagccaccataaaaacccaaaaggacagggttcagagagcctctggatagctgaacacatggaagttcctggagggtggtgcacccagggagtcatggaagctctgcaccctccccccacatacctgacctaaatgcatctcttcatttgtatccttcgtaatatcctatataataaaccagtaaacatcaaaaaatatatatttttacttttttagagatggagtctcactctgtcactcaggctgaagtgcagtggtacaatcttggctcactgaagccttgatctcctggggtcaagcgatcctcccacctcaaacccccaagtagctgggactacaggcatatgccaccatgcctggctaayttttatatttttgtgtagagacagggttttgccatgttgtccatgctggtctgaactgagctctggcaatccacctgccttgacctcccaaagtgttgggattacaggcgyaagtcaccaaacctggccgaaaaattttaaacaaactaaatatccaataatatctaaaatatctcacacacttgaatataagttctattaagatcagactttgtctttccactgtggtacccctacttcataaaacagtgcctggcacatggtaggcactaaagtactgttgaatgaatgaacagtaagggagaaattaagtaaattaaggtactataatagaataataaacatgttaaaattatattgttctattcctgtcacttcagatgaaaaaaactgtattgaataatatttcatgaagtttcctataaataaagtagataaccccacccccttcccccaagaactaaacttcagtgaaaggtagagtaggaaaacaaaatctacaatagcacatgaagatgataaagacttttttgtcttagcctagggaaattagaaatctgtgaatttgaaatcactagcctgctttcatacagttttgggggttaaatttataccatctatgtggtgtggttctagaacccttaacctaagaaataatttttttttcttttttttctttttgagacaggatcttgctctgtcacacaggctggagtgcagtgctatgatcatagctcactgcagcctcaacctcccaggctgaatcaattctcccaccaagtagctaggatcacatgcgtagctacttgtacaccaccatgcctggctaatttttttttattgtttgtaaggtagggtcttgctatgttgcccaggctggtctcaaactcctgggctcaagcaatcctcctgcctttacctcccaaagtgctgggattataggcatgagccaccatgcccagcctaagaaatgaatttaagtagtaatcttggactgaaaatacccctggggcaccatgtgaatacaaatataaaactccttaggaagtacacactcacaaccagtgattccaatatataaagccctatcaagctccaaaatttagaggcatataaaggctgggtgcagtggctcatgcctgtaatcccagcactttgggaagccaaggcgggcagatcactcgaggtcaggagttcgagaccagcttggccggcatggtgaagccgtctctactaaaaatacaaaaattagccaggaatggtggcgtgcacctgtagtcacagctactcaggaggctgaggtgggagagtcgcttgaacctgggaggtggaagttgcaataagccgagatcgtgtcattgcactctagcctgcatgatagagtgagaccctgtctcaaagaaaaaaaattagaagcacataagcatataatcctacatgaacaagagtgaacaaacaacaaaattgtgatacttgtttcagatattgttggacatttagattgcgtgtactcctttaacagactacaagaatttttttttttttttttttttttttttttgagatggagtcttgctctgttgccaggctggactgcagtggtgtgatctcagctcactgcaacctccacctcatgggttcaagtgattctcctgcctcagcctcctgagtagctgggactaaggcacacgccaccacgcccagctaatttttgtatttttagttgatatggggtttcaccatgttggccaggatggtctggatctcttgaccttgtgatccacccacctcgacctcccaaagtgctgggattacaggagtacgccaccacgcctggccaagaatattaacataattattaaatagagtgtcttcaccacggggcggaaggatccgcgctggagannnnnnnnnnnnnnnnnnnnnnnnnnnnnnnnnnnnnnnnnnnnnnnnnnnnnnnnnnnnnnnnnnnnnnnnnnnnnnnnnnnnnnnnnnnnnnnnnnnnnnnnnnnnnnnnnnnnnnnnnnnnnnnnnnnnnnnnnnnnnnnnnnnnnnnnnnnnnnnnnnnnnnnnnnnnnnnnnnnnnnnnnnnnnnnnnnnnnnnnnnnnnnnnnnnnnnnnnnnnnnnnnnnnnnnnnnnnnnnnnnnnnnnnnnnnnnnnnnnnnnnnnnnnnnnnnnnnnnnnnnnnnnnnnnnnnnnnnnnnnnnnnnnnnnnnnnnnnnnnnnnnnnnnnnnnnnnnnnnnnnnnnnnnnnnnnnnnnnnnnnnnnnnnnnnnnnnnnnnnnnnnnnnnnnnnnnnnnnnnnnnnnnnnnnnnnnnnnnnnnnnnnnnnnnnnnnnnnnnnnnnnnnnnnnnnnnnnnnnnnnnnnnnnnnnnnnnnnnnnnnnnnnnnnnnnnnnnnnnnnnnnnnnnnnnnnnnnnnnnnnnnnnnnnnnnnnnnnnnnnnnnnnnnnnnnnnnnnnnnnnnnnnnnnnnnnnnnnnnnnnnnnnnnnnnnnnnnnnnnnnnnnnnnnnnnnnnnnnnnnnnnnnnnnnnnnnnnnnnnnnnnnnnnnnnnnnnnnnnnnnnnnnnnnnnnnnnnnnnnnnnnnnnnnnnnnnnnnnnnnnnnnnnnnnnnnnnnnnnnnnnnnnnnnnnnnnnnnnnnnnnnnnnnnnnnnnnnnnnnnnnnnnnnnnnnnnnnnnnnnnnnnnnnnnnnnnnnnnnnnnnnnnnnnnnnnnnnnnnnnnnnnnnnnnnnnnnnnnnnnnnnnnnnnnnnnnnnnnnnnnnnnnnnnnnnnnnnnnnnnnnnnnnnnnnnnnnnnnnnnnnnnnnnnnnnnnnnnnnnnnnnnnnnnnnnnnnnnnnnnnnnnnnnnnnnnnnnnnnnnnnnnnnnnnnnnnnnnnnnnnnnnnnnnnnnnnnnnnnnnnnnnnnnnnnnnnnnnnnnnnnnnnnnnnnnnnnnnnnnnnnnnnnnnnnnnnnnnnnnnnnnnnnnnnnnnnnnnnnnnnnnnnnnnnnnnnnnnnnnnnnnnnnnnnnnnnnnnnnnnnnnnnnnnnnnnnnnnnnnnnnnnnnnnnnnnnnnnnnnnnnnnnnnnnnnnnnnnnnnnnnnnnnnnnnnnnnnnnnnnnnnnnnnnnnnnnnnnnnnnnnnnnnnnnnnnnnnnnnnnnnnnnnnnnnnnnnnnnnnnnnnnnnnnnnnnnnnnnnnnnnnnnnnnnnnnnnnnnnnnnnnnnnnnnnnnnnnnnnnnnnnnnnnnnnnnnnnnnnnnnnnnnnnnnnnnnnnnnnnnnnnnnnnnnnnnnnnnnnnnnnnnnnnnnnnnnnnnnnnnnnnnnnnnnnnnnnnnnnnnnnnnnnnnnnnnnnnnnnnnnnnnnnnnnnnnnnnnnnnnnnnnnnnnnnnnnnnnnnnnnnnnnnnnnnnnnnnnnnnnnnnnnnnnnnnnnnnnnnnnnnnnnnnnnnnnnnnnnnnnnnnnnnnnnnnnnnnnnnnnnnnnnnnnnnnnnnnnnnnnnnnnnnnnnnnnnnnnnnnnnnnnnnnnnnnnnnnnnnnnnnnnnnnnnnnnnnnnnnnnnnnnnnnnnnnnnnnnnnnnnnnnnnnnnnnnnnnnnnnnnnnnnnnnnnnnnnnnnnnnnnnnnnnnnnnnnnnnnnnnnnnnnnnnnnnnnnnnnnnnnnnnnnnnnnnnnnnnnnnnnnnnnnnnnnnnnnnnnnnnnnnnnnnnnnnnnnnnnnnnnnnnnnnnnnnnnnnnnnnnnnnnnnnnnnnnnnnnnnnnnnnnnnnnnnnnnnnnnnnnnnnnnnnnnnnnnnnnnnnnnnnnnnnnnnnnnnnnnnnnnnnnnnnnnnnnnnnnnntgaaaatactatccttattaaataggttaagtataggtttcatcaatgctccctttgttttctttttttttgagatggagtctcgctctgtcatccaggctggagtgcagtggcgtgatctctgcttactgcaaccttcgcctcccaggttcaagcgattcttcggcctcagcctcctgagtagctgggactacaggtgcgtgccaccatgcccagctaatttttgtatttttagtagagacagggtttcaccatattggccaggctggtctcgaactcctgacctcgtgatccacctgcctcagcctcccaaagtgctgggattacaggcgtgagctaccacgcccggccaggtgctccctttgctagagataaggagttaatggtatctactttgggatctagatgtctgaagtaagggtacattgaaggtaaaatttgttctttatcttccctagattgaatgagggtcactgaagatacagtgtttactctttgtctgctgtgaaaaagtctgttcccatctctaggtattttgtggttgatgttttatcactgtacttgttttcctttcactccactgcatgtaaattcttgcctcacagtgtaatattggcagagtamcttgaagttcaattcagtaaatatttattacccttgaagttcaattcaataaatatttattgaatcgagccattcaatatgctaactacagagatacagagctgagtaaagcataccttccccttaaggagatcatagtctctcagaggagacagacaaatgaacaaataaaccaatagtgcaaccacagaagtatgggtgaggtacacagtaagacaaaggagggaatgaatgattatctatagccacctcaaaccctttttggrgcaaattaggttgtaaataaataaagggaaataaccatggtaagagagggatgcagcgacagcattctcaaagatgaatgctatacaggtaactaagggtggttttgtaatggtttgattatttcccaaatacaggtatttatttgaactgaaggaagatgatgatgcatgtaaaaaagcccagcaaacaggagcgttttacctctttcatagtctggctcctctgcttcagacttcagcacatcaatacctggccccccggcacagcctgttaggtaagtccagagtggaccagtggcgttgaccagcctgtggccactacgcagaattcagcccataatgaattctaagaaagatccttgaactttggagtctagatttttcagaaagcttttgagtctcatgcttgtataactgcttctgccaactaataatttattgtatgaactctagttgtccagtcaaatattatttggtgatgaaatgaaccactaatgccttaaaccaggggttggtaaaactgctgtccaaattgtatctgctacctgttttgtaaattaatttttattggaacatagacgtactcattcattgacatattgtctatggctacttttgcactacaatgcagagttgtgacagagactgtatgactcacaaagcctaaaatatttagtatctctttccagaaaaagtttgccattctttgccttagagcagtgaattccagcctccacagaggtacacagttatgctaattcagagttccatcatggccaggcgcggtggctcacgcctgtaatcccagcactttgggaggccgaggagggcagatcacgaggtcaagagatcaagaccaacctggctaacacggtgaaacccgtctctactaaaaatacaaaaaaattagccgggcgtggtggcgggtgcctgtagtcccagctactcgggaggctgaggtaggagaatggcgtcaacccgggaggcggagcttgcagtgagccgagatcacrgcactgcaccccagtgtgggtgacagagcgagactccatctcaaaaaaaaaaaaaaaagttccatcataacttcatttttactagaagggtcaagattaaaagtgaattaaaatgaatttgcttttagaacccttttagcatatttaactaaagatatctaagccattggggtttgtcattcaaaatgcaaactttggctgggttgggtggctcatgcctgtaatcccagcactttgggaggctgaggtgggtggattgcttgagcccaggagttcaaaaccagcctgggcaacatagtgagaccccgtctctacccaagaacaaaaaattagtcgagccttgtggtgtctcaaagacagaaaacaaaatgtgaactttcagttttatatgagtcactatatactaacttccgtattgccagtgaatttctcccataggtcagaagttggagtacttggataagtagtttctagcactgcagaagaatctgaggactccatcagaaggcactaaacattatttagagatttagcaatgtttatgttgtattacggtttttgtgtgtgttatgttgtattatgaacaaataaatatgagtccttcatgaacaagtgtataggatttctccctacacatcactcatctcttagagattggcatctcagatgagtattttactctcgtccacaaaagtagcacattctggaggttaattatagaactggattggtctttacctgcagccttgaactccttggctcaagagatcctcccatctctgcctcccaagtttttgggactacaggtgtgcacttcactgcacccagctgattttattttttgtagagacagggtctttgctgtgttgcccaggctggtcccaaactcctggcctcaagtgatcctccctgccccccagccttggtctgtaccattttaagtgtgatacttatttttttttcaatgacttaataagttaactatcatgcatcttactaactaggggatattttcctttcatgatacagtcatagagtaatacaatgttatacaagaattccttctttggtctaaagtcctcagactgctaatgagaaaacaggcctggagaggttaaatggttagaccaaggttacatagctaattagctgcagttggaagccaagtatacccactttaagctgaagtagatgattttctgtgagtctaatatggctgtagtgatttaatagaaacccttgtgttttgcttttctcccttcccctttctgtttcttagagttggaaaggctcctggrtaaatttggacaggatgcacaaagaatagaagattctgtgctgattggatgctctgagcagcaggaagcatggtttgctctggatctaggtctggatagctccttttccataagtggtacatgacattattcctaacgggtacttcccagtggtcttcagaatttgggatttcacataatggtaaaatttaaaggaaaatttggggaatacaaaaggttatcamctttctattttttaaaaaaggacattaaaaagtgtcatctgctatcatcatcatttaaatgacaataaaggacattttaatgccttctaagttaggtgatgggtacatgaatatttatggtattagtctctgtaccattatacattttatttatttattttatcttattttattgagacaatgtcttgctgtcacccaggctggagtgcagtggtacaatcacagctcactgcagccttgacctcctgggctcaagtgaccctcccacctcagcctcctgagtagctgggaccatgggcatgtactaccatgcccagctaatttttaatttttttttttttttaatagagatgggggtctccttatgttgcccaggctggtctcaaactcctgggcacaagcaatcctccctccttggcctcccaaagtgctaagattataggtatgagccaccacacctggcctatacattttgtatatttctttttttttttttttttgaggcaragtttcactcttgttgcccaggctggagtgcaatggcgcgatctcggctcgccacaaccttcgcctcccaggttcaagcgattctcctgcctcagcctccctattagctgggattacaggcacgtgccaccatgcccggctagttttgtatttttagtagagacggggtttctccatgttggtcaggctggtctcgaactcctgacctcaggtgatccgcctgcctcagcctcccaaagtgctgggattacaggcatgagccaccaagcccggtcacattttgtwtatttcagtatttcataagaaatgttaaaaaacttataacatcattctaatttcttttttgaatacaggtgaataaaaatgtttccatatagctctgggtccacagacctgccattgggaaccactttgctattggctcatggctcctgtcaggctttccttctgtctttaatggtctaggtgtaaatgtagtgatgctgggatgaggttcacataggagccatgaggtcccacttcatctcttttccacggataagctaatgcaaatgttcttgccccgaagaagatcttgagaaatactatgtgctaatgtttcccaaactggcctgaatgtaagaatcacctggtgcttgttaaaacaaaaatagagattgctgggcctcactccatgccagctgctttagaatctccaggtaggggcttgagaatcttgctttttaaaaaaattttatgtatatatttatttattttgagatggagttttgctgtcacccaggctggagtgcaatggtgcgatcggttcactgcaacctctgcctcctgggttcaggcgattctcctgcctcagcctcctgagtagctgggattacaggcgcccaccaccaagcccagctaatttttgtgtttttaatacagacagggtttcaccatgttggccaggctggtctcgaactcctgacctcaagtgattcacccgcctcggcctcccaaagtgccgtacctggccttttttaaattttagagatggggtctcactggagtgcagtggctattcacaggtaagatcatagcgcactgtatgtagcctggaactcctaatggcctcaagccatcctcctgcctcagtctcctgagtagctgggactacaggcacacgccccccacacctagctgaatcttacgaggcaagtttgggaaacactattttaacaggatagactggagagaggccctgaggcaaagtttgtcattgtttaatttcattatcttttctaattttctagcctccttacacaaacctgaaatggagacagagctcaaggggtctttcattgagctgagaaaggcactctttcaactcaatgcaagggatgcctccttgctgtccacggtagattctgatttctcattctgtaggaaatttagtagagcagtaagtgtgggcaaatccatgtgtacacacaaggctagagtgacgtttgatttcttcttttgcagattatagtcctttctacaaacactggcaggacamtgtgctgtagggagattgcttattcttccttcttctgcccttgtttttggcagaaccactgtcaagatcattgtctcctaaagacatgcagatctatggcaataggatctgtcagcctcataaacatttttaatgacccacatagcatgacatatacagtatcatgttttccctaagagaaattactttacattgctttaatgacttgccctcacagctttagatttcacttgctaaagtattttgattgtgcatttaatttaaaaagaaacctctaaacatttttttagttgcaaaaaattccaactttaccagggagaagaacattttggggtgttcaactgtactgggaatgttttatttttaagctggttagtgaatacatgggtgttcattttattacctcatatacttcatatgttttaaataataatacatttaaaaatatgctttcttttattcagatttctgatgctagaggaatatgttcagttagtttacttgtcctgaaatttaaacagtaaccatttaaattacgtgagctgtaaagagattggcatttttctgtgagttgttccagacactaggcccagtgctgttaaagatgagccccgcattctctccaaatgacaccaggcccatcattgtgttcctaggctcaagctcttctccgctggcatgatgctcatcagttctgcagcagaagtgggcagcccaccaagaagaacgtggctggcagcaagcgtgtgtgcccttccaataatataatctattatccacaggtaattattgctgtaagaggacagtaatccaagaagactgtgcgctgctttgtcctggggaaggaagcctgtgcaattccttaattatacactgctttagctcattggcagggcccaaagtgccagcatctcagtttccattcccctttcctagatggctcctgtggcgatcacgctggtgtcagatgggacccgatgcctgcttgcccgccaaagctcctttcccaagggaatgtattctgccttggcaggtttttgtgatataggtgaggagtttaggggatatacaggtgacactggaagatatacaatcttactaatacaatcttctctgtcttgttgctatagagcttgaattcccaagcacattcttttctatcatgtcaagaaaactgctttctggcattttatatatatatatatatatatatataaaattttttcctttccttttttttgagatgggagtctcaccctgttgctcaggctggagtgcagtggtgcaatcatggctcattacagcctcaaccttctgggttcaagcaatcctcccacctcagcctcctgaatagctaggactacaggcacaggctaccatgcccggctaatttttaaaattttttgtagagacagggtctcgccgtgttgcctaggccagtcctgaactcctggcttcaagtgacctacctgccttgacctcccaaagtgttgggattacaggtgtgagccacactatttttttaagcaaattttcaaacataggagattgttgaaagaattatacagtgaacacccatacacccactacccagattctataattttttttcctcttcacatgtaggcatttgtttgtagggaggccacaagctttgtgcctctcatcacattgaccccagattcctgttgggtgtgttataaacagaggagccattctttaggccccctgctctgagcacacccctagattccatgaatttttactacacttactttatcacaaagctgtccatctatccattaatctatcttattttttgaygcatagattgaagatattagtacacttcttcctatttcagcatgcgtaacatttgctagaattcagtatttatttacaggttggtttttttctctagtctattggggtcaaatttgcaaatggtgaaaagtggaattttatgaaagctgagtgcagtagtccctcctactgtcacacttactttagacctagcagacttaagcactgtggttcaacacacagctctggacctgattcttattgttggaatgactcagagttttaggacactcccaagagcatttcattgaaactttggagccagtgttgtgcacctttctcaaatgggctgtctgtatcacccttctagcctacagggctgtcctgaattaatctgagtgcttgtaggtgaaagtgtggaagagaccatcygccgagaagttgcagaagaggtgggattggaggtggaaagcctgcagtactatgcatcccagyattggcccttccctagtggctcactcatgattgcttgccatgcaactgtgaaaccagggcagacagaagtaagttctcatsttcccttatactgtgatatttcttttgcttcatccaacctgctcatcagcaagtacttattaagcacttgtctagtccagcatcatctagattacataaacatgtgtaaaatatgatttagggctgagcacggtggctcatgcctgtaatcccaacactttgggaggctgatgtgggcggatcacttgaggtcaggagttcaagaccagcctggccaacatggcaaaactccatctctactaaaaatacaaaaattaaggccgggtgcgatggctcatgcctgtaatcccagcactttgggaggctgaggtgggcggatcacgaggtcaggagttcaagaccagcctggccaagatagtgaaacctcatttcaactaaaaatacaaaaattggctcggcatggtggcaggtgcctgtagtcccagctatttgggaggctgaggcaggagaatcgcttgaacctgggaggtggaggttgcagtgagctgaggtcgcgctactgcactccagcctgggcaacagggtgagaatgcatcttgaaagtaaattaattaattaatttaattaaatatgatttatgccctcaaggaatttgcaacctagtaaaggaagcaaataatctccattctcccttgcatatatgtcaatcacgagacaatttattttattttattttttttgagacggagtcttactctgtcgcccagcctggagtgcagtggcgcgatctcggctcactgcaacctccgcctcctgggttcaagtgattctcctgcttcagcagagaagtatatacccttgaaattatcaaaccgtcatcactatcaatgccataaacttattcatcacttacaaaagtttcctcccaccccttttatttttctcccaccccacttttttttttttttaattttgtggtaagagcacttgatgtgagatctattctcttagcaaatttttatgtgtataatatagtattattaattgtagaccttatggtgtacagatcttcaaaacttattttgcatgactgaaacctggtaccctttgaccagtggccaccctcccttcagcccctggcatgcaactttttccattttcccctcccttcagcccctggcaaccaccattctactctctgcttctgtaagtttgactattttagattccacatataagtgagatcatgcaatatttgtctttctgtgtctggcttatttcacttagcatgtcctttgggcctatctatcttgttgcaactgcaggatttccttcctttttaaggctgaataatattctattatagtatataccacattttctttatccattcatccattgtgaatactgcagtgaacatgggagtgcagatatctcttcaagatctagatttcaatccagaagtgggatgctagatcaaagggtaattctatttttaattttttgaggaacctccatatttttttccatagtaggtgcaccaacttacattccccacaacagtgtacatgggttcccttttctctacatccttaccaatacttgctgtccgttgtacttttttaatggtagccattaaagaaggtatgagttaatagtagccatcaaagaaggtatgaggttttcatttgcatttccctgatgattagtgatgttgagcaccttttcacatacctgttggccatttgaataccttctttggagaaatgtctattcagattctttgcccatttttaaattggcttatttattttttggtattaagttgtagaagttccttatatattttggatattaactccttataagatagagggtctgcaaatattttctcccattctgcaggttgtctcttcactctgttgattgattccctgactctgcagaagctttagtttgatagaatccctacttgtctatctttgcttttcttgcctgtgctttggtatcatatctaagagaccactgcccagtctaatgtctagaaatttattcctttatgttttctcctaagaattttattgtttcaggttttatatttaagtctttaatccattttaagttggtttttgcatatgatgtaagataacggtccgatttcattcttttgcatgtggatatccaattttcccaacactgtttatataagacaatttaccttttattgtcaggagttaagagtgtcttacatatagtaggcgcacaatcaggcatcatttaatgactgactgcaggattggtcttattgctcaagtcagtcaggatgctgggaactaaaaatataaaactataggtacttgtagttgaaagaaacttaagacgttgtcttttttttttttttttttttttgagatggagtctcattcttgtcgcccaggctggagtgcagtggcacaatctcagctcactgcaaccttcgcctcccaggttcaagcaattctcctgcctcagcctcccgagtggctgggattacaggtgcctgccagcatgcccggctaatttttgtatttttattagagatgggggtttcaccatgttggccaggctggtctcgaactcctgacctcaggtgatcctcccaccttggcctcccaaagtgttgggattatgggcatgagccaccatgcccggctagacattgttttatccaatctcatcttgcacttctctagcatcactgactgatggtctctgcctgccaaagtttgcctattgtatgttttggtttttatagaatatctaatctatttcagcttccttgggatgaagtttgcattactttgcttcttgcaaagatgagactatgcttttgactatcattaacccttaccctttaaaaaaaaaaaaaaaagagtggctgggcacagtggctcacgcctgtaatctcaacactttgggaggccgaggcaggtggatcacctgaggtcaggagttcaaaaacatcctgtccaacatggtgaaaccccgtctctactaaaaatacaaagaaattagccaggtgtggtggcgggtgcctgtaatcccagctactcgggaggctgaggcaggagaatcatttgaacctgggaggggaggttgcagtgagccaagatcacaccattgccctctagcctgggtaaaaagagcaaaactccatctcaaaaaaaaaaaaagtaatatttgtatgttcttttttaattgaaaaatttatacaatcaatagagacacaaggaaaaataggtattattcataatttattctcaatgttaaccactcttaacattttagtatttgtacttccaggatttatttaatgtatcttatctttttttttttactatgttagaaatatatttaactcggccgggcacagtggctcacacctgtaatcccagcactttggggggccaaggcgggtggatcacaagatcaggagatcgagaccatcctggctgacacggtgaaaccctgtctctactaaaaaatacaaaaaattagccgggcatggtggcgggcgcctgtagtcccagctactcaggaggctgaggcaggagaatggcgtgaacctgggaggtggagcttgcattgagccaagatagcgccactgcactccagcctgggcaacagagagagactccgtctaaaaaaaaaaaaatatatatatatatacacacacacacacacacatataaaactctcatttcttaattatgcctcttttgcttctgggcagtatctagaactgactttcacctaacctgaagatcccaggtattatcttctaagattgcttagttctagaatcattttctgacctttggccatagtattctaaattttgtagctcctgaccktacatccttttcttcctwatgtctttcagatccaggtgaacttgagagaattagagacagctgcctggttcagtcatgatgaggtagccacagccctgaagagaaagggcccctatactcagcaacagaatgggactttcccattctggctgccccctaagttagccatctcccaccaactgattaaggagtgggtggaaaaacagacctgttcttccctgcctgcttagcccggatcaagtcacttagatcgctccttggtattcctgagggacaaactagagatcagttgacaaaggagaagtgacaaaagataagctgcagaaggacctcagaagggcagagcaaagggtgagcctacagtaagacacttctatcagcagtgttaatggaagaaattcctaccaatgggcaatcaaaaaagccagtgtgagaagaaaactgatgagctgtcaactgtcaaaaatcagggggaagggggaagcattagtttggatgtaggcccttgttcagtcattttctctaaggccttggaagcaaacatcttctggcatatggcttgttaatgttgtgtttacactaactgccaaaatgtgcctgttgtaagtttggttaaaacttttatcttagtattgaaaatatatagcaagttttaagtcattactgagttacttgttacccttacagaattaagaaaaatagcacagtatgacattttaaaattcatgtacaggtgcattctagttacatgaacatgstagttaaataaaagtcacaattaagtcattatgactcagagtactttataataaatcagatgccctgaggctctgttgaggaagtagaatcccaatgggactccagacagtaaatctttttcgctgttttcagctctgtcacatgctcagtttgtgacccagggaaaagactattgctttgccatgcctgttttcctaaataaaacagttgctggcatttgcacatccacaacgtgttgattaacaaagggattggtggagataaacagatgccaaacctgacctatttcttaaactttatggaataaactaaatttaggatttctcatcattcatatatgatgccataagggagaagagtttatttggggaaaataaaagaaatttccacacctttgttctgatgtctttttctgtcctgtgaattgagaaaattttacaaggtgagaatttgggggtaggggaaaggatccctattggtgacaattaaacatttaagtccaggtttcaagtcagtgtaacaactgaagcaatgtgcaggaggaatgttagaggtcttgctgaaaagaggaaataatcatatcttcagaagattctagggacttatttgtgattaaagacaaaagctccagagaccctaaggttatttacatgtcaaagtcccataggactaagtcccaaagtcccatagcactaaagagattctaaaactagaaaagttaaagcactgaatttccttttgatctcaaaaggtcattgctctctccactgccagcaaaccatcattgctttggggaaatcaaagtgccttcatcaggaaatgttgagggataatatgtgatgggacttgattgtcttgttagattggcagcttgcctttacctgggctgaacccagcatgcagaagggaaaagcactcacaaaagagaggtcctgagatttcttcatatcttgcagttagaagaaaacagttcagggtccatgtgtattaccatctcccaatcttttctatctctatgtgggtgtgtttgtgagcgcatgtgtacacatccccaatctgaaaatactgatagaaaggggagtgtgcggaattcctggttatgagtttcccaaacttaccatggagtaactgtttgttttttgattaatgtgtttttggaaaagaaaagatgagagtggctaacagcaggagctgcaacattgaactttgcttctcagtagtgagtgggaaaagagctttgctgtagaaccccaaggatatctgaaagctgaggcagaagagagcaggcctggaatactgaaaatggcagataaataaaagaaactttggtacaggacctacctgacctgagaatatatacatgggcaataaattatgaaggtgctaaggataaatagaacccatctgggtccatgatgcagaatagaaaaacaggtaaaatcttgtgagcctggctgaaagtcagtcagccgtggcaaccagaataaaaaaaaatttcatttatatttttgcctatcaccctttctctacccaatatttaatcctcaatgaagataaacctaatgtaccacaagtgcgatggggggaaacctttttctcacagttgagctgggacggcattctggccccatttttaacatgagaaatgtagcttcaaaacaaacaataaaaatatatttaaaataattattatttaaaatgttaaaatgttgcacaatatcatctgatgtgttactttagtcaatgtgtaacacttatcctcttccttagttcatttcagtgaacactaggaagacaaaggattggagtgggatatggtatatttagtttttatttatttatttttgagacggagtttcgctcttgtcgctcaggctggagcgcaatggcgcaatcttggctcactgcaacctccggctcccgggttcaagctattctcctgcctcagcctcccaagtagctgggattataggcgcccaccaccatgcccggccatattcagtttttattagttcgtgatagtaagttctcagatgagaactctactacaccattctcctaattcctcccttggtcactggagagggaacagtatgaaactatttccattgtttttacttggatagggtaagatatagtaaaggcatctctctgctgcatacaataataaagaagaatccagagacctagattataaaaacatggtcagtatatggagctgtctgtaaagaagactttttttttgcttttaatggtgaattttatgatatatagataatacttgatttattttaggaggaatatgagcatcattttaagaaataaacatttcatcttagcaaaagatatatcagttatattaaatatcaaaccaattaattaattaaaacaattaagtacagtatcaggtatgaaatatccaaaataggcaaatccatagagacagaaagtagactagtggtttctaggggctgggagtagaagggaatgagagactattagtgagtatggggtttctaatattctagaattagatggtagggatggttgcacaattttgtaaatatactaaaaaccactgaattgtataatttaaagggtaaattttttggtatgtgacatatcaatatagctgttatttacaagtaaataagttctatatcttgcttcaggtacatacatacatgcaaaaattcactgactgtacacttaagatttgtgcacttaaccatatgcatgttatgcctcattaaaaaaattgaaaaagtgaatgagttttcaaatccaaatttgtcaacttgaaattttgatctgaggatgaatagcagtaagggagaaatttaaatatttagaattactccaagggtatattgtggtagggtatgtctttagcatgaagtgtgtgaatttcatctcaaggttgtctaggggctagattctaccctgccgagttcaaaacctgtgtataacccacagctgagatcacaaagacttgtgccaagagggccacatttggggctcatggagaagtcaatctgtaaaacttgtaatgaagaaacatttttactaaatgagtaatctaaactagaaatgaacagaatcatattcaatatttatttaaaaagaaaaaagagaagctaaatgtgctggttaattttttgttggcttacttgttggtctgtgatcggtgttgtcaggcagctgcactcccatgctttgtaaaagattggaagcaggtcctgccagtccagcttgggagctataggattccaatatatttgaaaccaggttcaggtctacatctactggtgccataacagattctcccgtaccagaatcttcctcatctgaattgttatcggtagtctgggatacaggttccttattcatagagggaaaagaaaattatgggctaatgtatcattaggttgcatggtggttacaataaaaagataactaagccacaatgtaaatttgcattccaaattaaaaaggaaacttcttatccttggtgatataaactgaaaatgaagtctacaagttatatggcctagcacacataataaaacttggttctaaaggttataacacatttctctccaggaaagattcctgcaaatcgaataaattgcatgtctattttgaaatagctcaagggctaatagaattaagaaggtacatttataacttgtctaagagtcttaaaagaaacaaacataaaagtgaatattaaatgaaataataatgtaaattttcttcaaaatgaaagaagcgagtgttcctttctttccccccagtgaaaaagcttaaaagtaaaaacacaaggctttgtggttccaaccacaaagattctaaattgttagttgggcctctgattccacaagctggggaaaggatttgaaagattacagctcgatagacttttatgtccttgctacccaaagcattgtccatggagcagcagagtctccatcgcttggggcttattagaaatggaaaaactcagctgggagtggtcgctcatgcctgtaatcccagcactttgggaggctgaggtgggtggatcacttgaggtcaggagctccagagactagcctggccaacatggtgaaaccctgtctctactaaatatacaaaaattagccaggcacggtggtgcgcacctgtagtcccagctacttgggaggctgaggcaggagaattgcttaaacccaggaggcagagggtgcagtgagccaagatcgtgccactgtactccagcctgggtgacagagggagacttccatctcaaataaaataataataataataataaaataaaacaaaataataataaaaaaaaggaaaatctcaagcttcatcccaggcctacttaatcagaatctatgttgtaacatgatcttttggtttatattcgcattaaaatttaagaaatactgctttagataaatctaatgtatggtttctactagattttgacaattctggaagtgactatagttttaaaagtggtttagatgatcaaagcaaggagaattaacattaattaaaggcctattgtaggttttactgctgtctaatttggttctcatgttaattttatgatatgaggattactggtttatagatacattcacagtggacagctgagctagacttcaaaccctaacccataagactccagggttcttgctctttccataatacctctgtttaggattagacagtggtggcattaaaaactaggatgaaaacataaacggaaggtgaatcctaaatttggctctaaattagggaaaaatacaaaataaactgttaaaactggaaagttatttgaatgtttaagatcctgtttatttacttatgttattttgttttaatccactgtggcccaaggcatagtctcaaaaggtcttgagaacatgtgccctctcttttttaaaatccatttaagctgtagtttttttaaactacttttgaaaaaaaatgtatttaagaagtagtagtgtacaatcgcattctaatttgagcatattatatgactttttattttaaatcctgatagataacgtagaataagtaatataatgaagcttatgttttggaaaattaagtctatgatcctttatcctaccagagttaggaaaacaattaacattcttatttatttcaaatctcacacaccaaaaaaagaaaaactatgataaaatatggttttagctatctgacatactagactcagaaagagaaagaggttaaaaacacacataccacttggttcctagtggtgaaacttttgctgatgcaggtgtgtgctagttcctggtccatctgggccatgtatgacttgagattatcaagtgttcctttcagggaagcctcttcgccaggttcgtgtgtttcaaagtccaagtcatcatcactatctaaacattcaaagtcttcatcatccagatcatcagaatctgactcattaggccttggccctacacagatcccaagaaagaaagagccacttagtaattattattattattattattattattattattttttagttactacacatctcaaaataattagaatgttacccacagaaaaagactaatacacacagtcagtctacttcacaaaaatcccttctacaaatggtaatgctggcagatatgtgtgcatttaatgttgtggaaaagcgtacaagctgaatcaaaagatttagcttaaaaaaaagtgaattcaattaattaaaatatttttcttaaaaaatttttaaaaatacctaataaatgaatacattttgatgtaaacattcaagccatacaagtattgtctccaatctcactctctccccagaggtaagcatcttttagcagtttccgggtatcccaatctttctctctgcagttctgtacatatatacatattataattattttttgagttatctttttattactgatttgtaagtacagtaattccaaaaaagaacaatataatatgggagccaaggtaaaaccctatttaaacacacagcattcagtcactctcaaatatttaatgaggccgggcacggtggctcacgcctgtaatcccagcactttggtaggctgagatgggcggatcatgaggtcaggagatcgagaccatcctggctaacacggtgaaaccccgtctctactaaaaatacaaaaaaattagctgggtgtggtggcaggcgcctgtagtcccagttactcaggaggctgaggcagaagaatggcatgaacccaggaggcggagcttgcagtgagccgagatcgtgccactgcactccagcctgggcaacagagcgagacactgtctcaaaaaaaaaaaaaaaaaattaatgagcagctactatatatgtcaa

SEQ ID NO: 6956 - DNA, 23339 bp, Homo sapiens
cacaccccactcccacaaaactctgatttttgttctatgcttccccacaaacactcatctattcctttagccattcactccctgattcccagtcaaacatattaatacacattgaacaaatacattgtgagcaccagctgcagatcaggcactgagtaatagacaacataattttttttttttttttgagacaaagtcctgctctgttgcccaggctggagtgcagttgcacaatctcggctcactgcaacctcagcttccccggggtcaagcaattctcatgcctcagcctcctgagtagctgggactacagtcatgtgccaccacgcccggctaatttttgtatttttggtagagatgggattttgccatgttggccaggctggtctcaaactcctggcctcaagtgatccacccacctcagcctcccaaagtgctgggattaggagacaacgtaattaaatgggacaaagtctttgttttctaagagctcatagacttgcaaataaactgaatcacagaataagttcaacagaagtgactaggagtagagggtgatcaattctatctctgagcttaagggaaggcttcctggaagaggtaatgtctaaataggatattggaggatgaatagctcacaagtggacaagcagaggaaggctcttccaagaagagatgaaagcacatacaaaagcatagaggtctgaaaccaagcaacatacacaggaggaataagtagttgagcattgctaagtattaaataaaggggcggggacaggtggtggtcatagcaggagatgagaccagagaaacaggcaaggaccacactgagaaaggccacactaccactctgccaaaagaatagggtgccagaagggatttcaagaaggcacatttttagatctgcatattagaaaggttaattactctagttgtattatggaggatggatttcaggggtagggagtaaaggggaagctgggggatagcaggttatttagaggcaaacagattttgcaataatccctgtaggaggtcatgaggccctgaacctggtgagcaggagtcaggagaggaagaagaaactgaactgaactgagtgttttcctgggggtaagattgctagactttggagaaccttctttaccagaagcaaaacttttgccagagtcaagcaaaagagtgaggaagtccataactgagaggtcacagccacagctgggcagaaatcatttcatcatcctcttctcagactgggacacgcagagcatgaaatcactgagctcacggccaccttcaccaagtttgacagagatgggaatcgtattctggatgagaaggaacaggaaaaaatgcgacaggacctggaggaagagagggtgagctgggctgatgggtggagaggcagtgtaaggaaatagctcaccctctccttcccccaacatacctagaacacaaacccacctgaaaactctcccatagatagtaaagaactctctagaatagtagttcccaaactgctgcacattagaataccctggggggcctttaaaaatcttcatactcaggacacacactctagaccaattaaaccagaatctctgggtgtggggcctagacatcagtactttttataactccttaggtgattccaatacatagccaaggttgagaatcatgctctaaaacacaggcttagggaaaaatgaccaactgcccaagaatcactgataattccctcagaggacttgccttctcttgggaattttcagacttggattcttggctgtccctactgtgcctgctccatccctatccagtgtggaccaaaaaaagtcaaaggcagggtgacagcagcctagaaagtgccaagaacactggtagtgtccctcctctgctaaaatgagttggcctctagtaaatacctcatccatcaagccttctaggatcttgtgttttctttgagaggtgactcctccagaggttggtccagcaccaccaccctgaccctattgtctccagagtctgggagggaaggggaatagcaagaactaggacctgagccttggtcctgagatcccagtagagtaggtgatagaacaggagctgatggcttcccagagttatctcctcccctctaacctctgacttcctgagcaggtggccctcaacactgagattgagaaactaggccgatctattgtgagcagcccacaaggcaaatcgggtccagaggctgccagagcaggaggctgggtttcaggagaagaattctacatgtacgtgcagccaagaaaggctggttcagggctggcaacacttctattacgataccctgtcttgtacttttcccacaactttccaattctctgtcctaccccagggagaacctccgctcccctttaattctgcctacaaggctgggtcttcccttccttgttccattcaggacacatgcccttctgtgaaccctggctctttagacatccagcccccagacacagatttctgctccattcgtctctctcaaatcccacacaggctcacaaggagagttctgcagctggagactgtcctggaaggagtagtgtcccagattgatgctgtaggctcaaagctgaaaatgctggagaggaaggggtggctggctccctccccaggcgtggtgagtggcccttcacctggtcctcctagttcctcacagctgaactctgccatcttttccactcagtgggtggggcaagaacatttttgaaagacctatgttttcaggctcctggggaaacatgttcatagcggttagtgtatcagcagagatgggtcatggagataaggcctggaagttgcttgccctggcctaagggctgccttggccacatgagatggtctgtgtcagtctgtttgggctgatataataaattatcatagactgggtggcttataagcaacacaaatttgttcctcacagtttgggaggctgggaagtctaagatcaaggtgccagtagattcagtatctgttgagggcccacttcctgattcatagagagctgtcttcttgctgtgccctttcatggtggaaggggtaagggaagtctcctttattttatttttttattttatttattattattattttttgagatggaattttactcttgttggccaggctggagtgcaatggcacgatctcggctcactgcaacctccgcctcctgagttcaagtgattctcctgcctcagcctcccaagtagctgggattacaggcatgtgccaccatacccagctaattttgtatttttagtacagatggggtttctccatattggtcaggctggtctcgaactcctgacctcaggtgatccacccacctcgtcctcccaaagtgctggaattacaggcgtgagcccactcataagggctacatactcactatctaatcccctgccaaaggccccacctcctaatactatcacattgggggttacaattttaacggatgaatttgggagggacgcaaacagtctatagcagtctgagttctctggaatcagatagagagaaaagaaaagtggtacacaaactatttcttcaaatgatttgtccctttcttcttccaacagaaggaacaagctatttggaagcacccgcagccagccccagctgtgaccccagacccctggggagtccagggtgggcaggagagtggtgaggaagggggcctaaagcatcagacagcaggcttccctccctctgcctccgcacaggccccctcgccacatcccctgcacttctaggacaacaggtcccatcatggctgctgctgagccccaccctgcatctggccttttgagccaatgtttctgtgtgtggtgggcatcatgcttaggcttgtgaatcagtgtttctgtgtgttgccacatagctctgtgaaataacgtcttccactgggccttttactccctgtgtacttagctctgtgtgttaattaaaaaaaaaaaagttaacaaacaggataaagagagggagggtaatggctcttcctaagcacctggatagccatggtctgtgaaaaaggtagaaaccaagagagtaggcggtatctagatgtcttcctacttcccagtgaatcctattcttatcctttgtgcatcccaagatttgttgctagcacccatgggtttctcgttttcccccacagaggttccctataaaagagaagaggaagccttagaggagaggagactctcccgtggtgagattccaacgttgcagaggagttaagtgtgaggcactcccggagcaaagtctatgaaggatcttctgcaagaggctgcctcctggtccactgaacctggaaactgagtgggctttaaccaggagataaaaatggagcctgaagggaatcaggcaaggaaatgaactcaggattcagagatctttgaattaatatgtggtgggttctgacattattcttccataagaccatgtgggtttccatggtggctatcaataaaactccttaggaaaacttggactttgcatttgcttctggtattatagagggaagaaaggctgaaattgtgggtcatccatgtgcctgggctggaataggttcatgctctctaggaggtatagagtaggtgcagtgatgtgaaggagctgggctataagaacttctaggcctagcacagtgactcacgcttgtaatcccagcactttgggaggctatgttgggtggatcacttgaggccagaagttccagacaagcctgggcaaaatgctgaaatcctgtctttaataaaaatacaaacaaattagccaggtgtggtggcgcgtgcctgttatcccagctacttgggaggctgaggcatgagaatcgtttgaactcgggaggtggaggttgcagtgagctgagccgagatcacgttactgtactccagcctgggtgacagagcgagactctgtttcaaaaaaaagaacttctggctcgcaggaatggcttgaaatagtggctactatggttgcaccataggaaaagtggggacaggtgacaagtgagactcagtcctcagggtggagacagtcagggtaggagggctggggataaggggtagctggcgtgtgtgtgtatgtactggcatcggggtggggtgagagggtgcagagggaggataaccagggataagaaaagaaactaccaagattttgggtgtccaggagcctgcctgaggcctgctgaatatctcctatcccttcttctgtggcctttatccctcctcattttgcaccttcaattgctccccagtcacttcttctcatccatctctttcactcactcctgttctcccatcccattaagtactctgtacacctaggaggcttgtgaaacagcttaaatgcaattaagataaccagagtgtatcctcagccctaaaaaagttacagtctaagctttcttcaaggaaggctgtatcaactgaagagaagtagatgcctgcctgcagtttaagaaataggggccagtgagttggtgttaactcaggacattgggagggacagtatttaggaccagggatcaatgcctgaaggtttcccaaagtgtggacgagacaacctgtaaaactttggattccctgagcaatcttttgatgactaactccagtgcggagtgtcaggagagcgggcaacccgtcttcagtggttttggtcagcaggccacaaacagggttgactattcccagacgggtcgtgagtggtacaagatgagtgatccctccagggtgtgactgtagggatgagctcgccctcagtcccagacgtcgcgactgttggcagtggatcaattcacaacagcctggcgtagcttcaatttcggctccggaatcgccctttgctgtgtcatagacctgaggctggactggaccgctaggcgcaggactgcagggccggccgggtgggcggggcacacccagtgcgcatgcgcagcaccccggcccggaaacagcgcggggtccrctatggcggcggcagcsgagggcgtactggcgacccgsmgtgatgagcccgcccgaggtacccggaatggatggggaggaagcgtccggtggggggcctggggctccgtctcgggtgggcgaggttgagtgtgtggtggctcacctggcaggaacgggctggtgagaggagtgcacttgtcgctgcgcgcgagtgtttgtcctgtcagggtgactgggatggtgccaggatgagcgggggtgccgggtatgggcgaggggcggtgcgagggaggcgagttgatgtgtcagatgggcagggacgcagtgaaggacttgaaattatggcagatggagaatggagccgacttgatggaatgaaggcaagtggagggatgtcggaacaggctgctttggctggattagcaccgggtgtaggcgggacacttagtcattctcccttggcccagacgatgccgccgtggagacagctgaggaagcaaaggagcctgctgaagctgacatcactgagctctgccgggacatgttctccaaaatggccacttacctgactggggaactgacgggtgaggcggggtctgggttgattcgggtgcggtttggcccaggaggcctgggagatggttagcagcatcagtctgcagctcccttcctaccctgcatgccctgagacaggcctgttggaagttgggggaggccatgaatgggagagaaagaaaatacaactctgcaggcctctgtaacatagactaatgagaaaacartaacaaaaaagagttcatatccagcaacagtaatcaagaagtgcttccttggggaaagtgtattttgagcagggttgtgaagggaattattggtggaaaagggggagatgatacaactagcgaatgaggtggtatgtgcaagcagtgtgtttggctaaagcagaagatgtgtttaccgggataaagagaaatgaaattgaggaacggggagtgacctgcagatttagggacctattagtttggtctgaggatttgataacccatcctttgggacatgactagtgtttgatcgtttccaagtggacacatgacctatgtgtggaggaggatcagaaagtgaagtatgggcagggcgcggtggctcatgcctttaatcccagaggccgaggctggtggatcacttgaggtcaggagtttgagaccagcctgggcaaaatggcgaaatcctgtctccactaaaaatacaaaaattagccggccgtggtggcgggcgcctgtaatcccagctactggggagactggggcaggagaatcgcttgaacccaggaggtggaggttgcaggttgcagtggactgagatcacaccacttgcactccagcctgggcgacagagtgtgactccatctcaaaaaaaatgagaaagaaaaaagaaaaagaaagaaagtgaagtctggtccagtacagcatctcaaaaacatttattaaattgtttcacttccccaggaaattactgtaagctaaatttgtgaatcagaatctatgagaaaaggcttgatacagaatagtaggggttgtgaatctgtaatttttttttttctttttctgtttttaagagacagggtctcactatgttgcctgggctggtcttgaactcctgagctcaagtgatcctctttccatctattttggttgatggcaccacccaggcttaaaaccccagatacatcttagtctgcttccatccctcaatatctacttgaacaagtcctataaattccacttctgtaatgttcttgcacccatgctctcctttccattccttttaccaccactctgcctgagatcttcattacttttcttttattattattattatttaaaaaaatatggccaggcacggtggctcatgcctgtaatcccagcacttcgggaggcctaggcaggtggatcacctgaggtcaggagttccagaccagcctgctcaacatggcaaaaccctgcttctactaaaaatacaaaaattagccaggtgtggtggcacacgcctataatcccagctactcaggaggctgacacgggagaatcgcttgacctgagaggtggaggttatagtgagctgtgatcgtgccattgcactccagcctgggtgatggagggagactctgtcctaaataaataaataatagagatgaggtctgctccgttgcccaagctggcctcaagtgatcctaacacctcagcttcccaaaatgctgggattacaggtgtgagccactgcacccagctgtgactctgtaagttatcagcctgattatttgtttgtttatttttgagcaagagaaaccaagtaacaaaatgtaggtgtttggcttctctttaacaattccaaagatttggcgctactagcccctgcattctttcaaggctataattgactagagctgagcagctgcctcttaaaaggactagtgctatctaatttgtccttaccactttctgttttctccctttactgggaactagtgtcaagtgccattgatcactgttctctactgttatttttattagtagcagtacagaaatggttttctataccaatggctctatcaaaactggtaaagtaaatgatgggctaagaggattgcatattgcaagaagtaaggggaagcacatttcttcatggaagtgaataattttcttatgcatttaatgtgcaagcacttggcttactttactcatttacgttatcttgctggcttctaggtgtttgaatatgtcacccttgttttattttattttatttagacggagttttcgcttttgttgcccaggctggaatgcagtggtgcaatctcggctcactgcaacctccgtctcccaggttcaagcaattttcctgccccagcctccaaagtagctgggattacaagcacacgccaccacgcctggctaatttttwtttttatttttagtagagatgaggttttgccatgtcagccaggctggacttgaactcctgacctcaagtgatctgcccaccttggcctcccaaagtgctgggattacaggcatgaggcgcaatgcctagctgtgacctttgttttagagagactaatttgatagcagtataaatatgagagtgtagatatgggggagagagaacagagagagatgagcaataattcagatgaaaagtaatagaggaccaggcaccgtggctcatgcctgtaatcctagcactttgggaggcaggagaattgcttgaggccagtagtttaagaccagcctgggcaacatagcacgactccatccttgtagtcttgtcttttcccctaccatccagaggttacatgctccaagtaatctaataataataaaagaaaagaaaagtaatgaagatctgaggcagagtggtggtaaaaggaatggaaaggagaacatgggtgcaacagcattacagaagtggactttataggacttgtttaagtagatattgagggatggaagcagaccaagatgtatctgaggttttaagcctgggtggtgccatcagccaaaatagctggaaagaggaaccatgtttagtgtgaaaatgttttcagttttgggttggctgcttgttgatgtaactagggaactcaggtgacttgtacattggattccagagctcagagattgatcagagcacaagaaacagatttcggagtcactttcgtagtggtgtgattggacgctgtgcaggatgagattgccaaggaagagcttagaagtaggtaagagagcctaggctaaaatgtcagggaatgcctgtatggtgcacttaatttgtttttagtaacacttaaagtacctaggtttccaaatgatttattatataattaattttaagcaaattgttattttcctgtgattgttattcttactcgcacaaatgctttattgaatttaagagtaaattgatatttcctcttaaactatgctagtttctagcataagcctgggaatgcccataggtatgtgctacccatgtaaacatcagttatgtgttacagctgagaaacagttgagaactgatagttaagggggtctgataagaaagcatctggcatagacatctaagaagagcagttagagattagaaaatcatcggtgtagtacaatgccatagcagccaaaggaaatgagcatttcccaaagagaaggagatcagtagtgtccaagacaatggagaggtttaggaggataagaactgagcaaatgccatggatttggtggttagcagagcaggatgactttggagcatgtaatctctggatggtagggccaaaaaccagactacaagggtatatgcaagtaaatggtaaggaagaggatgtagtgagtgtcagctactttttcaaattgtttagcagtgaagctcctttgctttactgagcaaatgatatagatgtagcagaatagagagagtgcttttgagctggaagaaatctgaatatattgatacatagagaggaaggtgccaggagagagggagaatttggaaatgcaagtgaaaggagatgattgaagagaggccctgaagaagtagaagtgtttgggttcaaggccacaagaggagggggttgtcttggcaagaataggaacacttctgcctcttgggaagatattaagatccagagaagtttagaagtgaggcagagagaaaaacaaaaaacaaaagaagtaaggcagagaggttgaagcagcttatgttaatggacttggcctttaggaaaattggagtagagaccatttgctttgaatggggatagggaaagaactgaggatatgagaagcagacagatggtttggaaatgtcactgcataaaatgcaatatagaattatacatggtaataaacgagttactaagaagtagtgaggtcctagctgatagtgtgtgtgtgtgtgtgtgtgtgtgtgtgtgtgtatgtgtatatatatatatwttttttttttgagatggagtctcactctgtcacccaggctggaatgcagtggcacaatctcggctcactgcaacctccgcctcctggattcaagcaattctctgcctcagcctcccgagtagctgagattacaggtgcctgccaccacgcccgctaattgttttgtatttttagtagagatggggtttcactatcttggccaggttggtcttgaactcctgacctcgtgatcacccgcctcggcttcccaaagtgctgggattacacgcatgagccaccgcgcccagcctgatagtatatatattatatgtatataagttaaatgttttcatgctgtaraagtaccaagactattttacctcccttttcttaggacatgagtttatcatttccctttgtaaccatgatcctgaaccttctggatcttgtttggtttaaatagttttctgattgttgcctgaatttctacctagactttcagagtacataggctgagttataaatgtcatagatcaaaagtggcccactcctttgacacttccttggtcctgccttgaactaccacttagcttatactcccacattctaatgatttaagacaaatcttaaagacattacatcttctgtttaattttcaagccaccagtgaagactataagctcctggaaaatatgaataaactcaccagcttgaagtatcttgaaatgaaagatattgctataaacattagtaggaacttaaaggacttaaaccagaaatgtaagtaataatatttgtaattaaacatgtttgtatttaatgttcttttgtgcttggggccatggagaagaggagggaacatgacatccttgtcttgtgggagcttgttttctaaaaatgaattccaaatttaagatgaatttcttccattctgaggattagcatgttttgtttgtatgggtatttttgcttctaaatcttgattttatcagtttattcctggaatgggagggggcaaaggaagggtggccagattctaatgaattgatttacaaatccataaaggattactctataagcagaaaaccaaaaactctataatggaaaacactaatttagagtagtcgaatatattttttccattgacttattatttttgtgtttcttttctctagggtgctctttcttggtatgggagtacccaagaaacagaatcagtaatggaaagattgctcaaggagcaagaaattaaaaagaatggaaaattagtagatgagagacactaagtctgggccacagtcgtgcctgatcaactagctactgtcttctaaagcatctgccctgctagkgctcagaatcatgtcacgccacctaatctgtcttagcatagctggagagacactagcattattacttttccactcttttcctatattctttgttaataaagccatataaacatgaagtttttctttgtttttaaagatgctggactgcagccttatctggatcagatcaatgtcattgaagagcaggtagcagctcttgagcaggcagcttacaagttggatgcatattcaaaaaaactgggtaaccgtttttacttctgttttgatgtaataaagactgcttcttgccagcatattcttagtaaacataatagttaacatttatggtgtgcctacagtgatctattaatcttcacaaaaccttagtaatttattattatattaataaaaataacatttcctgattacttaatgatatatcaggcactgttcttagtgctttacatgtattatgtttggtttttgtttttggtttgttttttttgagacaagtttcactcttgttgcccaagctggagtgcaatggtgcgatctcggctcaccgcaacctccgcctcctgggtctgggttcaagcgattctcctgcctcagccccccgagtagctgggattacaggcgcgccaccacgcctggctaattttgtatttttagtagagacrgggtytctcatgttggtcaggctggtctcgatctcccaacctcaagtgatctgcccacctcggcctggcctgtattatgttttttatcttcccaataatctgtgaggtaagtacatgatttttttttgtacttttagtagagacgrggtttcaccatgttggccaggctggtcttgaactcctgacctcgygatccgcccgcctcagcctcccaaagtgctgggattataggtgtgagccaccacatctggttcaagtacatgatttttatcctcmttttgtaggcaaggaaactggtttaaggggataagtaagttgcttaaggacactaagccagtacagggaagagccatatttctaagcaggtctgtttgcttacaaagctcaagttcttatttgtagttgagaaagcagaagcacctttaataatgtagataaatatgtcttaaatgaatagtcagttgaggattttcttgaaagatcacttttcctttgaggaagaaactagtatttttagtactagtggtttgctaactggctctggctcttacatacatggttaaaagtaaagaatttagtgggttttttgttgttgttgttttgttttttttttctataagagatgaggtcttgctgtgtcacccaggctagggtgcaatgacgtgatcatagctcgctgtagccttgaactcctgggctctagtgatcctccttcctcagcctcctgagtacctgggactacaggtgtgcaccatcacatccagctactttaaaaaaattgtttttgaaacaaggccttgctgtgttgcccaggctggtctcgaactcatggccttaagcaatcctcccacctcagcctctcaagtagctggaatcacaggcctttttttttttttattgatcattcttgggtgtttctcacagagggggatttggcagggtcataggacactagtggagggaaggtcagcagacaaacaagtgaacaaaggtctctggttttcctaggcagagtgtttgtgtccctgggtacttgagattagggagtggtaatgactcttaacgagcatgctgccttcaagcatctgtttaacaaagcacatcttgcaccgcccttaatccatttaaccctgagtggacacagcacatgtttcagagagcacagggttgggggtaaggtcatagatcaacaggatcccaaggcagaagaatttttcttagtacagaacaaaatgaaaagtctcccatgtctacttctttctacacagacacggcaaccatccgatttctcaatcttttccccaccttgcccccttttctattccagaaaaccgccatcgtcatcatggcccattctcaatgagctgttgggtacacctcccagacggggtggtggccgggcagaggggctcctcacttcccagtaggggcggccgggcagaggcgcccctcagctcctggaccgggtggctggccaggcggggggctgacccccccacctccctcccggacggggcggctggccgggtagggggctgacccccccacctccctcccagacggggtggctggccgggagggggcgctgaccgcccccccacctccctcccggacggagcggctggcccggcggggggctgagccccccacctccctcccggacggggcggctggccgggcggggggctgattccctcacctccctcccggacagggcggctggccgggcagaggggctcctcacttcccagtaggggcggccgggcagaggcgcccctcacctcccggacggggcggctggccaggcggggggctgacccccccacctccctcccggacggggcggctggccgggcggggggctgactcccccacctccctcccggacggggcggctggccgggcagaggggctcctcacttcccagtaggggcggccaggcagaggcgcccctcacctcccggacggggcggctggccgggcggggggctgagccccccacctccctcccggacggggcggctggccgggcgggggggctgagccccccacctccctcctggacggggcggctggctgggcaggggggctgacccccccccacctccctcccggacggagcggctggccgggcggggggctgacccccccacctccctcccggacggggtggctggctgggcagaggggctcctcacttcccagtaggggcggccgggcagaggcgcccctcacctcccggacggggcggctggccggctggggggctgacccccacctccctcccggccggggtggctgccgggcggagacgctcctcacttcccagacggggtggcagccaggcggaggggctcctcacttctcagacggggcggttrccaggcggagggtctcctcacttctcagacggggcggccgggcagagacgctcctcacctcccagatggggcggcggggcacaggcgctccccacatctcagacggtgggctgccgggcagagacgctcctcacttcctagatgggatggcggccgggasgaggcgctcctcacttcccaggtgggatggcggcsgggcagagacgctcctcactttccagactgggcagccaggcagaggggctcctcacatcccagacgatgggcagccaggcagagacactcctcacttcccagacsgggtggcggccaggcagaggctgcaatctccgcactttgggggggccaaggcaggcggctgggaggtggaggccatagcgagccgagatcacgccactgcactccagcctgggcaccattgagcactgagtgaatgagactccgtctgcaatcccggcacctcgggaggccgaggctggcggatcactcgcggctaggagctggagaccagtccggccaacacagcgaaaccccgtccccaccaaaaaaacacgaaaaccagtcaggcgtggcggcgcgcgcctgcaatcgcaggcactcggcaggctgaggcaggagaatcaggcagggaggctgcagcgagccgagatggcagcagtacagtccagctttggcccggcttgagagggagaccgtggaaaggagagggagagggagacgggagagggagagggagagggagacgggagagggagagggagacgggagagggagagggagacgggagagggagagggagacgggagagggagagggagagggagacgggagagggagacgggagagggagagggagacgggagagggagacgggagagggagacgggagagggagacgggagagggagacgggagagggagaygggagagggagatggagagggagacgggcctgagtttgtttttgtccttataacatttacagattattttattttcatcatttaacaagggctgactacttcaagaaagtagtttgtagtaggctgggatttgatatgggtggcgattaacaatcagttttattttctacagttacatttagccagtgattaccgtgaaccttaccgcgtagaaggcaggggtaaccttaccatgtagaaagtatcttggttcacagtaaccatttgtgacagagtccctttttctgttaaaattgtgaaaccaggtgctttcatggttttaatagaaaaacggaatgtcagagtaagaggcttatttgatggccttttaaatatctgtatctttcaaaattgctttcctggagtaaggtgtaaggataagaacatacaggaggaaacatacatttatacttcctgagggttccagtctggttccagagggcacctgggacagtgctgagagaggcagttttttagtaaggctcccgataggtcaagtgacagatgtgccccatcctggtggagctgtctaagtaggtgctgttgacagggtgaggacttcgtgaacctgtgttaggctctcagttctgagtgtctgtgcttgaattcttattccaagttttacagatcagtgatccgtatatttggacagatgatgagattgaagctaatagatttttagtaatattatacatattttttaaacttgactggaaatgctaactaaaaactgtctttgtaagagccagttttaaaagatgtaactctccctcatccctcacagaagccaagtacaagaagctggagaagcgatgagaaacttatttctatgggacagagtcttttttttttaatgtggaagaatgtcttataaaacctgaatccygaggctgatgaattgtgaaaattcytcaaaaggaaattatgctggtcatcacaggaacatctcaacgttcgagtaaactggaggactgtggctattcctgaaccttctttgagacagaatccctcagaatctcacacttataacttcctaccttttacttgaatgctttgccatattcaggacagagactctcacaaagttcagaaaacagctggacttaccagtaaaatcaaatgagaggacctattttctctggtagtggttgattactacattattttcttaagtggctggttttttagttactatgtaaatggtcgtttttctgttaatgatgctaatgtgttgtaaacaagattctaaatttaaaaaggaaaacaaaacaaacttgttctttgcagcttatcaccttgtgaatgtcggtaacttacttttccataatattgcaaataacataaaatcttaaaataattccaagctgagtcttctagattgagcagaaatggtgaaaggagtattgataacttggcgtatgtgatgggcccctcttgtttattttctatgtgagtcacattgacatgcgatcagtttgggaaatgtgatgaaaacaaagactagatgggtatgtgtgtttatgtgttgggtagggaggtgacgattgccactcataaaataaaggattttataaaataccttcctactgtgtatgtaggatttggggggatcttagggacctaatcgacttctttgcacactaaaaacatcagacaatgggacatactgactgaccagtctaggttgaaagataggcagccttacccagaacacaacattagcagctgggaaggtgtctgaggtccccaattacatatcccaaagagtttcttacttctgtttctgtcatttcccctctgttccagacagtcatcatttatcctctgttcttcctggactgttgctgtggtctcttctcatcttaactgtcccttccaaccaccctccacactgctgccagagcaatcttaaaaatgtaaactggccctattactcctgcttagaaccctgtagtgacttatcatggcctctgaaaaatctagactttcattatgcatacaagtcccttgtgtttttttgtttgtttatagacagggtctctattgtcacccaggctggagtgtggtggtgtgataatagctcaccttgacctcctaggctcaactgatcttcccacctcagcctcctgaatagctgggactaccagcacgctccaccatgccttgctaattattttttatacagatggagtctcactatgttgtccaggctggtcttgaactggcctcaagtgattctcttaccacagcctgccagagtgctgagattgtaggcatgaaccaccgtgcctaacataaggcccctatttaaacatttttcttaaataaaaaacaaaagaattaaactgtaactctactatcttaacatagaatcagtcttaccccttcttccaacccttttccttttccgtgcatgtattgatctattttttttttttttttgagatgaagtcttgctctgtcgcctgggctggagtgcagtggtgcgatcttagctcactgcaacctctgtttcctgggttcaagcgattctcctgcctcagcctcccgagtagttgagatttacaggtgcccaccaccatgccaggctaatttttgtatttttagtagagacggggtttcaccatgttggccaggctggtctcgaactcctgaccccaaatgatccacccacctcggcctcccaaagtgctgggattacaggtgtgagccaccgcacccagccatgttgatctatttttaaaaagtttttatttcctgttacactgtgttcagctatcttcagccaccttaaattcccatggatgagttttcataaactttttgaaaatagatttagatttacgggaaagttgcaaagataatacagaatttaatggatgagtttttttattgatgtgtaatagatgtatgtattttcagagtacaagtgataatttaatacatgtatataatgtgtaaatattaaatcaagagttattgggatgtccttcaccttaatatttatcttgtctttatgctaggaacattatttgaattattctcttttacctattttgaaatgtacaatagattaacattagctatagttactctactgatctatcataggtcttatttcttctgtatttgtgtccactaatcaaactcttcatcctcacgtccccaccacctttcctggcctctggtaaccaccaatctacctccatctccatgagatccacttttttagctcccacatgtgagtgagaacatgtaatatttgtcttttctgtgcttggcttagttcagttaacacaatcacctccagtttcatccatgttgctgagaatgacagaatttcattccttttatggctgaacaatattccattgtgtatatataccacattttctttacccattcatccattgatggacacttaggttgattccatattttagctattgtgaatagtgctgcaataaacatgagagtgcatatatctctttgatatattgatttcctttcttttggatacatacccagtagtggaatttgctggatcatattgtagttctatttttagtttttggaggaaactatacaattttccatagtggctgtactaatttacattcccaccaactgtgtacaagagttcctctttctctgcatccttgccagcatctgttaattcctgtcgtcttgataggaaattttaagtgggatgaggtgatatcttgttgtggctttgatttgcatttctctgatgattggtgatgttgagcattttttcttatagctgttggccatttgtatgtcttgagaaatgtctattttgatcttttgctccccccgctttgtttttttaagagatgagttctcattatgttgcccatgctggaatcaaactgggctcaaacagtcctcctgggactgggcatagtggctgaggcctgtaatcccagcactttgggaggctgagtaggtggaccatctgaggtcaggagttcaaggccagcctggccaacatagtgaaaccctatctctactaaaactacaaaaaattagccaggcatggtggtgagcacctgtaatcccagctacttgggaggctgaggcaggagaatcacctggaccccagaggtggaagttgcagtgagctgagactgtgccactgcactccaacctgggtgacagagtgagactccatctccccaccccctccccctcccccaaaaaaaccctcctgcttcagcctcctgagtagctgggactacaggcaagcaccaccacatatggctttgcccatttttagacaggattttttgtgggtttttttcgctattgagttgtttgagctccttgttatatttattctggttattaatctcttgtcagatggatagtttgcaaatattttcttccattctgtgggttgcctcttcactttgttgattgtttcctttgctgtgcagagctttttagtttgatataatcctattagtctatttttgcttttgttgcctgtgcttttgaagtcttatacaaaaaatttttgcccagatcaatatcttggaacatttctccagtattttcttctggtagcttcatagtttcatgtgttaggtttaagtctttatccattttgatgcgatttttgtatatggtgagagatagagttgagtttcattcttcagtatagggctatccagttctccaagaatcatttattgaagagactgtcctttcctcattgaatgttcttggcacctttgtacttttggtattgacataaaatgagttggctgtaaatgcatggatttatatatgttccattggtctatgtgtctatttttatgtcagtaccatactgattgggttaccatagctttgtagtagattttgaggttgggcagtatgatgccttcagctttgtgctttttgctcaggattgctttggctctttggggtcttttgtggttccatatagattttaggattgttttttctatttctatttctgtagagcagcagtccctaatctttttggcaccagggaccgcttttatggaagacaatttttccgtggacgcggggggatttttttttttaatggtatgaaccatatttattgaaaacattatttctggcctttctcaaattgaagactgcaaaaaataaaagcagtgctttattgagttgtcattaaccttgagagcagtggcgctgcctctccacgctctggggacggtggaaaccgtggctggtgcgtgccacatctatcacacctcggtctacaaaacagtcctgacgtcaaataaaactattgtggccgggcgcggtggctcacgtctgtaatcccagcactttgggatgccgaggcgggcggatcacgaggtcaaggaaatcgagaccatcctggctaacacggtgaaaactcgtctctactaaaaatacaaaaacaaaattagccaggcatggtggcgggtgcctgtagtcccagctactctggaggctgaggcaggagaatggcgtgaacccgggaggcggagcttgcagtgagcgtagatcgcgccactgcactgcagcctgggcgacagagcgagactcagtctcaaacaaaaacaaaaacaaaacaaaacaaaacaaaaaaaacaaacgctcgtacatgacatttacattagaaaaagagagctgaaagtagggatggggggatggtttggggatgaaactgttccacctcagatcatcaggcatcagattcttgtaaggtacgcagcgccgtagaaccctcgcatgtgcagttcacaatagggttccagcctctgtaagaatctgatgccaccactaatctgataggaagtgagctcaggcggttattctcacttgcccaccgctcgcctcctgctgtgcgtcctggtttctgatgggtactggtccatagcccgggggttggggatccttgctctatctagagaatgccatttgtattttgatggggattggactgaatctgtaaattgctttaggtagtgttgtcttttttctttctttcttttttttttttttgagacggagtctcgctctgttgcccaggctagaggctggagtgcagtggctggatctccgctcactgcaagctctgcctcgcgggttcatgccattctgctgcctcagccttccgagtacctgggactacaggcgcccgctaccacgcctggctaatttttttgtatttttaggagagacggggtttcaccgtgttagccaggaaggtctcgatctcctgacctcgtgatctgcccgcctaattcttctaatccataagcgtggaatatctttcctttttgtgtgtgtgtcctctttcatcagtattgtatagttttccttgtatagatctttcatttctttagttaaattgattcctacgtagtttatattctttgtagctgttgtaaatgagattgcttttttgatttctttttcagattgtttactgttggtgcatataaatgctactgatttttgtatgttgatttggtatcctgaaacttttactgaattcgtttattatttctaacagtctttttcgtggagtcttttgatttttcaatacgatgagtttttatgtcttacttttgtatcctcttctgggaattattacctgctcatgtttggcaaacttctactcttcttcaagattcagtcttgagtgctactcctgggcagtgctgtattatccaaagagtaggaaaaaatgcatgcttatgtgccagcaaagcagagccaccagttatgaggcaagaaacaaacaaaaaagaaggcttgtaggctgtgggaaaagccagaactttgtagttttgtttggttattgagacagggcttgctgtgtcacccaggctggagtgcagtggcaaggtaatagctcgctgaagcctccatctcctgggctcaagtgatctccccacctcagcctctggagtacctgggagtacaggcatacggccaccatgcccagctaacttttttttttttct

SEQ ID NO: 6957 - DNA, 53328 bp, Homo sapiens
acatgggacaattgataaaaagctaaattgtaaacagtccttgccccagaggacccatggtcttagggcagatgtttacatatatgacagtaatgtaatgtagaatgtgaagagtaccatgacagagttttggagaacaatgtgctgtagaaattcagaaaagggacagctcatttctagttggtgaaagccttcatgaaagtggcaaagttgaacctgagaggcatatttagagggcaaagattgaggtgagggcattctagccagaagtgctagggaactttaattgagcacatactctgtgccaagaactgtaccaagaactttacacatacatgactcatttaatcttcataactctgtaaggtaggtactgtcatcccgatttaccagtgtggaaaatgaggctctagagcagtgcccggtagacttttcacaacgatggaaatgctcaaatatctgcactgtccaatacagttgtgactagccacttgtggccactgagtgctgaaatgtggctaatgtgactgaggaactaaatttttgattttatttaattaattagaatttaaatttaaatagccatacctggctaatggttaccccactggatagcaggctgtagagagcttaggtagcttgtcctagtcacacagtggtaggttcaaacccaggcctgttggacctcaaaacttgaggtcttaacctcagtgttctacagtatggtaaaggcctagaggaggcttcagttctgttcctcgtatcaggcaaaacatgactgcaaaaccatagagggagtaacataacttaagcaaagattgaagatgggaagttgctggcaagaagatacagtttgaaggggagtggaaaatgtgtagaacagagtatctgatgctggtgtctgtgatttgcagctgttttttctcccctagttaaaaatgggctttgagtgagccttgaacctgtcttggactaattcagaaagcctccaagagattgcccccttagataagtccagtaaatgtagttgtctacatttttcaaaaagataaatgggaacaagtgtgctacgagattcagacatctgacgtgatgttttcgttgttgcctcagcaacagatgcggttatgaacattgacaacataagcacacgattgcagatacacataggcgtataaagcacacaaaaagaagattctctgaatggttttgtgcttatgatgtattttcaatattgagtaattatcaagatactaatttatagttatatagcattttatagttaacaaaatatttgaaatggcatatttttttcagctgtacaagaaaggtagttctattttccttttatatttgaaataggctcaaagtttgcccagggagcttaggttctttgacttatagagaattcatgatttgtttctaactcttctatttactgtaacttcaaagtggaaaatgaaccatataaatgtgtaatagaattatttctaatatatcaaaataagtaaaaataaaaatataaagcaatggcgattagaaggcagcttgtgtgtgagtgtgtctgtatgtagttattctttagtcctaagagccaagatagttgttttgttgacattgggcttgtgctgctgttacgtgggcctgagtcccctagaaggagaggcagaggaattttaaatcagagtgggtatgactaggctcctgactctgcaaactcatgtctagttgaggtgacaaaactacagtttaaggcaggttgtaatcacagctaatatggcactttgactgtgttatctctgtacctcacaaaaaccctgtatggtgggtgttcttatttgcatttcataggtgaggaaatcaagactcagagatgaaatcatctgtctagatcatagatagcaagtggcaaagctggaaatgggatccagtctctgatctttctcacaccagggcctgccctttttctatgtggtgttgcttctctaagtaccaataatatagttccaagttttttaagagagggagaagcaagtggggtttgaaggatcaggaaatatatagtacctgagctggtcatttaaaacgggtatgattttgatcaatagtatggcagagatggcactcagggcaggagagcaaagtcagagaaatttgcatacctcctttgggtgatgttgaggagagctcaggctgatagtttccattttgacttctttgtgctatttctgcagggaggtcctggccagtgaagccatccttaatgttcctgataagtctgactggaggcagtgtcagatcagcaaggaagacgaggagaccctggctcgccgcttccggaaagactttgagccctatgactttactctggatgactaaaacaaagggaagaactttttatgaactccacaggaagtagtaaagcttttttttttttttaattaaaagaattttttttgagacaaagtctcgctctgtcacccaagcaggattgcagtggcataactgtggctcactgtagcctcaacctcctgggctctagagttcctcccacctcagcctcatgagtagctgggaccacaggcgcatgctaccatgcctggcaaacttttttgattttttatagagacaggagggtctccctgtgttgcccaggctggtctgtaatgcctaggctcaagggatcctctgccttggcttcttaacctgctgggattacaagcatgagacaccattcctggcctagaagcctatttttaaagaaactacaatctcccatggggactgtttccctgcctcttttgtgcagtcccatggaacttgcctacagcaagaggcctaagattgaatctttttggggaaaagtcattctaggatgaaaatcctatgttaaggccgggcgcagtggctcacgcctgtaatcccagtactttgggaagccgaggcaggtggatcacctgaggtgaggagtttgagaccagcctggccaacatggtgaaaccccgtctttactaaagctacaaaaattagctgggcgtggtgccaggcacttgtaatcccagctactcaggaggctgaggcaggagaattgcttgagcctgggaggtggaggttgcagtgagccaagatcgctccattgcactccagcctgggtgacagtgaaactccatctcaaaaataaaagaataaaagtatgtctgtcatccagctcctatgtctgttatccagctccaagtacagcttgtgtatatcaacattttcaaaaacctttaaactaccaaatgaaatccagatgtttttccatggttgagaagtgtcttgtgttcatgttgcctgtgaccgttgaaatgaagtagtatgtgtaatagcaggggctagagctttaggcccagctgttactccaaaatcacacagggcagtttctccctgaacaacccaaagtggaaaagggatccaaggcttttgctatttttctcttaaagcattcatcttattcatagataagagcccatttagtccttcggatatttaactcctatgtgccaggcatttttctaagctccaggaccatagtcatgtcccaatatggtccctgttgtcccagagattacagtttaatggggaatagaagggacagatttaagaaaaaaaagataattctcctttggatattgttttaggtgcttgatatatctaatatgtgtctgttgtgctgctgggcagttctaaactcatcagtacctgggttggttacagggctttggggatcatcagggtataggccataggtgaaattaagatagggtaaatacagtcctgagctgaagatgattacctgagaaatatcagtatttaaggagtgcttgaaaatagtgatctaacatttacatagagaaggagcaaagagaatgctacatattaggcgcaaaaagaaaaatatttttacctttatattgggcacttatggtccagacactgtttcatttaatcttcacaaaatctctgtgaggtaggtattacctctattttactcatgaaaaaaaaactgagactcggaaaattgaagattgtggagcctggggtcaacaggcttaggctttttaaaaaacaggccaggtggctcatgcctgtgattgcagcactttgggaggctgaggcaggcagatgacctgagatcaggagtttgagaccagcctagccaacacggtgaaaccccgtctctactaaaaatgcaaaaaattagctgggcgtggttgcatgcgcctgtaatgccagctactcgggaggctgaggcagtagaattgcttgaaccctggaggtggaggttgcagtgagctgagatcacaccattgcactccagcctgggtgacaagagtgaaactccatctcaaacaataacaacaacaacaacaaaaaacaactcaaattactcatggccctgggaatgggggcatttaaaaagttaaccaagggaaccaacctggtttccacaaagatggccacttctgggtcagcccaatcatcagtatccctgggtcctcagcatcccttcctacctcttttgactgggaattacgagattacagccccacctacggaaattgagcacattagcactggccatgctgtacatacagcaaatgagagggcttcatactgttacaacaatctgtaccacaattctctgtgcggtctgcccagctctaaatgacatgtcctcagaggcatcatcatctccaagtccatggaaaccatgcacttacagaaaccagaacctcccataccacatgttactaatgacctacaacatcgacttcgtctgtatcatgcagtgctcaacattctggttgcagcatcacatttatcaataatttgattccatgctgattcctttacttggagtattgagatcccccaggtacagtgaaggtatgaccctcttaaatggaagaccaggagttgtttcccctatgctatggcaatccgccacccggaagcacttgctgcaccaacagcattcccaaagcttgcctctgcagccctgtagcacccattagaaacacttctcacaatgaactactgtgctggcaaacccataactggactgccggacagcaagctctgtgaggcatctaggaaaaaagctcgcgaaatcccgagaaacactcttcactccggaatagcgtcacattcttgagtcatttgggatgacaggggatatcctggagcaggtgtattgggaagtcagtgaacaagaaggctaattcattagtgggcctgctagcgtagtattttaacgatttcgcagcctttaaatcattggtggtctttagcgtgccggatcagctggtggtggagttggaggatagatggcagggatctgaagaaaggtgaagtgtagataggagtagagacaatatgaagtttagaaaagactaattgctggacgcggtggctcatgtctataatcccagcactctgggatgccaaggtgggaggactacttgagaccaggagttcgggaccagcctgggcaacgtagcaagaccatgtctctacaaaaaataaaaaattagccaagcgaggtggtgcgcgcctgcaatcccagctactcgggaggtgagaagatcgcttaattccgggaggtcgaggctgcagtgagccgtgatcgtgccattgcactccagcctgggcaacggagcgagaccccatcttaattaaaaagaaaaaaatacaggagagactgggctgctttgaaaagtggatttgacgggaatgtggggtttggagagatcttatgttttccaagactagaaaaacattgtggttccgttcagccctcccggaaaatacgtaggggacttaaagagcggaccgagtacctgtttgtttccccatcccttagccggcagggctctggcagcgccctgggagaacttagggaagggccttctcgcagcggttaccggaagtgacgcattcattctcgcgagaacaaagacgcgcgagcatcggcggcccggaaccggccttggaacaactgtggaacctgaggccgcttgccctcccgccccatggagcggcccccggggctgcggccgggcgcgggcgggccctgggagatgcgggagcggctgggcaccggcggcttcgggaacgtctgtctgtaccagcatcgggtgaggcggggcrtgagagggagcggcggtgggttggagcggcggtgggtttgagcgtctgtggaacacagggctgacagtgtgggatagatggttggtgggaccttgggcagtatttgggggccagtgggcttgtgtgtgtgtattagagagaaagatactatgcctgygtgtccaaagttgtatttgaggtactgggcatagatagagctgttgcggggaacttgggtatgactgtcaggctgtgaccaggtgtttagtgagtgtgacagtgcgtgtgtgtctctgtgaatgtggagtgtcagggtgtgtgaggcagatgcacgtcacagtgtgtatgtaggagcacgaatgtgtgagaagagggctgaaggggactgcctttgggaatgtgtgcgtccgtgtgtgtgtgtgtgtgtgtgtgtgtgtgtgtgygcgcgcgcgcgcgcgcttggaggccatatgatatcagtggggactggagtagacaaggaaggcttcatgatgggtccagagttaagcctttggaagcatggatgggctttggaattggggatgtattccaggtcgggacagtatgagggtgagttggtgcagagcatggcttcaaacgaaaggctatattagtagatggagatggggggcgctctagtaggtggaggacagttaacatcagactcaagaattttactttgatttaatagagaatgtttaaccattgtagtagcagttaaaaaatcatatttgggtcttgtttgtttgtttttgtttttgagacggagtctcactctgtcgcccaggctggaatgcagggcgcgatctcggctcactgcagcctcctcctcccgagttcaagcgattctcctgccacagcctcctgagtagctgggattacaggcgcccgccaccgtgcctggctaatttttttgtatttttagtagagacggggtttcaccatgttggccaggctggtctcgaactcctgacctcaggcgatccacctgtctcaggctcccaaagtgcagagattataggcgtgagccacggcaccaggcctgggacatgtattttttgatataccgataaaagctgtgaaccctttccccagaaaaatgcacagatgcacattcacacaaccatgcattgccatttgagaggttcgtgccttcctaaaggacattttaggtaaatagaccctggactaataattcctgtaatataggctttgttttgttgcctgtaaagtaagtatagtataataattacatgcatcatggatttgagagttaaataaaatagtaatgtgtgtaaagctaaatacggtacctgacccatgaaagccctcaactgttagcacctgctgctactttgttgttgttgctgctatgatcataatgctcctcattaattggccttaaggaaatgtcaagataaaaagtgttgttctaggaaaatggttttgtaaaggataaatttgagtggaacaacatatgggacaagatgaacaggtaagatcttactaaaatgcctgggcttggcttgtgaatagagaagttaattcaagaggaaaagtaataatttgttatctaaaggaacatgggtgtagtgagaaagctcgtaatttggggtgggagaaaggggagataggagtctaccttgggaaaataggcatatttagggtaattagaatgacaactgaaactgttagaactgaggaagttttgtgaaccaggtttctagatagggcataggagaaaatcttggagaaagagaatggaaggtgaaggactaaggcattaagtcctgtgatagcaggataagtagtaaatttaataattctcaccatcagagggaacataacacactaaaaaaaaaaaaaagtgggagccaagtgcttccagtggcatgttgcctgtgttacctaagcctgcctatccgcctggtcataaggaaaaaggatgcatgctggcagcttttgtgacttcttttcttggtccctgggtggggatggatgaattaatcactttttgttttattatggtaaagtatacatmacacaacatttatcactttatttttaagtgtacagttaggtggcattaagtacattgacgttgttgtacagccatmaccctatctccagaatattccgacttttttgttgttgttgtacatctataaacttcccatagaatattctttgtgaaaaggtagaatttcacagagttgatgaaatataaattaaggagttgaaggatcttacaaagtgggatttttgaaatagataacttattgctccattaacatgagcattcagggctcagtgttgttcatggttgtgcctgattctcatttccatggtggtaaaggcctgcatgggacatagatataactggtcacctgctcataacaaaaggaagattgaagggagtgagaactgtgggtaggctagcatgcagtctatcctagtttccttcttctctatgcaccaggtatcatcttatctctagcttcttttttcctctcaccctccaattcacactaccctatccaagctatgtcttgcttccccacctataatatattttttctgtcctggcccctgggctcttctctctgtattcatacacagcctttattacaactctggtttgtgtcagagattacatatgttggaaattcttttgaactctccttgtgatatcagaaacatagtgtagcctgtttagccctgactgctatttctgagctgcattattaatgttgccagaatatgatggggtctggctatttcctgtaatatgcatcagaatgggtttaatttcagtcagaattggctaaattactagtcacaggcaagagatgttaggttcattatgtagctatggaagcagaagtacactcattggtaggattttttttcttcatgtcatttgaaatgcatacattaggattggagttttttgctttaggcttggttatattaaaactttctcttgctgtttggagtccaggaagccctgaattaccttcttcattttagttatgctagaagctggggcacatattagttgtcttgattaagctctgaaaggggtttgctgaggagacaggatctttttttttctaacattatatatgagagagagttctgaaaagacctgttataaaatcagtttcaggcacttttcccttgtatgctgttgtgtgtttgaaggtcagttttaaagcatkggtgtaatagtctcatggtttatctttttaaaaagcattgcctcaagagagctgtggataaatatatttaattagtaaagctaaaaagttttgttgtcttaagttatttctttggtagcaaataaatcttcacaagaacctaattttttttttctgttgattttctattttggcaggaacttgatctcaaaatagcaattaagtcttgtcgcctagagctaagtaccaaaaacagagaacgatggtgccatgaaatccagattatgaagaagtaagtgtattccttgacttacatttccctggttctacagcccaaccagatgtcatcatggggaaagaggccaggaatccactcttctcaggatctttttgggaacatatatttttttctctcattaaatatattctatttcaaataataatatcacattaagattaagaaggtttagttaaaatcagctaggacacttacacactgttggtgggaatgtaaaattgtgcaactgttacggaaaacagtacggtgattcctaaaaaattaaaaatagaattaccatatgatccagcaattccatttctgggtatatacaaaaatgaattgaaagcagggacttaaagagtaatttgtacactcatattcataacattattattcacaatagctgaaaggtaaaagcaacccagtatctaccagcagagacatgtataaacaaaatgtggtatattcatgaaacggaatatcatgcagccttaaaaaggaatgaaactctgacacatgccacagcatggatgaatcttgtggacattatgctaaatgaaataagccagtcacaaaaagacaaatactgtgtcattccacttatgtgtggtacctagagtagtcaaactcacagtgaaagaaagtagaatggtgtttgccagagggtgaagggaccagcaaatagagaataatttttaataggtgcggagtttcagctttgcagaattaaacagttttgtgcagtatagtgatagtagcaaaacattgtgaaagtatttgatgccaggctgggcatgttggctcacactgtaattccaacactttgagaggctgaggtgggtggattgcttgagctcaggagttcgagaccagcctgggcaacatggcaaaaccccatctctacaaaaaatataaaaactagctatgtgtggtggtgcatgcccgtagtcccagttacttgggaggctgaggtgggaagattgcttgagcccaggaggtcaaggctacagtgagctgagatcataccactgtactccagcctgggtgacaagagcaagaccctgtctgaaaaaaaaggaaagcatcttgatgccactaaactgtacacttaaaaatggttaaggtggtaaattttatgctatgtgtrttttaccacaatcaaaaaactatttcatttcagttaacaaaagtcagctagggccgggcgtggtggctcacacctataatcccagcactttgggaggccaaggcggatggattacctgaggtcaggagtttgagaccagcccggtcaacatggcaaaaccccatctctactaaaaatacaaaaattagccaggtgtggtggcgggtgcctgtaatcccagctacttgggaggccgarggaggagaattgcttgaacccgggaggcggaggttgcggtaagctgagatcataccactgcactccagcctgggcgactccgtctctaaataaataaataaataataaaaaataaattaccccaacatttagtggcttaaaatagcaaacatttagtatcttatagtttctgtgacttaggaatttgggagtggcttagctgggtgattctagcttagagtctttcctgagacatctcaggatattggtcggagctgcagtaatccaaaggcttgactggggctggagtatctgcttccatgctcacttatatgaatgttggccaaaagcatcagttcttcgccatgtgggcctcttcatggggaagcttgaatgttttcatgacatggaagctagctttccccagaaagatcttttcctcagaaagagtgagtgatctragagagagagagagagagagagagtgaacgagcgagcaagatgaaaaccgaygtatcttttatgatctttacttggaagtgagactccatccttttccaccacattctgtttgttacagtgagtcactaagtacagcctacattcaaggggaggagagttaagctcttaaaaagagaagtagacatattttaaaacttccacaggtagtgtgctaagtactttacagatcattcttccagttatcacagcaatcttatatttaggtattattttgcaaatgaggaagttgaagcttatagaatcacatagctggtggttggtraagtgtggatttgaaataaatactttctgactctaatatctgtgcttaattccattttgattctcaaacttggttatgtggcagaatcaccaggaaagcttaatagtataaattatcaggtcctacatgtacatggaaattctgtttgcttctttttctttttttctttttttttttaaaagagatgtggtcttgctatgttacccaggcttgacttgaactcctgggctcaagcagtcctcccacctcagcctctggagtagctgggactataggcatgcgccaccacacccggctaatttttaattttttgtagagatgaggtctcactgtgttacccatgctgatctcgaactcctggcctcaagcaatcctcccacctcagcctcccaaattgttgggattacagttacaactacacccagcctagaacgccagatttgacttactcactgtgtgatcttgttacttagccaatttgtgcttcaattttctcctgtgtggtgaaagtattaataaatctacctataataggattattgtgacaagtaactgagttaatatatttaaaatgtttactgcttggcacttagaaatgtaatagtagtaatagtgatggtatttttatgtgtgttttcttttaaaaaattactaatttttaattatacaaatcagaaattagaatattataaataatactgatctttccccctctgttcatccacccacaattaagtagcatttcaaatccagtccctttttattggaaataattttttttattgtaatgtttttctttcttattaggttgaaccatgccaatgttgtaaaggcctgtgatgttcctgaagaattgaatattttgattcatgatgtgcctcttctagcaatggaatactgttctggaggagatctccgaaaggtagtgtggatgttttgagatgagagagagtamatcacaaactttagcaatgtttgaatcatgttaaatataataaactagaataagaatcggaaaaactatggtctgcttcctgttttgtaaatmaagttttattggaacacagccacattcatttctttacacattgtctatggctgctttcttatggctgcagaagtgagtagttttaacagagactatgtgacttgcaaaacctaaagtatttaccatatggttccttacagaaaatgttgactcctgatttagaaaatgcatttttgttgttgctgtttgatgggactatagcaatggtgttagatgaaaatttcagtggttaaggtgcttataaaaagttgttttctgtattgcaatcttttttttctacctaattttaaatgtgcccatatgaccatttttatatatatccatgagatttgtcagccttttccagtttcaaatgctttttgcctctttttacttttatgagccttatcatgaaatttacatgccctcagtatggatttggwaattttattcccttgtattttattatgacttattttctcatttgaatattcttttagagtatartaattaatgtgtggtcactattgcagcccagcaatttgcagaacagatttttagatttctttctttttttagctgctcaacaaaccagaaaattgttgtggacttaaagaaagccagatactttctttactaagtgatataggtacgtatcagtattaaaataccattgtaatgtaatgtccctttggcccataaaagatctttttgggaattcaggagaattgttgatacactatacaaagtctatagaatttcaacatctataagaagttataaaaatctattactattgatgctaaattaaaactaggatattttggctaggtgcggtggctcacgcctgtaatcccagcactttgggaggccaaggtaggcggatcacaaggtcaggagttcaagaccagcctggccaacatagtgaaaccccatctctactaaaaatacaaaaattagctgggcacaatgccgcatgcctgtagtcccagctactcgggaggctgaggcaggagaatcgcttgaacccaggagatagaggttgcagtgagccgagattgcaccactgcactccagcttggacaacagagtgagactttgtcacacacacacaaaaagaaactaggatattttattatttatttgtggctaagagtcctttttttgtctaatagatgttccaatagctgacaaaaaaatcatgtgaaatgaccttactcaatttctctccccccctaccattgacatagtaattttgtttacagtggaattacatctccttgagggatgggtcctcaagtcaactcttttttgtttgtttgttttgagacggagtctagctctgttgcccaggctggagtgcagtggtgcgatctcagcttactgtaacctctgcctcccaggttcaagcgattctcctgcctcagcctcccgagtagctgggattacaggtgcccgccatcacacctggctaatttttgtatttttaacagagacggggtttcactgtgttggccaggctggtctcaaactcctgacctcgtgatctgcccgcctcggcctcccaaagtgctgggattacaagcgtgagccaccgcacccagccaagtcaactcttcagggtgaaaaatctctgcttaatcagaatgactccagaaaaattcctaaaataaccagtacctaaccttttggaggaacctcaaaaaccaaaaatttgtttccccatagattttggttttgcctcttttccaaggtcatgagggctaaagtccaattgaaatgagtgatttaggtgggagaaagaggcttataagagtttcagggattttcccaattgcttgttgcatttctatttggtgttaattctaatgagttaaatgaacatatagtataattttgtagtatttgtttaatgttacttttttttctgtgaagaaaacctggacactgtagtattagttgtgtagttacgatgatccatataaacttgagcatcagagtagatttgtacaaaatgtgaggtgaatttttcttttaactcaatgatttctgttacttyaaagtatattttaaactttatttaggrtctgggattcgatatttgcatgaaaacaaaattatacatcgagatctaaaacctgaaaacatagttcttcaggatgttggtggaaaggtaggtgaaacctgaagtaatgtttcatgcctattgaatatagtctctctgatatagttagtccttgagctttggtgtctttgctgtatgcccataacagtcttactttttccatttcagacctcaccacactgaactgtagttttgtgtttagtttttttgtcccttctgctaaacagtggttccatcagagaaggaacagcacctgctttttttttctttttcttttttttcatttttcatacttaacccagctcctagacttcacctgtcttgttcaagtctgtttttccatcatagtatctagcaaagatacaggctgtgaatacataatatgttaacacttattattttattcttatgaagcacatccaaaacacatacatgcacatcctgggtccactttaagaaaaaaaagaaagtatatatatttttaaaacttattttccttcccccaatttaaatgagtcatctggagaagaaccagaaattgtgaattgactcttaaaatgttcatttcattggtaacttaagcagttttcttgtttccagcatccaaatttcattccaataaagacttaaaggccaagagtctgaaccttgtgttgagttgtgtgtgccgtctctttagttagtgaaaatagttgttggcctcttggaggtgttggaaccttggtgatgcctcttctcttaggaacctttcacgtatgcttggcaccaaatatctctgctttttttttttttaatccaaagacttcaggacattcctgaagttagatctaagtatttactcacatttaatctactataaggaggtatgatgcttcttcaagtttggaagtcacccttgcctttactttccrgtttaatggattgagcttattttgaatatagtaaaataaaaattaatagcccacctgtattcaatttttaccatgtaccaagcactgtgttaccttctttactttcgttatttcattggatcctaataacaattctgtgaagcagggactgttagtcatccaattagattactgagagaggttaaataacttggtagatcacatgcctagttaagtggtggcactcagacttgaaatatttttgtgttattacagagcccaaggtcctcaccactaccctgtctacagcctcgtaaggatattgttgtctttcctttttaaatttctctaccatttaatacttaatctgtcttattattttgcagataatacataaaataattgatctgggatatgccaaagatgttgatcaaggaagtctgtgtacatcttttgtgggaacactgcagtatctggtgagacctgttttgtttctttgaatttaagtgtgtataggattctcttatttctgaagatcatgaatatagtaggtcaaaaataaagtagcttttcccatacagtgttggtgtttaaagcattttctcttttgaaggccccagagctctttgagaataagccttacacagccactgttgattattggagctttgggaccatggtatttgaatgtattgctggatataggccttttttgcatcatctgcagccatttacctggtaagaaatggatgagaacttgggcatgcttaatgggaatggaaattttttcatttgtctttttttttctttctttaaktgtttaattgcctttgaaatatacaattaaatataattaaatggcaagaaatcttaatttgtgagaatcactttgtcaactgaggtagcttttgattttataggcatgagaagattaagaagaaggatccaaagtgtatatttgcatgtgaagagatgtcaggagaagttcggtttagtagccatttacctcaaccaaatagcctttgtaggtaagtatattttagttaaggaagtttgcctcagtttctccagagttgtaaaggagcaggagagtagttgtctgtttcaagttgcattatccagtagaactttytgtgatgatgtagaaaccttctatatttctgttggccacatgaggttattgactacttgacatgtagctagtttggctagagaacgaattttgaataaatagtaaatataaatagccacttgggactagtggctaccattttggacagcacaggtctggtggaaacaagaactgccatttaactgtttgacatatgtcctaagaaggctcttaggataatgaagtaaatgggttatttgcagaatggatttggactcatccrtcagarttgtcagtaactaacatatgtggagttttgagtagtttttgatggaaaaaagtttgtcccctgtcatttcatgaatttgaaagtaatttatgaaatggtacagacaagtgatgtgggaaagaaaatggacaacctgcaaaattacctttctaacagtataaagggaaattggaacataatgatttgattttcaccctattttgtatgttttctagtttartagtagaacccatggaaaactggctacasttgatgttgaattgggaccctcagcagagaggaggacctgttgaccttactttgaagcagccaagatgttttgtattaatggatcacattttgaatttgaaggttagtcttaatgggtctactgcataagaccagcattgaaagtaacaagtttatttggaaaattagcataaatacagtttaataatcttttcctgttgcttatttatttatttattttgagacagggtctcactctgtcacctaggctggagtgcagtggcatgtttttggctcactgcmacctgcgcctcccaggttcaagcgattctcttgcctcagcctcccgagtagttgggactaaaggtgtgcaccaccatgcccagctaatttttgtatttttagtagaggtagggtttcgctatgttgtccaggctggtctcgcactcctgacctcaggtgatctgcccgcctccacctcccaaagtgggattacaggcgtgagccattgcrtccagccctgatgcttatttgaaaaagaaaattatattcttagagctgattttttaaaaagtttatttagcaagctgtctcagtttgcttctctgtggtctttgttaattactcctttgaagcaacttttttatttaccttttcccatgttgttgccattatcctcgattcatttatgtctagtcatactggatttgatttggtaaggaaggttcctatctgcctttcatggctctgcacttactccttaacctatagttcattcaatatgtactacctatctcatcttctgaaaatgcttttttattcttctgcccaagaaactaacatagttctttttttttttttttttaacaagtcaagtgtaaactgatctgcttggttttttgggggggctttccctaaccaagttttgccttgtacctgcttctcttaacctttacctcatacaagaccagcttgtcactgctccttatgcctcaaacccgttatctacctttgtgctttgacagatgctatccttctgcctggdtatccatttctgtgtatcttctcacctacactggcatatctttaagagcttttctttaaatggtctctgccacaaaatttgtcatttaaaggctatattctctttctcgtcttccattcatgcatcttcatatagactgttgtcttcttcaatgttgggattgttttacttcttttattaacaatcacccaccctacccttcctaaccatggcattctgtacagagcagggcatgtatcaggttcttagtaaattatttattgatatgaatgagagctatagatagttctattatgcagtgtacccagaaacaactctcatcaatagtstttacatttgtattgattgtttgtagtatacaggtttctaaaattgaaatgagaaattataatcatgtaatgttggagtacatggcgagatagctcactttagtctgcaacccctgagctcaagtgattctcctgcttcagcctccagagtaaatgggactacaggtgtgcgccacctctcctgcctaatttttaaatttttggtagaaatggggtctcactgtgttgagcaggttggttttgaactcctggcctcaagtaatcctcctacctcgacttcccaaagtgctgagattacagatgtgggctactgtgcccgaccttggcatactttattaaatagaaacttgaggccatgtggatgtcattcttggctaacactgaaaagatacctggcttcttcttgatttggtttccttctaatgtgccaaagaataaattatccctcagtgtgttaggaaagcagggctttagttctgtgttgcctctgaaacatttcagctgtgaatgaaccacatctcgcatttgtttcatacttgtcataggaatcatagcatagtttctgctctgaagggcatctgtgagcctcttgttatagggcacggggaaagagtmcacattatggagtttatagtttacagactttaattcagtttgcagcaccactatttacctatctgtgaacctgagcaaatgtctctctatctcaaggacagtaatatcttcctcaaagcatcaatattattatgaggttatgcagaataaggtatgtataaggtactagttatagtagttcaagaagcttcaaggatgcttgttagacatgataataggactgaattttgaagaatgagagtttttagggaaagggtgagggcgggagagatttataggcagcagagcatcatgagcaaaagtacagaagcatgaactgcaaaacagcttggtgttactgtaggacattttcccaaaatgtttatatatattgtacaagaaaggaatgatgtctgtttgattttcacttaaaaaaggaagcaacaaaacagttactgaaatatttcccttttgaaaaaatagcttagcaagtctgattgtatgcatattttccaactgtttattatgaayatctttagatatgtagaagagttgaaagaagtgtactgaacctaccactaaaaataatgatgaaacagtagcatttaattattatttttttttgcctcctctttcacgcccctaaatgtaactatattctgagtctcttcttggttctctctttttccattacatttcctttcttttattaggcagcctcttcaactgtatagctttacttataaactacatatggctaactcctaaagttatttatctctgtagctgtgactcttctgccaaggacttataactgctgtataactgtataactacctggctgttccactggcacttacaacttaatttattaaaaactgaacatatttgttctatccattaaatctacttcttttttttttttttttttttttgatatggagcctcactctgtctcacgatctcaactcactgcaacctacacctcctgggttcaagtgattctcgtgcctcagcctcccgagtagctgggattacaggtgcctgccaccgtgtccagctaatttttatatttttggtagaaatggggtttcaccatgttggccaggctggtcttgacaccctgacctcaggtgatctgctcacctcggccttccaaagtgctgggattacaggcatgagccactgcacctggcccattaaatctacctctatagatttcctacacttcttatttgcactgtcacctttccagttacccaggtgggaaactttggatgtgttgactcttcctttctcttcaatcgatatatccaattattttatcaaatttatcttttgaatatcttaacaattttgagcttgccaggttctcaatttagaaaggcttgcatagttttctttcacttattgaataaagtccagascctttcattggtactcaaaacctatcttggtttcatatcaacttacactcctggacttatctcttactaatgccctgagaggccatcattttaggtacatttgaactggattaattgtattctctgattatgcccatccctttctacttttctgcttctgctcaccttgttttctgcctaaaggaactcttttcagtcttttcccatttcagtctttcatttcaaagtttagctcaagtagtgcctcctttatgaagtgcctgcttcctactgccaagtgtatgatactttacactgattataacacctatcacattttgcctggtaccttagttctcttagtatatcttaatatcttctgtttgactataactgtatggaaggcaaggatcataaggtactcagtttgtatacccactactaccaccacaacacacttaatagtatgtaccaatagtatgtacctaccaatagtaggtactcattaaatattatagtgagcaaaaagataaatttaggttgtatttcctcttctttcttttgcttccttctggcctggagctttggtagtgagatgccatgatgacatactctaatatcctgtgtaaaagtagatgtccattataggattttctattgctataagtggcagctgtcatagtgtgaaatctgcctaaattgggaaggcatggaaagtctcargtagtataattgtattgcaaatccgtatcagttttgaagatttccctactccccttttaaacataaagatttatattaaagaaaagtctcttaataagagaaatactggcaattgtgttatgacatttggaattcacatgaaaaggatcagcttcaggttataaaaacagtttggtatttcttttttaaaattttgttgatacaggtgtggtggctcatgcctgtaatcccagcactttgggaggtggaggcaggcagatcacttgaggtctggagttcgagaccagcctggccaacatggtgaaaccccatctctactaagaatacaaaaattagccagggatggtggtgcatgcctgtagtcccagctacacgggaggctgaggcagaagagttgcttgaacctgggaggtggaggctgcattgaaccaagatcgcaccactgcactccagcctgggtgacagagagagactctgtctcaaaaacaaacaaacaaaattgttaatacgcttttaatttttttttttttttttgagataagagtcttgttctatcacccaggctagagtaccatggtgcaatctccactcactgcaactttcacctcccagactcaagtgattctctcgtgcctcagcctcccgcgtagttggaattacaggtgtgcgccatcatggccaactaattttttgtgtgtttttagtagagacagggttttgccatgttggccaggatgttctcaaactcctgtcctcaagtgatctacctgtcttggcctcccaaagggctgggattacaggtgtgagccaccgcgcccagcctaattttttaaattgacaaataattatacaaattaatggggtaaatagtgatgtttcaatacatgcactgtgtagtgatcagattagggtaattagcatatccatcagctaaaacataatttctctgtgttgggaatattcagtatccctttcttttttctttttttttctttttcttctttctttttttttttttttgagacaaagtctcactctgtcgcctggagtgcagtggcgcgatcttggctcactgcagccttgatctcccaggttcaggcgattctcctgcctcagccttctgagtagctgggattataggcgttgtgccaccaagcccagctaatttttgtgtttttagtagagacaaggtttcaccatgttggccaggctggtcttgaactcctgaccttaagtgatctacttgtcttgtaatcccaaagtgctgggattacaggcgtgagccaccacgcccagcctcagtttagtatttctgtagcaccacttatttgggcatctgtgttaggatttgtaagtggaaataatagtgggccttcaaactaaaaagtgtacagtagaaaaaataatcaacaaaacgaaaaagcaacccaacccatggattgggaaaagatatttgcataccatacatccaataagaaattaatatcctaaatttataagaaactcatgcaactcaataccaaaaatgtaaataacccaatttaaaaatgtgcaaaggacctgaattagacacttctcaaaagaagaaattcagatggtcaacaaacatatgaaaaggtgctcaacaactcttagcatcagggcgatgcaaatcaaaaccacactaagatatcaccccccacctgttgggatggctattatccaaaagaaaaaagataagcgttagtgaggatgtgggagaaaagaaatcccttgtacactgttggtgggaatgtaaattattacagctattgtgggaaacagtacaaaggttcctcaaaattaaaaatagaactactggccgggcatggtggctcatgcctgtaatcccagcactttgggaggttgagacaggtggatcacatgaggccaggagttcgagaccagactgggcaacatgcagaaaccccatctcaactaaaattacaaaaattagctgggcatggtggtgcacatctgtaatcccagctactccgtaggctgaggcaggataattgcttgaattcaggaggtggaagttgtagtgagctgagagatcatgccactgcacatcagcctgcgtgacacagcaagactctgtctcaaaagaaaaaaaaaaaaaatagaactgtaagattcaacaatgtcatttcttggtatatatccaaaggattttaaagcaggcttgtgaagagatatttgcactcccatgttcattgcagcattattcacaatagtcaagatctggaaatagcctaaatgtcctttgacagatgaatggatagggaaaaagtggtatatatacacagtggaatagtattcaaccttaagaaaaagaaggaaattctgccatttaggacaatgtggatgaacctggaggacatgttaagtaaaataagcaagtcacagaaagagaaatactgcgtgatctcacttacatgtggaatctataatagttaaatttaatagaagcagaccatagcatcatagttgccaggggctgcagggatgcgggtgcgggggtgtatgtagagatgtttatcaaaaggtccaaaaattacggcagcaaaagaaaaaaaaggtacaaaaatgacaactatgaagaggtgacagatatattaattagctgaaatgtgataatttcacaacgtatatcaaaacatcaagttgtataactcaaatatataacatttttatatgtcaaattaaattgtcacaaaataaaatatgtaaaagataaagcaataaatcaggagagggggctatgatagatgaaacaagataggctctatgtaaatgatggttgaaactaggtgaggcattcacagggttgggagggggcttattgtactgttgtctatagttttgtgtctttgaaaacatcaattcagatttgtgttttaaagggaaaaaaataatagtggacttggattaatgccttacctttgtagtaaggattttcagcagagagaattttaatcatttgcatatactagtcaatgtaaggcatggagaatgtaggcattaatttcgtatggcttttctaaggatactggaaggaagagaatttaaaatcatgttcttttcaaaagactgaagtccaactctgtggctgtccgcgctgacaggtggggacagagccccacctgactcagcctcacactcacttggcatgtatcaggctacttttactggggctttaggtgagagtgataaaacggttcttacttgatttggggcccttaagcaggttgctgctctgggattaggttgtcttataaaaaggtaactcaccacscataacaatgctttttcctgtttaaagagagacctagttcttctatcagatgatttcttaaggcagcatgaagtagccagacacaaaaagagttaagatccaagctctaccagttattagctgtgtgatccctaacaagttatttaacttagaactctggtttctttctctgtttaaaatggagattaaaagatctaattattggggatgttatgtgaaagtggtttatgcctgtggttgtcttctgttaggcacttcatgaattggaatgtttccttttcggtctatgataatgtttttttcaaaataaataacttaggccgggcgcggtggctcacgcctgtaatcccagcactttgggaggccgaggcgggcggatcacgaggtcaggagatcgagaccatcccggctaaaacggtgaaaccccgtctctactaaaaatacaaaaaattagccgggcgtagtggcgggcgcctgtagtcccagctacttgggaggctgaggcaggagaatggcgtgaacccgggaggcggagcttgcagtgagccgagatcccgccactgcactccagcctgggcgacagagcgagactccgtctcaaaaaaaaaaaaaaaaaataaataaataaataaataaataaataaataaataacttgttcttttaaattgggatttttcttaattttgaaaatttcttaactttgaaattttattgttggaactaacatctattgtagaaaaggaaattgttcagttttcagaatgtcattttataattataaaaggagatctcactttggagaatgagtgagccttgtttaatgtagaaataatgccttttgcccatattcaccttttagtatctggcagcgaatcttttatgtaacaaataatcaataactttacctttttttcttatttatacagatagtacacatcctaaatatgacttctgcaaagataatttcttttctgttaccacctgatgaaagtcttcattcactacagtctcgtattgagcgtgaaactggaataaatactggttctcaagaacttctttcagagacaggaatttctctggatcctcggaaaccagcctctcaatgtgttctagatggagttgtaagaaaattaattataatatccctagagtatgtgaaatctagagggattgcgtgccctgcaatttttatgcatacttggaattccttgggaggccgcacattttgttttggttttgtccttctcccaactcttatcattgctttgcaaggtgaacaggatagaaatgaaacatttgttgttttgaactttgcaagactttttctttggtgccagttttctgctcctgttcccagaccaaactgagggtcaggctgcttactctcgcggcccaataacgagatgcagatgaattgggagagatgggagtttttatttctgtaaccagttacaggtagaaggcctggaaattaccgccagaccaactcaaaattacaaagtttttccgtagtttrtttatcttctaagctatatgtctatgtgtaagtttgcattcatctaaagacataagtgattaacttcttttaatctgtagctgaggtctgagtcttgaagacattcctctggagcctcagtaaatttacttactctaaatgggtccaggtgctggggtgattacccttatcttgtctcctattaaatcacagaggtttaaggagttccttcagacccccaataaacttgtttgtggaggcctggggtttcttcagacccccaataaaacttatttaattctgaacgggtcctgttaagaattcctttgttattttgcttttaggcctgggaaaggcctgggcagaactcttggtaggctttggctacatttcagcctttgtgtaagggcactggctcttccagttttttttttttttagacagtcttgctctgttgcccaggctgaagtgcaatggcacaatctcagctcactgcaacctccgcctcctgggttcaagtgattctccctgccacagcctcccaagtagctgggattataggtgcccaccaccatgcctagctaattttttgtatctttagtagagacggggttttgccactcctgaccgacctcaggcgatctgcctacctcggcctcctgaagtgttgggattacaggcgtgagccactgcacccggccactctttcagcttttaatatttaacttcaccactcagtcgtgctgaaacagttgttatttaggcctgcattagtgagacctggcctgccacactcccagttaatattccttcttggcttggtgcagtggcccatgcctgtaatcccgggactttgggaacccaaggtgggtggattgctgagttcaagagttcgagacctgcctgagcaacatgttgaagccctgtctctacaaaaactacaaaaattagcggggtttggtggtgcacccctgtagtcctagctacttgggagattgaggtgggagaatcacttgagcccagggaggttgaggctgcaatgagccatgatcacgccgctgcactccagcatgggtgacagagcaagaccctgtctcaaaaaaaaaaatttctttttgtatttgaagcccagtactctgaaactactgtgagaacagcagtctcataggtcctgccaaaggataaatgggtggtaaaatatgactgtggtcatgactttttcccccatttttctttttatgactttattgaggcatattatcatgttagttcccatttaaggtgtacaatatagtgattttttatttcttttttattaacttgtcactgacttgatgctcaattacagtgatttttttttaaagtaaatttaccaaattttgcagctgtcaccataaatcagcttaaaaacatttccattaacagtccattaactgttaatctccattctgtccaccccaggaaaccaggaatctattttttatctccacaagtttgccttttctgaacattccatataaatggaattatgtaatatatagtcttgtgtctgactttttttacttgcyttgtatttttgaagcccgtgcatgttgtagcatgtatcagtacttcattcgttttgattaccgattagttttttcactgtatatatctttttgcatttgttctttgggttttggtgattgttcactttagcccatacaaaagtttgggtcttttttcctcaacaaaagtttggactctgttatctgtaagagatatgstaatacacattgattttgttcatttgcatttcaaagtaggaaatctggtgcataagtatttagaaaacctaggattttcaaagatccttgaacaggattttaactgtttgtttctttttcagagaggctgtgatagctatatggtttatttgtttgataaaagtaaaactgtatatgaagggccatttgcttccagaagtttatctgattgtgtaaattatattggtaagtccagtccatttagtggctgagctttaaacatgaattaatataactttgactctcagtatgattagtagaaatggacttttggtgttgtgttctgtatctcatacttgaagtttctatatggagttatatgagaactctgaaaaatggatttatatartttggaaggtgaaaaggtagatattaaatctccatgagatcattcaagagaagatttactttcttgaggatagggctctcacaggagaatgaaacttcactattagttgaacctgctttttaattgtctcttcatagtctaagcatgttcaagtatttatttcatttttcctgtgaatactgcttgatgttcaaatgttttaatttatcctgtgaaaattattcttttcttttgaacaagttaagtgtttgatcactgtatatctgtccaaataaagtaaagcacaaaattgtaaaatcaagaacaaaattgagcagaggggctaaaatgtatgtaatcttacttttttaaaagtctttttattagttttcttttgaatttttcttttaaattgaggcagtttacatagagtgaaattcacagatcatatagtttgataacttttgacaaatttagatacttgtgtaatccacaccacagtcatcatgtagaacatttctttcaccttagaaagttccctcatgtctcttttcagtcaactccccttgccccagactttattactattttactaatggactttttttttttaagaatggttttagatttgccaaaaaattgggcagatagtacagagttctcatataactcccctcactcacgcatgtagtttttcctattgttaacattttacctgggaggcggaggttgcagtgagccaatgtcacaccactgcacttcagcctgggcaacagagtgagacctttctcaaaaaaataaataaaaaacataaaatatttaaaaatattaaaaagtaaaaaaaaatctattttacattagtatgatgtatttgttacatttaatgaacccatttattattaattgaagcccatactttattcacatttccttcatttttacctaatatcctttttctgttctaagatctcatcttagaacacattacatttggttgtcatgtctctttagctcctctttgctgtgacattttgtcagacttcaaatagtccttgtttttgatgaccttgacaatgacctgaggaatactagtcaagtattttgtaagatgtccctctgctgaaatttgtctttttgtttttgtttttgttttgtttttgagatggagtttcactcttgtcgcccaggctggagtgcaatggcacaatcttggctcactgcaacccccacctcccgggtacaagcgattctcctgtctcagtctcccgagtagctgggattataggygcacaccaccacgcccagctaatttttgcatttttagtagagacagggtttcaccgtgttggccaggctgctcttgaactcctgacctcaagggatctgcccgccttggcttcccaaagtgctgggattacaggcgtgagccatcacacctggctcttgtgtgtattcttaaacctggattgttggtccagaatatgaaatttattattcagaggtaggaaagactcagaggagatgggacttgatttagaacttgaaagaaataatttggattagcagagagaaaaagagtattccaggttgcagaaaagcaagcaaaaaagacagatacaggaataatctcaagctctgtgagtgtagcgattgtgtcatttttatttccccccttgtatgtggagcggggcttaagtattgcaggtgctctgtaaatgtatattgaactgaattaaatggaaacaagtggttcttttagcatcagtttctagcatctatgggaatcctgtttgtgtggacaggaaatcacaaagaatgataaatcaactctaaaatcctcaaaagtaactaacctcccttgccctttttctcatcttcttgtatatagtacaggacagcaaaatacagcttccaattatacagctgcgtaaagtgtgggctgaagcagtgcactatgtgtctggactaaaagaagactatagcaggctctttcagggrcaaagggcagcaatgtaagtggattctgttgtttataagcacaatgcaatgtgcatcatatactcaagaattaatcttgccggttttcactaatcaatattgcatgtaatagtaacatactgggccaatttgaagtgtaatgttctgataaacttgtagaattcttactaatggactgagaccattctattgtaatggcttgagggtaataattcccatacggtcctagtataaaaagattgtttatcacaaaatattataggcaggaagtctttagagatcagattctagagctcagttatttctcatagattgataatagaaacttaggctttggccttgtggcagtttatgtttttacattattgttcaatgtttctgaatgctgataatatcttttttctttttcttttttttcttgctgtggtttaggttaagtcttcttagatataatgctaacttaacaaaaatgaagaacactttgatctcagcatcacaacaactgaaagctaaattggagttttttcacaaaagyattcagcttgacttggagagatacagcgagcagatgacgtatggratatgtaagtgtctgtgtaatgtatttgaaaggagcatctggtttcttgaagccatctgttattttgccttcttaactcagccagttgttttacttaccttcacattagaacaagagacaggacaacttaaattaacataaaccatgtttgttttgaatgttacctctttttttaaatttgcttagttgagcaatttagcttcacaattgggctaaaattatttagctctaaaaaaatacaggtgcgatttaataatcttgaatttcaaacctgattttaaaataaatacaaaatctggacttcttagccagtgctgtggactgaatgtatcccccccaaaatacatatgttgaaattctgaccctgaaggtgaaggtgttggtaggtggagcctttgggaagtgattaggtcatgagagtagagccttcctgtttgggattaatgctcttacaaaagagacctgaatgagatccctcatcccttctgcatgtgaggacagagcaagaagatggtcatctaggaaccagaaagcaggccctcaaatctrccttgttcttggacttcccagcctccagaactataagaaataaatttctgttgtttttatggcacttagtctatggtattttgttatagtagtccaaatggactaagacaaccaggggagtcttaaactgcttacttttctgtaaataatgacacaaatattctaaggctatgtttttttcaaaccatctactgtggagtcctactattttttagtgtacacagtctccaaattttccatatttgactccaagcttatctccttcagatgtactaaggaagtgtaaaaaaacagagttaaaatatgagtaaattgaaggagtcatactaccagcatttctgttttcttttataaaacaaatcctttttaggaaacaaatacttgtttcctaaaaacatatacttgtcctgagcaaactmtgtgtatctcagagtaaacaatcaatagtgtccagttgggtgaatgaatttactctccagaactggttttattaatattattgatattttatttctatttatatattattgatattttatttctatttgtatattattgacattctggtgagtgataaaacattataattatttcattaaaatatcttagacttgtcaaaggcttattatacaattgttaaagaaaaatgaggtagatctatatgtgcttttattaaaagatcacctaagtctttagttgacagttttaaattgtgggaaaaaataaagagtatacagatgttttcacttgtgagggagcaggctatgtgtctatgtaacagataatcatagtaaggtcccttgaggtggatggtagaggggtagaagagagagtcttttctgtttatatccttttatagtatttaatttttaaaaatcatattcaagtattaaatttcttttctggccaggtggtgactcacgcctgtaatcccaacactttgggaggccaaagcaggtggatcccttgagctcaggaattcaagactaacctgggcaacatggggtagaacgccatctctacaaaaaatgtaaaaattagccgggcatggtggtgcacacctcagctattcaggaggctaaggtgggaggatcgcttgagccctggagatagaggttgcggtgagctgagatcatgccactgcactccagcctgggtgacagagtgagactctacctcaaaaaaaaawtttttttgttgttttttcctttatccacccatctgcacactggtataaatatatatatttttaagaaaaaagtcatctgtattcatttcctaagggttccataacaaaatcccataaactgagtggcttaagcaatggaaacttactgtctcacagccctggaggctaaaagtccaaaattgaggtgttggcagggccatgttttctctgaaatctgtagagaagaatctttccttgtttctctctagcttcttatggtctgctagccatcattggcattccttggcttacagctgcagcacctcaatctgtctccattgtcacagagcattctcccctgtgtatctgtatcctgtgtctcttctaagtacactggtcgtactggactaagggcccagaccattccagtatgagtattaatttatctgattacttctgtaatgaccttatttccaaataggtcacattctgaggtattaggggttaggaattccacatatcttttgggggaccacaattcaactcataacacatctttgatgttgatatggcaaggaggcaggcagccagtaattaaagatatggctatttctgagataaccaatttagacttttcttttagcttcagaaaaaatgctaaaagcatggaaagaaatggaagaaaaggccatccactatgctgaggtaaaatcattgacgtcattctgtatacttattaattcttgatgtctccattagaaactatctttggttttgatatataaagagcatttttcatgtcattcctgaaattcagacaaaattctagtagatgctttgtatataaagagggatgtatcatagtgattaaaaacaagggctttgggaaaattacctagtgcctcactgagcttcagtttcctttatttatttattttttgaaacagggtctcactctgttgcccaggttggagtgtagtggcatgatcaaagctcactgcagcctcgacttcccaggctcaagcagtcctcccatcttagcctcctgtgtagctgggacaagaggtgcaccaccatgcctggctaacttttacattttttgtagagacggggtctcactatgttgtccaggcttgtatcaaactcctgggcttaagcaatcctcccacctcagcctcccatagagctgggattataggcatgagccaccacatccagctagtttccatattatagggacaatttcttttctagtagggttatgaagattaaatgggagtcagtaatggtagttgtcactattatttttgtgactggtttagataggatggctgcacatcctggtttacctgggactgtcccagtttatacttaatgtcttgccataattatcagtagtagtccctttcactctcaaaattatgccggtttggacaataaattatatggtgtccctaggtatagctcattctctaggtggcagattttttccccttatcctgtacatttgtccacggtcctaagttattacactccttaatgtcagtacttaccctgaggatgtgggtggggatacccatggtrtcctggggtgggaaatccaagttctttatctttttgtgtccctattcaaggtagtggggaccagggggcagtcaaaatcatagagccaagatacaagtaataccaatggttttggtggtcctttttctttcttgttagttgatacctgttgtagctttttgcttctccggaggtaaaagcaaatactagtagtttactgttgtcaggagagaaaagagagaagactaagactaagtatgttcttatgtgaaagattaagtgtcagaatctgaagaatagaaaggctttaacaaaatcagtgtttcgtattatattatttagttctctaatgaagcagcaagtcattctgtatccttaagatctgaattttgtttcctatgatgtagtggtaagcctttcatttcctttgtattttcatcatattttaggttggtgtcattggatacctggaggatcagattatgtctttgcatgctgaaatcatggagctacagaagagcccctatggaagacgtcagggagacttgatggaatctctgtaaggatgcacttgtgttgttggtcttgacatctgtaatattttgtattctttctgcttacatctggcaaattaaacctctagtggttcttttctatagttttcctttccccaaatatattggcattatatttaaaatggaagctttttctcagtcacaggaaacttcggaaataattctttgggttggccttttttggtttttaataaaagcatttatttcataggagtgttaagaattttccaagtataactaagttacaaactatttccctactcattatayctctggtccaaggtattgactcttaaatgccctaaaacttgaaattttttctgaattaaagttctggattaaaaacttcagatattttctcgaattataggtcataatttttgtctttttaagtgtctgtggtgcagagatgtccccatgatagatcagaatagatatgaactatattaaactttgcattttaagaacttgtatagttcttattactcaatacaatgctctgtgaaatacttgttggcaatatgaacttgctttaaaatgggttcattattcaaataaaatattgtttcaagttgtagattaytgaagtcattaaattaccttcacttatcagagcgtgttttctcttttatagggaacagcgtgccattgatctatataagcagttaaaacacagaccttcaggtaagacacttctaccacagtgcttgaaggcattttaggtaactatcactagcctaacaaatgtgggggatctaatatttttaagttaaaaattttcttaaagctgcagaataaattccagttttggtattgccattgagacatggtataataagctttaagattgtgagaatttaggagatgataaagagaaagtaacagagaacgtgaggtagaaaaattttagaaggggacgtgaaaagaaagaatggaagacagaaaaaaggaactcagagaggaaaaagcagcaagaaaatgtttagaaagatggaaaaaataagtgttgcttaagattagagaggttgggccagttgtggtggctcatgcctgtaatcccagcactttgggaggccaaggtgggtggatcacctgaggtcaggagttcaaaaccagcttggccaacatggtgaaaccccatctctactaaaaatagaaaagttagctgggcatgttggcatgtgcctgtaatcccagctacttgggaggatgaggcaggagaatcgcttgaacctgggaagaggaggttgcagtgagccaagatcacaccactgcactccagcctgggtgacagagcgagattctgtctcaaaacaaaacaaaaaaatattatagaggttggaaagaatttgaggcagtgggttcaggtatggaatggttagagggaaggcctgtgctgttctaggccaaagcagattgctttgaaaataatgccttcatctgcactggtcactgatgacttgttttgttggcaaaataattccagttgaacatctgctaaatactgagcaaggtctgctggaaagagtactggatggggaatcagaggcttgaattctagattgagtaatttactgaccgttacctcaggcaaatctgcgtttcccatttcctycttctgcaaaatggggttgaaacctarctttcctactcagtgagtatattgtgacagtgtatttaagaggatgtttgtgaaaatgctttgaaaactataaactattatgtacttgcaagatattatcatttagttaaaaatttgttttgaagggtaacagaagaaataaagtctgtgccctaatgtgcattatacttaaatgcatgttaaaaaaagatatacttttacactttaaaatttgtagacacatagcaacacatgcaaattaatayacatgtgaaattgtatttcatatactattttcacatttaaaaaataacattatctcctcttatactgcttttattttactgaaatgtattcagtttagtctgaccagcagttctcaaaatgtggcatatggacctgtgagaatccttgaaactttgtcagagagtctgtgaggttagaaccattttcataataagatgttatttgcatttttcaccatgttgacattttcattgatggtgcaacataaaatggctttcaccttagtatgaatcaaggcactagcgccaaactrtgctagtagccgttatattttttaccaccatgcagtcacagtttttaaaaaatgacagtttcacttacaaatgtccttgataaagcagtaaaaatattattttatttaaatctcaacgcttgagtatgggtttttaatattttgtgtgatgaaatgggaagtactcataaagtgtttcttctatacagtgaagtatgatggttgtcttaaggaaaaccacttcagtaattgtttacgttgctagttgtctggcctctttcagggaagataccatttttacttggaagagcaactgtcaggcaaactatgattattcagatttgcatacgtgagataatttctaagaaattaaatgaaaataaaaagtatagcacacttattactttaagggaaaaaagcagtatttgttgtcaatgataaaattccatgtttcaagcaaaaagaattttagaaaacttgtatttaccagctggaatgacagcttctcagtacttaaaaacttttctgatgagattagtggtgatatcagaaaggtttgcaaaaatgtaaaacagtgcaagtgttctcactcaaatttttttgttttagaaaatatcgttttttggtttttgtttttagaggtgggctcttgctatgttgaccaggctggccttggactccctgggttcaagtgatccttccacttcaggcttccaagtatctcaagtagcagtaaccagtgaaaggaggtggctctcgtagatatgagtatactgtgtagacacatgtatgtatagcacttagcatgtctgaggaaatgcagtatgactggagtgtagagtttcaggagagagaaaacctaaatataggagagagagaaaacstaaatataggtttttttgtttgtttttaataaaaacatgttaatgggcaataggtttgttatttttaaatgaattaagacacgagtatttttaaatttctgtttaattcctgaaaaaccctttggggttctcaagaattttctagtgtaaaggkgtcctgagaccaaaaagtttgagaactgcttatctagactattctcagaagcttggctgctcaggaaagaagagaggtgggtgagtagctaaaagttgatgtagagtcaagggaggtcacttctcagaaggaagacttaaacatgaggtgccacatgatgatgttttggttaacaacaaattgtgtatactatggtagtcccataagattatactactrtatttttactatgtattttctatgtttacatgcacaaatacttaccattgtgttacagttgcctacagtattcagtacagtcacttgctgaacaggtatgtagcctattgtcaaaaggctataccatacagcttaagtgtatagcaggctgtaccatcagggtttgtataagtattcacacagtgacgaaagtgcccaatgatgcacttctcagaacatatgctcagggccaaaaaagcctgtggagagggaggtccctgaacaagttgagagattggctccaaagaacagtaggagggattagccttgatactattgatattggaaagagaatgagtgtggatacagatacttttttgggagtagaggttggaagatcagggtcttactgccttatggcctcttatcctgcagtggtaagtgaggttaactgaaatggaagaggtgacgacctcatagatttgaatagagtgctaaagacttctaaaagccactgtgtgcagtggaagatgttgttgacccaaaacattcattaagaatccaggccaggtggctcatacctgtgatactagcgctttgggaggctgagacaggaggatcgtttgaggccaacagtttgagaccagtctgggcaacatagtgagaccctgtctctacaaaaaaataaatcaataaaatttttaaaaagctgggtgtggtagtgtatgcctgtagtcccagctactcaggaggctgaagtagcaggatcgcttgaggcccaggaggtcgaggctgcagtgagccaagattacactactgcacttcagcctgggttgacagagcaagactttcttaaaaaaaaaaaaaaaaaaaacccagagcagaaatgaaaaacctgtgaattagcagtgacaaatagtgaacagtaatattaattttttgttgataatttagtagcttggatacaggaactgatagagcagatggttggattaatccaaggttaggattttgctgatggaataagaggataaaaaggttgaagatgttaacaaatagtgatttaagtgatagaagttgtagctagagtaaaatattaaaatctaagatttcaaatrgagcaagtccaattctttttctttaatcaatatttctgggccaggcgtcgtggcacatgcctgtaatcccagccactttggaggctgaggcaggagaattgcttgaaccagggaggcagaggttgcagtgaaccaagactgtgccactgcactctagcctgggtgacagagctagactccatttcaaaaaaaaaattctgactcccagttttctggctaatgaatcagataccacagatacacagtgatagcatttgtttaggttatattttttaaaactttgaggyagccctgtcaacataccatgaagctcagaaataaactgctacccaggtagcttctttgagtgtcaccttgagtgacaaactgtaacaagattgtgtctgtcattggggcctattatataatcacacttgatttgtggcctctattgtcttttctagcttagagttgacttgaatctcttgttcatctgaaatggttaaaaccagctttcttcattatcctggagaaggctaaagttctgagggctttcactgtcttaaggagctagttatatgagaaagctcttggcttggtccatggtatttaggaaggaatgctgtttggagaagaacctttttggagccttgcatttgattgttggtgaggaggagacaacagagatgtgtggggaataaagttgggctatgggggaagtatttggagtgatagataacaaaggacacaacgttttttaaacctcctttgatgctcatcatttcctttttggtaaaatgggggtaacaaaagtagtcttctcacatgactgctgtgaggattaaatgggaaaattataagcagagagtagcaaatattattattattgcatttaggcttaattattgtccaaagaawataccagcatgatgcataagcaactttcaactcctttagccattttctgaaatataacaattaatgatttttttttaaaatcgaggtcacattttaaactgtagaacccattgtgaccaacagccatcccatttgagggtatctggctgctgccagttggctttaagatgtcatactgccctcaaatggaactttcaggatgtctacaggtccctttactagttggtttcaatgagcttttttcaaagtttttctgggttgtaaacagacggataaacatgaaattccaagcaacctagttcaagggcctccttcctttaggtaatgaaagtttgatgaattgtcctactgtttctaaatatgtggttartcatccaagaaaaattgttcccttggccagaggctgcatttgtgtctagggcttgggttagtatgggttaaagatagccaagactattgttctcaagcacaggcaactaaggtctcttactgataaatttatatatacattatacacctgcaaactttattttttatatataactagattttatttataggtaatctttatatcttttatcttaacccaatttttaatttaaatggagatgtttattaattaaaattagtttcagagtttcagggatttttgagraattttttgttyggaggctgatatgttacagaagaaaggttatatccactgactgatgtcttttatagatcactcctacagtgacagcacagagatggtgaaaatcattgtgcacactgtgcagagtcaggaccgtgtgctcaaggagctgtttggtcatttgaggtaggaaaattgcttcatttcctactgaaaaaccaggatacgtttatcttgttcctctcaaagtacaaaagccctctttggtaaagtatacttacccaggaagaattctgaaggtaccttgggtagcttggccatagctatctgcatttatgtgtccttttgtatgcattactttggagataagtcattaaatctgatgctgattgtggttcatttcctcmgctgggttttgggaatatggtgtacagtcttggggcatgtgaaagtgtctgacactgatttaatctctccagcaagttgttgggctgtaagcagaagattattgatctactccctaaggtggaagtggccctcagtaatatcaaagaagctgacaatactgtcatgttcatgcagggaaaaaggcagaaagaaatatggcatctccttaaaattgcctgtgtaagtaattattaatgaattatttaatgtgacatkgagttgctattattccttgcaaaggggatttttatcagcatgaggtgggccctcttgaagacatgtatattttgcattgggatgacatccatgttccttgcttggtgtccagactagcaattgagatgcaggacttattatcatctctcctttccaatttctctgttgttatactcctcttagcccttgactactgtggtattccaacctaacttggggatagatgtacctgcctagataatgaaattgaccatctattcaactgggttttttttttctttcttcaactaaaatggtataagatgagtggatatatttggttttagtcaatgaagaaagggtccaaggacaggttactaatggtgtgtaaaggtgggaayagttttgtactgaaatactctggttgtgcatataagtagtaacrgaaatgtaagtcttaggaatatgataagaaattgtgtgaatcaacagagatgcttgcctgtaatcttttgatgtttttttcttttccttcagacacagagttctgcccggtcccttgtaggatccagtctagaaggtgcagtaacccctcagacatcagcatggctgcccccgacttcagcagaacatgatcattctctgtcatgtgtggtaactcctcaagatgggtgggtttactttgtaacaatagatagctgtgttttcatagcagtggtataggaatgaggcagtagttgttaaggtagtcttctgtgccttcagaccagggttgagtcctgactatccctttgtaataatcttaggcaacttacttgacttttttgatgttcatatttcctcacctgtaaaacaggaatgtctcatagaactgctgtggaaatttgattagacaatgtatataaagtgcttgggaaataaatgttcagcaaatgttgcgtattattagctcaaatgttgcttattattagctaagtccaagttctaagtcctttcttttattggcttattactttcttttactcaaaccttactccttcattaacagtttatgagaaattatgctatcattttgcatttatcattttggggatccttgattacccttctaataaatttttgagatctattttataactttgtatttctaagattagacttttttcagtgttttaaatcagttttgcaagaactcagattccaagccctrtattttattaattcctactcttttgctaaaagctgaatgactatccatttctgttattttctcagcttaagatgtgccgtatccaaagccagtggctctttgctagcttgtgtattgtcgcttttctcacaactcatggagacctctacagcaccagcatttcctggaagctctgcccataattagttttgcagaagtgcagccatgttacatcactgctcaggaggtcatgcagttgcacattctgtactctacttttatgagagaaaagcacatggcaggaaggcaagctgatatcaggtattttatttttttaaagaaagcaagttccagggtatatatcttggggtcattatacatgtggcccaatgcagtacacctacaactgtagcacaggctataattaaatatatagactttacaaaatactccagtaatcagagttgaaggaagtaaaatttaatactttacttacttttttgcctttattaaaggcatttaagttttttagcggatgttaatgtttacaratgtcaccacaatacaggtaatttccaatttgaagtgtagttgcttgcaaaagtatatctgacagacattttcaatgtattttctagaaggaacacattatattttgttttgagacggagtctcattctgtcgcccaggctggagtgcagtggcacagtcttggctcattgcaacctccgcctcccagattcaagcagttctcctgcttcagcttcccgagtagctgggatttcaggtgcgtgccaccatacctggctaatttttgtattttagtaaagacggagtttcaccatgttggccaggctggtctcgaactcctgacctcaagtaatccacctgcctcggcctccaaaagtgctggaattacaggcatgagccaccatgtccagccagaatacattgtataagaaaattgatttcaattataatgtacctgtggtacttaactaccaaggattgggaaccgtttgaccataatttttccatctgttggataagagctgaatcagaatgtcattctaagctaatagtggctatcatccatgacctaaaacggactcttgttaggggactgaagattggcaaagggagaagctagaggccatatagaagaggaaagcatgaaggtagaaaccacaatcaggactgccttcaaatatgaacttccagggatacttcttggttctgggtagctcccccaccacactgttttcttttgctgtcctcaggaatcagcttgcttgtttcgtttcattgctatcatctgtagtttctaatgagtttttcactttctgtgatctctacagaacagattttacttttctctcttctcccctacatttgtgtctgtgaagtatgcatgctggtgtttttactacttttaaggaaagagaagtatttagaaacaaaaacgtatttcatctgtctttgccacaaggattttttcctccctagttacattttcacgggaaaaacaagttgtacataagtgcatcttacatttcagaggaaagtcagactggagttatagtggacttcttatcattagttaggtagaggtagaggcagcagcctggtcttaacaggactctgcctctgtagggagggatgaggaaactaaagactacaggagtcaactgcactggggtactgggttacaggaaggctagtgatcttgctaacctagaagactagaaagtagaggaaattcatatgcccttttcctgagtttgaaaaggctttgttctttcatctcacagggagacttcagcacaaatgatagaagaaaatttgaactgccttggccatttaagcactattattcatgaggcaaatgaggaacagggcaatagtatgatggtaagttttgtgtggatatgggtgcctgctttggctatgttgggtgcaaaaggtttaactttccatgctagccttatctggcatttgggatgcatatgggaaatagaagaactcaagaggaaagagcatttggggaatatcctcaaccttaaatccttatctgccgttactcagggatatactaggattatgtcatcaattatcttcaataatagcatttttggtcaaattaaatgagtggtaagcttcttcacaatgtgaccattgaaattgaatggtttgttctgtacctttttgcttcagcaatcaattttctccattaagatgggacttgtactttaattcagatatggtacctcccgaatagaaaataaattatgttaatatagttgtaataataagtgtgtgttaagatttggttactataaactactgatttgttaaaacttgaggaaattaccataaaatgtctactgaatcaatttttcctgcatttagtcttaatgtcaattctgtayatttcctctttcattaagaaaaatagcagtggccaggcatggtggctcacgcctgtaatcctagcactttgggaggccaaggcaggtggattgcttgagcccaggagtttgagactagcctggccaacatgggaaaccctgtctttataaaaaatataaaaattggccaggtgtggtggcacacacctgtggtcccagctacttgggaggctgaggcaggaagatcgcttgagttcaagagtttcaggctgcagtgagccgtaatcctgccattgcactccagcctgtgacagagtgagactttgtctcggggaaaaaaaaaaaaaaaaaggataatggtggccagccatatgacatgtacctgtagtccgagttactagggaggctgaggcagaaggattgcatgagcccaggagttcaaggctgcagtgcattatgattggacttgtgaatagccactgtactccagcttggcaacatagcaagatcctgctctcttaagaaaaaaaaaaaaaaagaaaagaaaaggaaagaataattgtttacttcaaatatttatgaaaaaaactctgaaatttttttaaatcaggaaataaggtaaatgaaatgatttttcaacttttgattatgaaatgtccaaacagaaaacttgcaaaaatgaacacccatatacttataacttatagtcaacatctaattgtaactttttcatgcctggttttagaatcttgattggagttggttaacagaatgagttgtcacttgttcactgtccccaaacctatggaagttgttgctatacatgttggaaatgtgtttttcccccatgaaaccattcttcagacatcagtcaatggaagaaatggctatgaacagaaactacatttctactatgatcagaagaacatgattttacaagtataacagttttgagtaattcaagcctctaaacagacaggaatttagaaaaagtcaatgtacttgtttgaatatttgttttaataccacagctatttagaagcatcatcacgacacatttgccttcagtcttggtaaaacattacttatttaactgattaaaaataccttctatgtattagtgtcaacttttaacttttgggcgtaagaccaaatgtagttttgtatacagagaagaaaacctcaagtaataggcattttaagtaaaagtctacctgtgtttttttctaaaaaggctgctcacaagttctatttcttgaagaataaattctacctccttgtgttgcactgaacaggttctcttcctggcatcataaggagttggtgtaatcattttaaattccactgaaaatttaacagtatccccttctcatcgaagggattgtgtatctgtgcttctaatmttagttggctttcataaatcatgttgktgtgtgtatatgtatttaagatgtacatttaataatatcaaagagaagatgcctgttaatttataatgtatttgaaaattacatgttttttcatttgtaaaaatgagtcatttgtttaaacaatctttcatgtcttgtcatacaaatttataaaggtctgcactcctttatctgtaattgtaattccaaaatccaaaaagctctgaaaacaaggtttccataagcttggtgacaaaattcatttgcttgcaatctaatctgaactgaccttgaatctttttatcccatttagtgtgaatattcctttattttgctgcttgatgatgagagggagggctgctgccacakactgtggtgagggctggttaatgtagtatggtatatgcacaaaactacttttctaaaatctaaaatttcataattctgaaacaacttgccccaagggtttcagagaaaggactgtggacctctatcatctgctaagtaatttagaagatattatttgtcttaaaaaatgtgaaatgcttttatattctaatagtttttcactttgtgtattaaatggtttttaaattactttcttgatctctattcattataaaaatcagattataataaaacagttgaatatggcttaggaaaatatgaaggttccatgaagtggaattaagagcatagaataactgtactttccttaggaataataggacttatggtaaaggtagtattgggcaacttctttaagagtgttttcctctgaaatgtcctatcaccactatctacatctaaaaaacatgctcgattcttgccctataaactgatgtcacagccccaccatccccatttttgctagtggtatcattttcctagtcaaccaaattttttagtcatcacatatcactgttcgtcatctattataataggcagtctctctcttgtttccctggttttagaagattttagtaataaacatttattgggtacctgttacttggagggtattaagctagatggcaagatctgaaacaacataggcagtatagtaaaagtgcttatctgggagtctgaacattacaagccatccaagcattgcaattattgttaaggattattttcaatggtcatgcattttctaatattttaataattggttaaagatttgttatagcgtgggggccgctgctggtgtgtggctggggttatgtcagggcagcctgatctatataatttgggcagatggtgtgagtcagaacagactattatagtgggatccccaaacttgcttttgatgcatgagttggaccactattttttggtgggtaacaacttttcagaggggaatggcagttgtgaattgtatacatttcattctttaagcaatattatgaaaaacttcagagaatgtctacagaaaacagggtatggagcaagttattttccattctttttgctttttggaagttaaaatagctaagctctgcaaatatcatttatttggaacagataaggtcccagacattcctagataataaaaatcaaatgaatgatacaggtaagtgtatttattgaagggtgtgggtagagtggtctgggaagtcttgctttaatgaagacggattgattctatttacctcttcttacttccactactaagtaaccctgggcctgcagtttcctaaccacttgacttccttgccaacagtctgtctccactttcagccgttttatagattcattggccctaaagcactgctttcccatacttccctacccaagagggcaggggtccccaagccctgggccgcggaccggaaccagacagtggcctgttaggaaccaagccggatagcaggaggtgagcggcgggcgagtgagcattatcgccttgagctctgcctgctgtcagattagcgagtggcatcagattctcataggcacgcgaaccctattgtgaactgcacatgtgaggtttgccggctccctgtgagaatctaatgcctgatgatctgaagtggaacagtttcatccccaacccacacacacccccaccccgtccgctgggttagaggactttacaaccctagtccaccttgtccagttatagttccacctctagcctttcaaggcttaaaccattaatgtccttaatttctcttgtattcatctatctcccaactatacctttttccttcccttttttatttttggcaatatgtgcccatggttttttaatttaaaacgaacagaatatgtagtgacgcctaccatagcactccttcccatcacacaagccttcaaggaaactgaagtacttactttggtctccctggaggattccctccgcctcccgccccatgtgcttagcaattctgttcctgtagtctggatggccttcataaagccctcactggaccagcattctggcacataataggaacacttaaaaaacgagagaatgatgccgttatatctaatatcttcctcttctgaactttcacagcactttatttgcaacaagtttagttgctcctgaagggcaggatctctgccggaagcaagtgcgtgccacacagtggggctccgcatacactgcaaaaggacaaataaaccgaacagctaccgtttgagagtgagcgagtgggttctctgcacaagaacaaaccaaccagtcccttgtccgaaagggcgtctccttttctctgcttcgctgctcactccagactgcgggctgtcctcttccgaagcagttaaccagcagtgtacagaaagcgacttgcctccaaaggagcctgcgcggcccgcggctaggagaattttgtcccatgcgctccccgtctcactagccgcgggccggggctacgccgtgtgcgtccccgcgcagccgcagtgctgggcgagtgggcggggccggctgttggcggcggttggctcggcgcgggagtcggctgcacgtgcgggcgggggcgatgcgtcactgatcggtgaggcgcggccgaggggtcggctttcctcgcgagcctgcggctgggcttcttctcagttagtgccttccacccgggagcgacccttgggagagggagtttcaggaagctcaccgagcaggggcggcccactggcctccgggggcggaggagttggcaaggggtcagcgggctcagccagaagggaagaatgaggggacaggggtactggactccccggctcagcctgcgagagagcgccaagtttccggagggagagggtagaaactggagggggtggacctgtcactcacgggactgagggtccttttctcccgctcccaggaggaacgagaatgaatatgactcaagcccgggttctggtggctgcagtggtggggttggtggctgtcctgctctacgcctccatccacaagattgaggagggccatctggctgtgtactacaggtgagcggcatgtgcagtcagttagggctctagagcagattaaaagggtactccagagtggagtctgggaagttgttccctctgcaacgttcgggggcgcatgtcccatctctagggagagcacgggggtcgaagcgggcttttgcggagcaccctccagatgttggacagttttagtgctatgttcgttttgttgcagagattaagtctccctacggttattcctatacacagcaaactcaattatttgtagaaaaatgaagaaggaagaaaggaagtagtcactctacctctaactgaagagatggataaattatagttcgttcaactgtacaggctttagtttgccgctgtagatgctgtatgtttatggttgtttcttagactttttcatttaaaagcttccagtgtctggttacgtcttgtaacaccatgatgactgtgatggtgcttatgtccctggacctccagggacataagcacaacactgatgggccatgctcctccctccttactgttgctgttcaagttggggacaggagtggtgtgggagctgttgctctcttgttgagctcgcttagcttttccttcagcctaattaccacaagttccttttgatacagactagtaagagaggccagtttgtggagaaattgggataatggtgtattcaaaaagagcgtcaactttttgcttgtttccactatccctcaaaactgatatttctactttcaaatccatcctgaatcctagaaaaagagcaattttaatggtatatcttagcagatggagctctacataagaaattacagattagtccagatttccttccagtttaaaagcattgtctttctgacagtaaaaccagagaaaggacatttcaaggaatgactcaaagaattagtaatgaacctcaaacagttcatctttccttgttattatgaccttgcaaatgtgtttatattttcaagaccggtagctaagttctatgaatttacaaggtgcaaaataggactttgttttctttgctccccaaatgcctcctttttataatttccagggcttgctttcatagttttcacattccaggatttggttaacaagcccttatgctatttatttgtatagtcttgtcacccttcatcttttcatgctaattttttgtttttatatagaaattttatgttcccagtattttaattaccttgtagatagatcgaaagaattataagcctcagaaattttctctttacttcaaagtttgcattgtctttttttcaacctggtgattaaatgtattatatattttgatttggctcttgttatgtactattaatgtacctctactgaaagccattagaattttttaaacaaatatttctcagaaggttaaagaccgaggagaatcctttgaaccttagagcagtgctggagacccagaggtacggttggttgagcttatgaaacaaggtgtaacattggcagtttaatttgatctttttccctttttaggtgtggaggtattttaagcagttgttcattatgagcaattcatattagtgaggctttagtaggtcagcagcatgagcaagagtgagtatttattatagcattttagatttggaaagataatttttctttttataattttgtcaaattgaaacatctttttgcaggggaggagctttactaactagccccagtggaccaggctatcatatcatgttgcctttcattactacgttcagatctgtgcaggtgagtgattcctaggggaagcctccataccagatagacaggcatgacaggagttaccacacttgtgggtggagatagatttccttattgcttaagcagatggtggtatttacttaaatgcagaagttaacgttcagagtacagttgttacaacacaagttatgatgttaaaccacctcacttacttgaaatgaattaaaggtatgaaccaggaagcttggaaggactgacttctaccatctatatcgtggtatatagcaaattttctgttgctgctgtcacaataaaagtaagaattagaaacacaactagacatacaaaccagtgattatgtggtttagaacagtgtttagtttccatagaggcaggctcctgggctactgttaacatggaggatcaaaatttttatacacagcctttctgcctcatgtttttttgcctggtatattaagcacaattttatgtggaaccttagtgaatgttatattttgatggcatcccgggatatttgaaataagtgtctaatcctcgaaaagtgtcttggccatgggagacaataaaataagtatctttcaatgtaacaagatgacaaaaccaggattaggctgtgaccactttcgcaagcccagtgtgatcataaatctttggattcagaagtttgtctgccatctgctgctaatttttcaggactcaggaaaattctgtgttatttaatcttgtaatcttatgtctaggcttcctgctaagtgagagtttaattataaattcttaaatcccctaggttttcttcctgtccccttttagatggcttagggaaagaattgtgtctactgaagtgaaatgtattcttcccctaatcagactgatttccatatgttgttccatatttattttacccattctttccttagttcatgccatcacttctttatctgccatctcactctccattccttctctcctgtctaaatcttgccaggcttttaaaggctcatcccagattcttcctcttctgatctatagctcttaaagtctatattgtaaattttggccctttgtcttattttctttaatattgttgtcttgcattgtttgctaagtttttttatgtgttttctttccagaaaggctccagttttcttaaaggcaggagttgtaacacatttatatttctggctttctatttatggtggaagttgttaaattgagctgatttctcaggaagcaatgtggtgtaatgaacatggggacccagcgttaccgccagttggtggcatgactttggaaaaattgcttaactgtcatagacttcagttagtcttctgtgaaaggaggaattttaattacataacctcatcaacagccgaaacaatctataataatgttagcaatggcagcattagacccttaaaaatcaagactctaaggcccggcgcagtggctcatgcctgtaatccgagcact

SEQ ID NO: 6958 - DNA, 12583 bp, Homo sapiens
aggctggtcttgaactcctgacctcaggtgatccacccacctcggcctcccaaagtgctgggattacaggcatgagccatcacgcccagccatcacagctgttttcaaggattaaatgagttattacaagtcaaacttctagggtgtaagtctcaataaactcacattagtatcactatgaaataatcttgtccttcactaaattttaagccagcaaaggtttcccaggcctggcacaatgccactttgcaggcactgctaaaaggaattctacctcagttgaagttaaatgggtcaaattcctgagcacatggtggcatagagtgaggcctcaggaaatagttccagaacccagggctttcctgctccccggcctccatgggaacttcacttcactgccgccacaaccttcagggcagagccatctcctctcccacttcatactgccacttcctacatgagaaggaccttcaccagtcctcagagactagcacagctgcccagctggtgaaggggacaattccctgggcagccaaccattctgcagctccatgccctttcttcctggggcagccacaaaccttcagaagcacccatgggctcagaccccccccacaaccccgtctccctaaatgatcctgctacgctgagatcaagctcagatcaataaacactactgagcacctatgccatgtccagcctgggttctaagaccacaccaagttcatagctggtgagggactttccagacttggaatagtgcctgcaacaatgcctcgcaccccacagaaatctcaaccatgctttgttaactaaactgaggatgacattaggtggcccaagcagtggagttcagagatgtggggatggatatatccagagtctccaactgaagttggggtgcaacacaatgagaaggaaagggaaaatacatctggtggccctgggtttccagggcctgtcactataacgttagggatcggagtgggatcagactgcgcgtggtggctcacacctgtaatccctgtgctttgggaggctgaggtgggaggatcacttgagcccagcaatttgaggctatgatcacaccagcagctaaggggatagaagggcatacagggccattatggtggagtctgggcttcattctgggggtgccagggcccaggaagatccctggaaagacggccgcccccaccaaccactcggctagctgaaatgtggcaaggacataggggtgctccgatggcctgtccccaggtttcccttcacaaatagagaagggtggccggagcactcagcaggcactaactgcttctggacttcaaggtcaaggggcaaggggaaggctacttttgaggatttggcaggccactctctcactagcccaagagcaactccctctcggaagggaggaagatcccctggagagcagaccactgccaagagcacacctgcagaggctccaatacaatgctctgcacagccgcccagcaccgcctgacctcccggatagcagcgccagcacagccaacgagtgtgtgacaccgccgcactcaccaccgctctgcgcccagccccaggccagtacccgggcccacgacttcccccgactccccctagcacggactgtttctcgccggagatcaactttaagtccccaagacaagtgctcctgcggtcccagggccaaagtccctccacacaccctcacacaggcacttcctacccacccgcaccccacccctgggggtggaggagaagcagcagcggcccgggacaagcacagtccgcagccacaaacctcactctaccagaactccggctaggtcaggggtcaggctttgctcccaaacacaaccccacacgactaacgcggagaagctgggtcaccgcctactcaaactccggccgtcccaaacccaagccgggcagagtgggacccacggcggcgtgggagactgagcacaaccacggcggggcaggaggaaggggcggcccgccccggcctacgcccacccccaccccggacccgatctcctgggagccgagggtgggtgactgagccgaaagggtggcccatccccgagctcgctgctggggacgagaagcagagccccgagcagcagcggccgtccaggctcccgtcgccctcaccccgcccggcacgggcgcgcactcgccggggcgcgctgatggggcgagggctaccgaaccaggagtgccggccccgggcccgccgcggctctcgtccgcgcggcgccggagttcggctcagcggggtcccggcggaggcctccaacctctagcgagcaatcctggcagacaaagccagcgccgcccgcggggccgctcctgggcaggcggggagggaggctgaggggccaaacagggacctaaggagcagccctcgcccccggagaacgctcggggaagtcggcctcagacaaagaaaggggcagggcccgacgccccagccaggtctccgcgctctactcacccgcgcgcggcggcggcagcggcggcgcggcccggctcggccgaggaagttagagcaagttccgcggcgcggggcgggagggcgcgactcgggccgtccgagcggcgggggcggggcgcggaggggcgcggaggggcggggccggaggcgcggcgcctgccgtctgccgaggaaggggcgccgcttccctgcgccgcccggtgcggccccgggcgcctgggcccgccctggccccgcccctcccccagccgcctcgcccctcccccaccgcaccccgcctcccggcccgcgcggcaccggggaccgcgaggccgggtcgccggcccgcccctttgtcccgctctgggcggtgccggaggcttggggcggccccggtccgcgccctcccagtgggtgcgcggcgcaggccgggcctggcccggggccgggcacttgtagccgccgggagcgctctgagccgttgcgctgcgcagacgccgctctggccttgtcggagccgaacctgggagaagcacgagctgtgggaggcggcgtctcgagggatacacgggatgaccgtggagagcgggcgaaggattaggaaaatggctgtggtggagataagaggcgttcctgcccggctttggagcctgggggcgggggtagtcttcaatcaaaagaaggatggggaaaaggtttttatttctttgtaaaccaaggagtaaggacacgctccttctggccttggtgctaaaaataccaagctttctttggatcgtggctgagatttcttcctaacctttacgctaaagaggtggctgggacgattcttgtggtgtaggggggtttccagggacagccaggggtggcgcccctctttggatcgtggctgagatttgttcctcacctttacgctaaagagatggctgggacgattcctgtggggtagaggggtttccagggatagccaggggcggctccccagcctcagcctccctacctgtagaatgaagcatgccacacctctgtttcttaaacttattcggtggctgagggccgagtggtcttctctgttgagtaacaccaaacagggatctattaaaactgggctaagactggttgccacatgccagtacaagcaaccaacaggttaattccaatggaaggaggaaatcttgaaatggagactgttcagtccattcccaggtttgtttgggttgttttttgagctaaggtatcgctttgtcacccaggctggagtgcagtggcatgaccatggctcactgcagcctcgacctcccgcctcagcttccccaagtagctgggaccacaggtgcaggccaccacacctagctaatttttttttttttttttttgtagagacgagatcttgctgtgttgccagtgatggtcttaaattcctgggcttaagcaatccttccgcctctgcctcccagagtgctggaattacacgcatgagccacggtgcctggctaattttatttgtttgtttaattaagagggatgcaacctgtctgtgacagcccaggcagctctggaaactccctgggaacctgtccattcattcagcagatagtgagtgtttgtctgagtgcctgataatatgccaggccctgtgtgcatggtgggatacttcagtgaacaagacagctgaggccttttgcccaataaagttaatttttagtggagaagacaaatacataatcacaagttgaagtaaaggctgggacaaaaacaaggggctagaatagagaataaaagctaccttagatgaagcagtcagggaaagtgaggaggcgatgctgaaattgaagtcaaaagagtaaggagttagccttgggaaaagttgggcagagacattcctcgctgagagcagtaggtgccttttcagggtaagttctggatgggtcagggaactgaaagaaaatcagtgtggctgaagttttaagcctaggggaagaggcccaggatggagtgagaaggtgggtgggggccaaagcatgcagggcctgtgggctgtgtcaaagaatggagactttgttgagccttggaagggttttatgcagaagactaacatgttctgatttaaggctgtgtgtgggtgtcaggcaaaaataaaagcagggagccaattaggcttgccacaatccaggccaaagatgatggtggtttgaaccaaagtggtggtcatgctaagatgagtagttgagagatgctattttggacttaagaggacacattgataggaaggacatgggggcaggaaatggagaaaccaaagataactcaagtttctggctggggtaagtgggtggatagtgcttcatttattggatcaaaaagcatgaaccacatctcagggagttacatcaggaattctgttcaagccacatggagcttcagatgcctgttagagaaccagcggggttatctcatcactaggaactcagaagagaggccagggcgggagaggggctttgggatacatcagcataaagatgctcaaggccacgggatctgagaaggacacacagggtgagggagtagatgcagaagaggagagagttcaggagggacccaggggaaccaaagcaggcaagaagactgaaaaagagactggggaggcagaaggagaatcaggagtatcccagagactgagaaaatgtttccagaaagcagttgtcagctgtgttagacactgcttagagatcaggtaagatgaggactgggacctgttggctctggcaacatgaaggcaattggtgaacatgatgagggcagtgttcctggagtagtggtggaagccatgctgtggtagagctaccatatttgcacaacttgtctaacagggaatggagaactgggagggatctagaaaggatacggaagcataggatgctttggtagagattgctagatgcccctagtagtaattctctcttcccttcatagaatttctaattctgtctggccacatggcttcccagaataaaggcaagtttctcagcctctcttgcagctacacttcattcctcccaataggaagtaagtgtaggagtccatgtgcaaattcaaaactggctttaaagggaagtcatgtgctttactctttcctgcccactaggatatattaatagatagctggagctcaagcatccatattggatcttaagtggaagccaaagtgttgaggatgttagtggaagtgagaataaatgtggatgctaatgtgtagggagccaccacacatttggactactacctcttgactttctttatgggagaaggacatttctgtcttgtttaatcctctgttttatggcacatgtagccacatctaattctaacatttgttggaataaagaggggtttgttaaaatatgggagtcactgaagcaggcttgcacactgataggaatgatctaagaagaaggcaggggccatgataggaagagcaggtgaaaggagatagggtataggcactaacgagggtcacctcctacaaagggacgcctccaccatcattaaggagaggagtgtggaggccgaggagaggtttccggtaaaggctgggattgggaagatgattactcacacctggtgatttctgctcaatcctgcatgtgcaggaggtcatgagctagaacaaggaggaaggagatggggaagccagttttgcaaaccatggactgagcggttttggagatcttgctggcctgagcagcgtctgggagatgtgtcctttctgraatagttggccacactgctgctatgaaaagtgtggtgggaatacccacaaagccagcatggccttccctgccatgccccagacagtcacatctgacactcacctgccattcccrgctgtagcagagacccacagagctttatctgacccattcttttttttttcytttgagayggagtctcactgtgtcacccaggctggagtacaatggcgtgggctcactgcaacctctgcckcctggattcatgggactataggcacgtgccaccacacccagctaattttttgtatttttattagaggtggggtttcgctatgttggccaggctggtcttgaactcctgacctcatgacctgcccaccttggcttcccaaagtgctgggattacaggcgtgagccactgtgcctggcctatctgatccattcttacagcaacatggagtggcttgagagagcctcagagacacgaaatgcaaaacaggtctattttattctcctttattaaaaaataaaaaattcaatatagacagccccaactcataaaagggttgtattgtaaccagtggtttaccttcctggctagcacctagaaccataattgccaagcatataactgaattgtagtgcagactgcaagcctaatgtatggactgtgggaacaaaaaacagtataggaaggaggaaaagaaaaaagctgagagtttcttatctttttcctggacctgaagctgccacagataaaattgtaagtggaagagcttgccctttgtcttcccctgacttctatagccctctgtgtcggtccccagtgctgcactcccaccctgggctccactctgcagcctctgtgtgtgtttacagggcaatgggcaggtcagggtgagattgaacagaagagggagttggtgtccaagctctcctagttctcaacatgatcttgagcaaaccactttacattcctgagccctgctgttcttatctgtaaagtcaaggtaatactaaaacccacctcacaagcttgtaataaaaatccaaagagataaagtttgtaaaacttcgaaaaatactgggtaagctgtaaagaactctgttacccaggaaagatgtcttattaggaccagactaccaaggattagtcgggacattttggctggaaatgagaaccccactcagactagcttaggtcatcaaaggggagatactggaaggagcctcagattgctcacagaattgaaagaagaacttgaaaccagagtgacacaaaacggggctgatcctgacaacgtcccagaacgggggccctaccctctgtttctcctagttctcagagtttgccatgtcaggtatgtgactgagtaagtctacactcttaagtcggtatgaacaaatctcaagaaaggatcgaccgggcatagtggctcatgcctgtaatcccagcactttgggaggccaaggcgggcggatcacttgaggtcaggagtttcggaccagcctggccaacgtggtgaaacctcgtctgtactaaaagtaggaaaattagctgggtgtggtggcgcatgcctgtagttccagctactcaggaggcagaggtgagagaatcgtgcttgaacaggggagatggaggttgcagtgagctgagattgtgccattgcactccagcctgggcgacagaggaagactccatctcaaaaaaaaaaagaaaaaagaaaagaaaaggatcctaattgggtcagctctggtcacatattcactcctggacccattcttacagcaacatggagtggcttgagagagccaaacaaactctgacacaaccagcgtgatgagggagatgagatatcgtaattggactaggtctgggtcacatgcccatgcctatgatcagtagggcaaggcctatgcagaagaaggggtagtggtgtgtgcagggccaacatcatcatttttagcagtcttctataccaagtattctttaggccctgggcaggttttaggcagaatggtgacattgttatatctgtactttagaaagatccctaaggctggagtgggaagggaaggtgggagggagcaagattggaataaaaaatggttagaaaagaaatgatgaggaaatagaaagaggtggacagaatcaagatatatttaggagctggaactgacaagtgactaattgcatgggagaatgaggaataaagagacatcatattctggctgcgtgggcagtggcgctattcactgagaaggaacacaagagaccctgtgtggatgtataatatgtttggtgagaggtgatgccttagacctcttccatttgaagtgttcctgggtagggtggagaggtgcaatttgctgtatggagttaagagagacagctaaacagaagttatcagtttggaagttgtatccatttgaaattgtgtttagcttttctaacaataacccaaggccaggtgcggtggctcacatctgtaatcccaacactttgaaaggctgaggcaggaggatcactcgagcccaggagtttgagactaatctgtgcaacatagtaagaccccatctctttaggaaaaaaaaaaaaaaaagaaaacagagagagaggagaaagagaaagagggaaaggagggaaaagagggagggaggagggaaggaaggaaaggatggagggagggaggggagagaaaatagcaacacaactacattgccttaactacattcagctttctcgctgtagttgtaggaaaaaattctgacacaacaagaagtctaaaggtaagcagagcaaggctgatcagcagccccacaacgtcatcaggtcccagctcctctctgttggtgtgtctggctctccttaggggacagagttggcttgtggtcatacaatggctgccccagctccagcttcccacccacattccagacagaagaaagagcaaaaagaatgaaggggcaacacctaaaacttacccagaaatccccagactactgcttatgcctcactcgccgagtgcagtcacatgacaaaccctaactccaaaggaggttgggaaatgtttaaaaaattaactcctgttttaaagaaagaagggagaatcgatattgaggaagcagtgtgtgataattgaaatcatcagagtagaggagattattttgggactgggagatgagaaaaggaccaaggacagaatctttggaaaacgagagagcagagggaccaaagagactgaggaagactgtccagtgaggtaggagaaaagccaagagggtggaatggatggaagtccaggggcaacaagtgtttcaagaagaggggagtggtccagtttccagggctgcagagggccagtgaaacaaggctgaagagcaaccatggggttaatagcttcagagaactgtttcagtggagaattgggtcaaagacagttaacagtgggctgaacagcaattggaaaatgagagagaggttgttaactggaagatgatgaggataagcagttgcaggagggtgtttgtttaagaaaggagagacttgggccaggcacgatggctcatgcttgtaataccagcactttgggaggcccaggtgggagaatcgcttcagcccaggagttccaggtgagcctgggcaacatagtgaaaccctgtttctattaaaagaaaataacaagaaaaacaaaggagagactcaaatatgtttaaatgatgaagggagaaggcaagagaagaggggagataagagagtctgaaggaagagagaaaacgcttgctggagaaggtgggaaggattggtgttcagaacaagaggagagccccaaactggaggacagcaggaccttcatagagacaggaggcaggaagacaagctgggtgaggatgcagatgtttgtgggttcggtggggcttcctaagggaaggggtccactttctctggaagtagacagaatgggcacctgctgaaggtaagtgggtgttgggtgggatccaaggatttcagagaaacctaggagagaacgagagacacctctgagcagggtcaagcaggaatgtttggggaagggttgcaagcccagctgcaaatggagacccagagtgagagtgacacacatctcagattacatgacctttttcatcagtactcagcagctggagtatgtgcaagtgcagagagcacagacagcaggattgatcaaaatctggggtttgccgggagagcatgatagaaaaacaatggtgcaaaggattccagaaggttggaaataaagcagttgaggtgttgtatcctgaggcttggctactaggggagagaagtgacagctggaggggctagtagatagggggaaagaagatgaggctgcggctggagggccctcagcatgtgaagaagggagatacggtgacacaaggctgtggtcagacagaggtgtgtatccatgggaccaggtgattgagatggaagaaacggagaaacaaatggccctgagggtgaggaggtcaggaccaagaggctagtgggaagatgggtcactccatcagtatatggcaggacttggagtgcaggcaatggcaatgggttaggcgccaacatctttggtagaacttttacttcaaggtcagttttgcactggtgttgcctttcttgaagaaagaggttagggagccttggggaaaagagaacagaaaggaaatttatttcttggcctgtcattctatacttggcctatttgttccagaacaatctattttaaggaatctgcaaacttctaggaggtttctactcttatttgcatctacagcctcagccatgggacctctgcctgccagtggcgtcccctgcaaagaattaggactaagatttgtgataggagcccatgtgtgaggataagacacagtggaacaccctttaattatagcatctgagactgtctaagcagatggtggtgacaaggagtcctgtcatctctctgccctcagttgttccatttcataaactgaaggtggcagagaaagaaaggttgttcaacaggtgacatcccacggccctttcagccctgtgcatcaaccacactgtaatgactccacatgggagaagaaagttttgccaaagaagaaaaccccagatgtggccaaataagacatcaagggagggagcagatcctagatgttaagagcaagtataataccaggaatcggactgcacgggctaagtcccaactctgcccctgaaagctaggtccactcaggccggagagctgctcatgtctacccagggaactatgggatctgtgcagatgtcaaagccacttgacagcacagagtgttacttctggaataatgtcatgcaaactgaccttcacaaagctctgacttagtaacataaatgtggaaagggggctcagagggaatcacctagctgataagtggtagaagcaggactgtcagctttatgaccacacctgagtccccagtctgtctcaatctcacacctagagatttgagggtcggctaaggccctgggacctctaggcgcagacactgctaggagagccactgaaagttccccctaccactacaaagtaggggagagaggcacacctagactcatctgagacagagcagaaaacagatggatgttgcaaacatcacaggtacctctccctgtccctgtcacacagctttggggagttttagttggttccatggagaatctggtagtccccggggagagctgcgcagcagttgatgccgcgtgcatacactgccacctagaggcagtctgaggaaactccaagtttattaaaccacgggtgtgtgtgtgtgtgtgcgtgtgtgtcagtctgtctttctgtgtgttgggggaggaagggagggcttttcagtccttgtctggcactgctgattctctctttcctggagcccttggctctcttcctctacccactcgggaccacgtgtcctgcacgcagctcctcctcagtctctttgcagatcctgctccccatttcctacaaatgctacttttcccagatgctgggaacatctaacaccattttcttccccctctcatctccacaggctctctgccctctgtgccactctgtgtctttagaatcctctgtgcaccgcccccacccatctttgtggccagatccctctcctgagctccggttccccctccctcacactagaaagaaaatctgatcccatcagtcctcctcctgcaaacccttagaggttcatttcatgaacacagctccttccattgttctacagggattaaccaggcctggcctctgagtgggctgctccaaccatattctgaccacaggcctgcctc

SEQ ID NO: 6959 - DNA, 13701 bp, Homo sapiens
ttactctctcatttctattcagataccaccttgacagcggagctgtcccagactacccttgtgtaaagcagtatttccacacccctcccctggactacctgtcctccttacactataataattttctcccataacacctattatcatttctataatagacacattatctatctattgtagtttttgtgtcacccaattaaatgtaaactccttgacagtaaagacttagtttcattcactgatacagccctagacctagaccaacacctgttgtatatactagacactcaaaaaatatgtgttgaatgtatgaatggttatagtatgtaaaaaaatcccacaaaggatttacacagaattgtaaataataactgtattaggttaagaaccttggaaaataaagaacaaggtcatatagagcgggtatgtggaggatttttagttccatggaaaagtcgccccagtcagcagtgagggaggaagttgaatagttggttctcggacatgagataagagaatgaaaaccgaattatgtttcggccgtaagactaccagatctccagtaagtcaagaacactggaagctggccaaaaaggtgggtaaagggccccacacaatgggacttcccgggcatgtcctggttactgtagaagtgtctcctcctcaaggcaatgttataacgacaagtgagggaaatagtcaacaagggctgcaaagcacgttggtctaattagtgcccccttgcctagagatctggggagaagtctgaggagggagtatccaaagatgacataacctgagtgcagattttcaattgtaagtgaaaagtgagctgagcctgtgctcaaggacttcctgcgtgctgagcacccatgctgagcactctctctcactagcttgctgattggggtttgggtttataaatttcatgttttactcaccaacactaactcattttatacttcaatcgaaacagaatgtgtgagtccaggcgcggtggctcatgcctataatcccagcactttgggaggcagaggcaggcagatggcttgagctcaggcgttgtagaccagcctgggcaatgcagcgaaacaccatcttcaccaaaaatacaaaaatattagccaggtatggtggcatgtgcctgtagtaccagctactctggaggctaaggtaggaggattgcttgagcccaggaagatgagggtgcagtgagccaagatcgcgccactgcactccacccagactctgtctcaaaaaaaaaaaaaaagtgggttttttttttctggaaggaaatagaacatattctctaatattctctaagtggtttgtgtgctttggcacacaaaagaatgaaatgacgatggcctttctcactggttggtttgctgttcccgcagttagaagagactgcccacatagggagagtggcacagaggagagtaacatcaatcaacagcgaatatgcacttgatcgcggtctaatcagcaccaggcacctcagggcagcagtattgtcagacgcattggaaccagagggactccatcttgaataaggtctgggtaaaatgaggctaacacctactgggctgcattcccaggaggttaagcattcttagtcacaggacaagataggtcagcaggacaagatagaggtcataaagaccctgctgataaaacaatgccataaagaaggcagccaaaacctgccaaaaccaaggtggtgatgaaagtgacctctagttgtcctcactgctcactatacgctaattataatgcattagcatactcaaagacactcccagcagcaccacgacagtttacaaacgccatggcaacattaggaagttaccctatatggtctaaaaggggaggaaccctcagttagggtaaatccctgcccttttcctggaaaactcatgaatgatccaccccttgtttaacatataatcaagaaataactatacgtgtactcagttgaacatcccgtgccactgctctgcctatggagtagccattcttttattcttttacttctctaataaacttgctttcactttactttatgaactcgccccaaattctttcttgtgcaggatccagaaccttctcttggggtctggattgggacccctttcctgtaacagtattagtcataactattatctgaaaaagtatatttatatggtactttacaaattcaattttgcacaatagactctgacttatgtcattctcacaatcaccccataatgtcaatcctcccatttcacaataaagaaattgaggctcaggctggagacggtggcccacacttataatcccagcactttgggaggctgaggcaatgggatcatttgaggatcggagtttgaaaccagcatgggcaacatggtgagattccagttctacaaaaaaaaaaaatgtttttggccgggcgcggtggctcacacctgtaatcccagcactttgggaggccgaggcgggtggatcacgaggtcaggagatcgagaccatcctggctaacatggtgaaaccccgtctctactaaaaatacagaaaactagccgggcatggtggcgggcacctgtagtcccagctacgcaggaggctgaggtaggagaatggcatgaacccgggacgcggagcttgcagtgagccaagattgcaccaccacactccagcctgggcaacagagcgagactccatctcaaaaaaaaaaaattgtttttaattagttgggcttggtggggcgattctagtcccaggtacaagggacactgaggcaggaggattgcttgagcccaggagtttggggctgctgcagtgagccgagatcacaccattgcactttagcctgagtgacagaatgagaccctgtctcaaaaaaaaaaaaaagaaaagaagaagaagaagaagaaattgaggctcaaggaggttagggtgaattgctcaaagccattctgatgtgaccgacacctagagtgaacatatgtcctgatgtgtccaggacagcctcagtttatgcctgcctattgtcctggtgtaattattaatagcaccttttcactccccggagtatcctggttggatagtaaattatatggtcactctaccaaaacctgtttctttcattcacttaaatccaatcttttatttcattactgccttatttcctccacttaggcagcttcaggatgattataacagctgaaaaggctggcttcagaccatggtatcacttctatgagagaggacatttcaagttgcaaacaaacaattcaaccagtgacttttaaatttgaaaactaccagtatagtacggcagtgaagagatcagggtctgaatctccattagcatagacattattcaaaatgtcaggcctgagaaggagctaaaaaacggcctgtcttgggggaagaaacggcaagaattttatcgaacttcagctggagtgggagaggggactgtcagccagaatgcggctagtttggggaagagttggtcaaagagattcttgaaagagggaggaattgttgttgcagatgagcagccactgtttgggcactttggattgatcagcctggacaggaggaacagttaggggctaagatcctgcacaggaagaggtggaaggaacaactacaggcaaaggggacctgcaggggaaaatgttccatgtggaaaatgctaggacttcagggtctcttaggttagttaactcttctgagcctcattttcctcatctgtaaaatgaggatgttaacagtttaaggttgattctgaggatggaatgtactcagtacataagtgttcagcaaacagtagtagctcttattgtttgagtctcttccccgccttgtgcccctagtgtagtagtaagggtacggattttcttttttttgtttgtttttgtttttgtttttggaggagtctcgctcagtcgcccaggctgaagtgcagtggcgcgatctccgctcactgcaagctccgcctcccgggttcacgtcattctcctgcctcagcctcccgagtagctgggaccacaggcgcctgctaccatgcccacctatttttttttgtatttttagtagagacggcgtttcaccgtgttagccaggatggtctccatctcctgacctcgtgatccgcccgcctcggcctcccaaagtgctgggattacaggcgtgagccaccgcccggctgggtacggattttctttacgctgtatataaaagtctgagaaactatcaattgtttataataaagaatgaaaactccaaaggcatctggggtgaggttgagggtctgcacagagattatgggggaaggggacgtccaaagctgtcattggattcaggcactcaacagattggaacacagtgtagagatttatggtagtgtgaaggtgctttatttgttatgaattactcagagattttactatattttaacctggggcggggaacccttcctttttttgcccttttgaaaataaggtagatttcttcagatgtggaaagtatcaatggtcaatccaatagcttttcgttattttatttttttatttttggaggcaaagtctcactctgttaccctggctggagtgcagtagtgcaatctgggctcattgcaacatttgcctcctaggttcaagcaagtctcctgcctcagcctcccgagtagctgggactacaggcgtatgccaccacgcttggctaatttttgtatttttagtagagacaggttttgccatgttggccaggctcgtctcaaactcctgacctcgtgatccacctgcctcggcctcccagtgctaccattacaggcggagccaccacacctggctcactttgtggcatatttctagaagttaaaaaactcacctgacaaaagagatactttgtggccaggcacggtggctcactcctgtaatcccagcactttgggaggctgaagtgggtggatcacttcacgtcaggagttcgagaccagcctggcgaaaatggtaaaacccccgtctctactaaaaatacaaaaattagccaggtgtggtggcaggcacctgtaatcccagctacttgggaggctgagacaggagaattgcttgaacctgggaggtggaggtttcagcgagacgagatcgtgccattgcactccagcctgggtgaggacagtgaaactccatctccaaaaaaacaaaaaaaaaaaaaaaaaaagagagagagagagaaactttatgatttactccatggaacaaatatcatatagaactgtaacatttaaaagtcagatttctgtttctaaactttaggtttatacctcttggcagatgactagatgattctttccccattccaagagtaacagatattcagccaacttgtgtgtgtgtttatcacatgtgattccacatttcagtttgtttctctatattttttgtattttaaattggacaagtattacttttataataagaaaaaagataattactaaaaataaatgagaaatacatatacatgtagaatttgcatagtgtcaagtaaatgataagggtagaaagagtgcagagaaaaaaaggatgaaaacgaaggtggctgaagaatgctttgtgacggaggtgggattgaaatgagctttgaaaggccgggtgcagtggctcacacctgtaatcccagtaatttgggaggctgcggcgggcggatcacctgaggtcaggagtttgagaccagcctggccaacatggtgaaactccgtctctactaaaaatacaaaaattaaccaggtgtggtggcaggcgcctgtaatcccagctactctggaggctgaggcaggagaatcgctcgaacctgggaggtggaggttgtagtgaaccgaaatcacgccactgcactccagcctgggcaacaaagcgagactccgtctcaaaaaacaaaacaacaacaaaaaacgaaacaccgaaatgggctttgaagaatggaagggatgcagataaaagagaggagggcgcagagcggtttggtcgttcgttggaccagtgtcggttcttcgctcgcgactgcggctcttcctcgggcagcggaagcagcgcggaggtcggagaagtggcctaaaacttcggcgttgggtgaaagaaaatggcccgaaccaagcagactgctcgtaaatccaccrgtgggaaagccccccgcaaacagctggccacgaaagctgccaggaaaagcaccccctctacctrcggggtgaagcctcmtcgctacaggcctgggaccgtggcgcttcgagagattcgtcgttatcagaagtcgaccgagctgctcatccggaagctgcccttccagaggttggtgagggagatcgcgcaggatttcaacactgacctgaggtttcagagcgcagccgtcggtgcgctgcaggaggctagcgaagcgtacctggtgggtctgttggaagatactaacctgtgtgccatccacgctaagagagtcaccatcatgcccaaagacatccagttggctcgccggatacggggagagagagcttaagkgaaggcagtttttatggcattttgtagtaaattctgtaaaatactttggtttaattggtgactttttttgtaagaaattgtttatatgttgcatttgtacttaagtcattccatctttcactcaggatgaatgcgaaaagtgactgtttacagacctcagtgatgtcagcactgttgctcaggagtgacaagttgttaatatgcaaaacggatgcrtgatatttcttgcttctcatgatgcatgtttctgtatgttaatgacttgttgggtagctattaaggtactagaattgataaatgtgtacaacagggtccttttgcaataaaactggttatgacttgatccaagtgtttaacarttggggctgttaagtctgaccatacatcactgtgatagaatgtaggctttttcaagggtgaagatacaaaccttaaccacagtgtaacttatagtttcctttaaaaaaaaaaaattaaacctggcagctatagaatacaatatgtgcatttataatagctattttatatattgtagtgtcaacattttcaaattaaatgttttacattcacaagtggtggggagtcttgtcattaaggtgtgtgtaatttagagtccagttggttttcttctgactgcacttgttctcatagtagtaaaatgctatgtgcatttataccttgcataaatcctcattctaccacatgttaactaaccctctagctgataatggaaacactaactgggggattttatttataagggctctagaaaaaaatatgagttattcacaccagcatcatctgttaactaatattctgaactagtgcagcttttcattgtgttgtgtggttggtctcataactaggttgagttttctcctctgctaagaggaaacagtactgaagttctttttcttgtggcatttgtattataaaaacttggtgtaggggaggagcacaaagctctagcccactgaacctctgcyggttaagatggtgttaggttaggttacatctggttactgtcctgggaaaatcatttttatagagatggccttccaagtggttttaaaatttatcttattgaagtttttaggtcaattatgtatgttgactaaatttacaaataaacttgtttatccaaaaaaaaaaaaagagaggaaaagaatcagaaatattggagagtagaaatgcaacagaagagaactataaagtttatgttgggggaaaacaattagtttgtctcaagtgtagtatttacgcaaaggagaaaactttagggatgtagggcccacattgtaaagagcttggaattaggatttaaggaattttatactctatcctgcaaaattcacagacaaatttgagaactgactagcattttaacttgcaaaaaaagacaagttagtacagaactagcacatctaatttttaaaaaagtatttgaactataacatggtgaaatcccgtctctattaaaaatacaaaaattagctggatgtggtggtgggcgcctgtaatcccagctactgtcaaggctgaggcaggagaattgcctgaacccaggaagtggaggttgcagtgagccgaaatcgcaccattgcactccagcctgggtgtcaagagcaagactgtctaaaaaaaaaaaaaatcacaaagtcaggagatagctcagattgttatatattagtcaacaattctgattggataactttggggtcagtcttgataaaaagaaaaacagtatgtttctgtcttttgcataaaaaataacttcacggcttatcttggaattcaaagcttttgaaatatttctggttttcgtggcttatcttagagtgcaaagcttttaggaatgtcagccttttccagactatggtacaggatgggcttgattagtcgatatagtgggcatgatattcgttttacagactagagttcacactaaatggccataggctcccatagggccaccaggtagagttgtgcagattgtataggctgtgcactgcacaactttttatgttatgtgcacagtgccctctggagttataaaatgcaaagtcggctggacgtggtggctctcgcctgcaatcccagcactttgggaggccgaggcaggcagatcacaaggtcaggagttcgagaccagcctggccaacatggtgaaaccccatctctactaaaatacaaaaattagctgggcgtggtggcatgcgcctgtcatcccagctactcaggaggctgaggcaggagaatcgtttgaacccaggaggtggaggttgcagtgagccgagatcgtgccattgcactccagcctgggagacagagcaagactctgtctcagaaaaaaaaaaaaaaaaaaaagcaaagtctactcagccatacctggaagcctagacgccaggcaggtaacacaaatcagtgaaacctggggccctttgaaaggattccagcaaatttaaaaataatggtcagagcactgtggagttgtagaaaaacaaatttgcagactatgttcagccttggagctcaagtttgggacctctgccatataaggtagaggcagtcaatatttttgtcaaggtaatgatgcaaagagatatgtaaaatagattaccatagagaaaagaggctacaaagaaataaaaaagtcagaaaagtacttcaataatctgggctgaggaaacaggggcctggccgggccagaactatgtggatagacatagaaagaaaagaattagtagaatttagtgatcagattcaggtttgattctgaaccaaatcaattcagacttgatttctcataagacaaaaaaaaaaaaaaaagaaagggagaccagagtaatgcaaggttttgaacttgggtccttaggaaaatacctggaagaaaaatatttaccttggaaataatttcagattaaaaaataatcttttgaccgggtgtggtggctcacgcctgtaatcccggcactttgggaggccgaggcaggcagatcatgaggtcaggagatggagaccatcctggctaacatggtgaaaccccgtctctaccaaaaacacaaaaaatcagctgggcgtggtggcggatgcctgtagtcccagctactcgggaggccaaggcagtagaatggtgtgaactcacgaggcggagcttgtagtgagccaagatcgcaccactgcactccagcctggtcaacagagtgagactcagtctcaaaaaaaaaaaaaaaaaaaaaaacttttaggataggatagtaaaaatcatgttttgaaagcttatgtaatgctggccgggcacggtggctcacgcatgttgggaggctgaggcaggcggatcacttgaggtcaggagttcgagaccaacctggccaacatggcgaaaccttatctctactaaaaatacaaaaattagccaggcttggtagtgggcgcctgtaatcctagctactggggaggctgaggcaggagaatcacttgaacctgggaggcagaggctgcagtgagcagagatcgagccactacactccagcctgggcaataaagtgagacaccatcttaaaaaaaaagaaaaaagcgctgggagcagtggctcacctctgtaatcccagcactttgggaggccgaggtgggcggatcatgaggtcaggagatcgggaccatcctggctaacacagtgaaatcccatctctactaaaaatacaaaaaattagccggatgtggtggcgggcacctgtagtcccagctactcgggaggctgaggcgggagaatggcgtgaacccaggcggcggagcttgcagtgagccgagattgtgccactgcactccagactgggtgacagagtgagactctgtctcaaaaaaaaaaaaagaaaagaaaaaagcttatgtaatgctatggcactgctcataataaaaaaaatgtgagaaaaaagcagacaagaggaagacaaaaattggaaaaaaaactatgcaaaaacattaacaaaatgttatcctcagcaatgtgattgtaagttataaaaattttcttccttatacttgtactatgtttccaaactttctacaatgaatgttatatttaaaaatagaaaaaaatacttttaaagatcctagaggcttcccttttacagaaaccataaattcaaccttcattattttgtttttgtggtaaccatttgtgacagtaagtgctaacaggcttggctttttggttttggaaaaattggtccttgtgtactaaatagaaagtccttgtaatctcgaggagataaagatttaatgttgcctagtgatacagatttgttttaggcattattttcttattcaaaaactaacttcaattgttttaatgatttttagaaaagatggttttcctttttttttttttttgagatggagtctcgctctgtcgcccaggctggagtgcagtggcgtgatcttggctcactgcaacctccaccccccgggttcaagcaattctgtgcctcagcctcccaagtagctgggattacaggcacctgccaccatgcccagctaatttttgtatttttagtagagatggggtttcaccatctctgccaggctggtcttgaacttctgatctcgtgatctaccctcctcggcttcccaagacgctgggattacaggtgtgagccactgcgcccggcctctttttttggaattagctgttagcccttcccaagttgtattcatagcttaaagcctatctaagcttttgccaagaacataaagatttaagcaaaacggaatgataacagtattattctgtttaaggccgggcatggtggctcacatctgtaatcccagcactttaggaggctgaggtgattggatcatctgaggtcaggagttccagatcagcctagccaacatggtgaaatcccatctctactaaaatataaaaattagctgggtgtggtggtgcatgcctgtaatcccagctactcgggaggctgaggcgggagaatggcgtgaacccaggcggcggaggctgagacatgagaatcacttgaaaaggaggcagaggttgcagtgagccaagatcgcgccactgcactccagcttgggtgagagtgagactctgtctcaaaaaagaaaaaaaaaaagaaaagaaaaaagaaaaaattctgcttatagcagtgtaaagttttaaaagatggcttcacataggcctggcacagtggctcatgcctataatcccagcactttgggaggctgaggcgagtggatcacctgaggtcaggagttcgagaccaggctgaccaacatggtgaaaccctgcatctactaaaaatacaaaattagctggacatgatggcgcatgcctgtaatcccagatattcgggaggctgaggcagaagaattgcttgaaccagggaggtggaggttgcagtaagccaagatcgtgccattgcactccagcctggacaagagtgaaactccatctaaaaaaaaaaaatggcttcacatatatttgatgccaggctcatttgacctttaagaagaaaaacaggatgtaattacagcagatttttttcagctctattttgtggagaagacattaaggctcacagaggtaaagtctcttgctcagtatcacagagttatcaaatggtaaagcaagaatttaaatcaaggtctttcaagtagtacaatttttcttacacacgattaattgaaaaccatgaggactgtccttggcccacaggattggatctccttgctgtgctgacagctggatctgttcatcaactcaccacctttgtccagccccatgacctggtcaaacctcaggctatcaatgtggtacagcggctccagtacccagtaaaacccaaaatacaacaaaggagaacagaaggtagctaacaactctaatttctttaacgcgcatttggtattttaaactttgcaccatggtttccacacaagtccttcttcaaaagaatacaagagtcaaagtctgagataaataatgaaaattatagaaaattttacaagtttgatgtaatagttcacattccaccagcagaataattttttctgtgtgaaaatcttgtacttatcataaatggttaaattacgggagcacagttcctgataacctgaagcagaacttgaagaattagcttcagttccacatggttacaggctcaaaattagttttcccttcatacttcttttatattatcctatttggcagttatgctcacttgctgcaggaatttctcattgttctgtgatcaggggtattcatttgttttaactcatgctatacagttcgtcatgcacacatgatttttactttgaatataattttggctggatacattctcacactgttcttcacacatgcttgggttttttgtatgtatcattttcttctgacaagatgattaacttctcatgtatactgtttgggtatttgtttatacttttatgctattacccatacttctttgctcagtaaacccttcttactagataacttggatatactagcaaatagctcatttatcaccctactaatcactttaaaagcaacattgctttctataaagttaatactaatgtcacatacaataaatatttatcaaatgaatgattaaatggatatcagctaagaaaataggtattatagccaactttgaggatgttacaaaaagtaggaaattctaattttatatatgtatttatatataaatatatacattcatgtaaacatatatttatttaaagacatatatttaaataaatatatgtattttggagagagggaattttgctatgttgcccaggctagtcttgaactcctggcctcaagcaatccttccacctcagcctccctaagtgctgggatgttaggcgtgagccactacatccagcctaaaatattttttgatgagcaataaaaatggcttaagtctagttgtaacttagaatttgaaatattttaagataccaagcctaagcaataaagggtaaacttgaagaacaagattttacaaaaatgaccctacatggtaacttctcagaggaagcagtctaccttcctgttcaaagccaatccctcctgtattatctatttctatataacaaattacccagacttcacagcttaaaacaacaa

SEQ ID NO: 6960 - DNA, 21254 bp, Homo sapiens
ccaaggcgggcagattaccttaggtcgggagttcaagaccagcctgaccaacatggagaaaccccgtctgtactaaaaatacaaaattagtcggacgtggtggtgcatgcctgtaatcccagctactcgggaggctgaggcaggagaatcacttgaacccaggaggcggaggttgcggtgagccgaaatcatgccattgcactccagcctgggcaagaagagcgaaaaactccatcaaaaaaaaaaaatgcagatcctcagcccccatacactagacattctgattcatcaggtctagagtagggcctggtctctgtggctttaacaggcttcctaaaaattctacgcacaccacttttacaaaccactgggataagatatttgggaagacttacgtgtaccttttagagctgtggaatgcttaacatggacatagaagaagaaaatatttaaaaacacagaaaaccctaatcctttcctcccctggatcctcagttacacagggagccgctctgcctccaacatggcgatcgttgatgtgaagatggtctctggcttcattcccctgaagccaacagtgaaaatggtaggtttatcataaccccagactgccctattttatttaatgatgtatgtatccccagcataagacaatactaatatcaaaatactattaaagtcaatctctatcaaagccttatcctttttccagctcagaaatataatcacatgtgtttgtatgaatgctgaccatgtgcagagcactgcgctaggacccatgactacaagaaaaagattgtcagcaggttcctgcttttcaatttcttcttagcttagaattttgctaagaagataaaagatatgaacacgaaccagtgaaaaatatgaaaatgactgattggcataaactataagtattacagaagttaaaagaaaaatagagcaagcaaaacaggaaaaaaactccttatgaagaaatagaaactgaattgaactttgaaatatgagtaactaccaagtttaggatacttagctgtcttttcttcagataaataactttacacattagtcgtgtgttatactaatagtaaaccctttatgcctttcatttttaattgtattacattatatatttccttacaaaaagcatttgaagaattctaccctcagggttattttggcaatacaaagattttttctctggatcccccaggggtttcatctatttattaacatttgtggtatttcaattttcttcagcttgaaagatctaaccatgtgagccggacagaagtcagcagcaaccatgtcttgatttaccttgataaggtaagagaacttccagtctatttgcaaaaaaacgtagataataatcctctaagggaacatctgggaaggtaaatgcattttagaaacatcacttccatgctagaaatttgagaattctaatgttaactctaaaagaatgttcttctctcctttatttatatttcaccagggattacaggtagaaatggcttattatgatcttgggatatgaatattcctaaaatcccataagcaagaaatcttgacaaaatgtgtttattatgttgacaagttttttggatacccagtaatataaggaagtagcccttgtgattagtcaattattagttaattatcaacatactcaacaacaatatgaaagggaaaaaaaactgtcagtctccacaaggacttgaaccataaaataataagaccagttcaccagtaaaccaatctgattttatagatatgtgtggtaggagagtttgttcatgcataagttgatgggaattatagtttacaaattttatgaaacttaagcctgggaagatcaaccttttagagcctctttgagtctacgcaagtattcctgcaagacagagaagtcaaactataccaaatctctggatattaaaaaatgaacacagttagtcatccaataaaaagtatatatcatttacccccatgaacagagctatgtattggcattgacagaggtatatgcgttatgttagttatttaagaaataatctggagaatttatcatcccctctgagagatttctgcacaatttaattaaggaccctatagtgtgctgtaggataataaagcttttcccccaaaaaacaggtgaatacttaaactaattcaaagagagaagaaagcttcctgaaaggtcatttaattgacttttgctttccaggtgtcaaatcagacactgagcttgttcttcacggttctgcaagatgtcccagtaagagatctgaaaccagccatagtgaaagtctatgattactacgagacgggtgagtgagagtgattttcacgtagaaatatttaattcctgatcacagaaattcaggtttaggagatgtgttggggttatttattacattaagtaattacattatcacttcattttgtctccatcaagtctgatgcccctctttttgtctcttatacatacattatagaaacaacctacattataaatttatcaactactaatacaaaacacctgtgggatatttagttcccttttcatcagataaatggactgtatgacaatatgagatttaagtaagtagaacatctgaagagtccttcaggagtttgggataaaagaatatataaaacactatatttgaaaggagaatataaggtagcaagcaacacatcagatgaatgatgcttatgtttctggtacaatactgttcttcccacaacaaactccttccttggcctgtatcccacagatgtttgctttctttctcacttcatgtaatgatttctggttttttgttggttttttttttttcagatgagtttgcaattgctgagtacaatgctccttgcagcaaaggtaagccactcacactcctccaaaaggcagtcagagctccttcagcttgtcccccaaaccttctccttcataaaacgctgggtaaatatttgtcaaaaacatcaaattactcacactgcacattattatagaaaaacacatttattggagagggccgctgactctgtcaaacctcagagagtccataggattgcttatgggtaatgatttggaatagatttggtttcccactgtactgattaggtttccttgggcactatgctacccagaactaagggaaagaatactctctgctcatggagacccaaatctgtcttaattttttttctttccaatgtcacagatcttggaaatgcttgaagaccacaaggctgaaaagtgctttgctggagtcctgttctcagagctccacagaagacacgtgtttttgtatctttaaagacttgatgaataaacactttttctggtcaatgtctttccctgtttcctgttcattcaataaatatcattgtacatttccatatgattcccaatagaataccaagattaaacttaaaggaatcaagtgctgaaggacttcagaatacaaaaaaatgatacagtgatgtcggtctgagtaggcttcatgtaaggactgtggggaaagaagaaagtattgggttatgtactaggaaagtgtaaagtgtgtttggttatgggaataccctatgaaaaacccaaagggtgaatttttatgagaaaataaaagactgacttcaccagaaaagactttttacattaaaatgaagtagaatgaaatacaacattgaacaggtcatattgagaggcaagataattgggacttgacctgaattgggagtgatgtgtcctatgttacaccaaaatctgccactgatgagagtgatcagtcagttaacctggggtttcagattcaataatagatgagctgaaaataatgaagggaggattcatgcagaagcacgttttctcagaagaaggaatgtgtatgactcaaagtccaaataggagtattatattggatcatctttcttctggaactttgagccaggattaaaggatagctgtaaagtcaaggagatattctgatgcagaaatcagttctcacaacatctgattgatgtctgatgtctcacaacatctctttagtctatttttaaaatatataattttctttgcagtaagtattgcgacatatatttccattctatagaaggggaagcaaaacttcaggagtttttgaagtaggaaaggttaaagcaggaggattgagccaagagagtctgaggacaatcgtaggagtcctactcttcatttggcacaaaaatgacaatgcttagttaggcagaaggtgagtatggattgtataaactaagaactggaaaagactttgcagttcaaggaatccttagctctgtctccaggctagacaaaataagaaataaaagctatcacttctgtgtggtgcttatagaatagaattaacatatcagcattatgggatctttagggtgtcgctttcctggccagtctagtggcacctttgcctgagttttgctctgggcccactgggctgcttctgcccactcgcacttgctaccaacctggatcccggatccaagggagattgagacgggtggagcagaggggtgtgctaggggtgtgtgagcaagcgtggccactgtgcagtcacacacacaagctgctgcccaggttgggcagctccaggtgccagcacaggctctccatgaggtggctggaccaggcacacaacaaacagcttccccctggaccaggcgcatcacaagcagcttccaacagtggcactggcgaatgcagtgacgccaaccagggccccaaagagggagtcacagcccgggctcaaggagctcccaggtctgggcttctccgagggccagagctcttctctccctgtggggagcaaggggcatgttgcagccctgtttgtgttacagctcttttaaccttgctgtgcagctcctcagctcctgcatcaagcagacaagtggagaatgagacagatgaagaggagcattactgagcaatggaacagaaggataaggaagatgaagaggaaggagacctgcagttagtagctcatttccacagtaaggatgtcctttccacagcaagtgtgtcccaacgagtgttcagcttctagcagaaaggagaccctggagtggctggctcctctctgcaaacaggtcttcccattgagtgttcagctttcagcagagaggaggttctggaatgggtagtttctctccacaggtaggtcatccattgtcttcccatcctctcttccaatctagctgagtctgggggattttatgagcctcagagggaggaaatgcatgctgattggtccatgggcagccatgagtgggcccagggagcagcaccacaagttacctctctggtctgcaggcttcaagccctcaccagcttcagggtgggacttcactggggacccatccccttccacccaggaacctgtctgcctcctgctcccaggctgttcatgccaaggagcgcctgaaagtcagtgtccagctgtcttcagacccctctcagcctccctcccacgcttgttggtgcccaagttccaaagggggccgagacggcagggggctggcgtatcagcactgtcctgagcgtgtgcacgctcggccaggctgtgacagtacccaggctcggcccgaccttgctctgagttcagagtgggtgctaacagtggagagaagccaggcagccggagtaggcaccctggagcctgcagtgggcaggggactttgctgggcctctgagagcacagaaaatgtccacagccgcggcaaggtggctgcagctgcaccctgggagctcctgctccaccagttcggaaggggcggggctcctgcttgtccctggctcacctgctcctgagtgtgcaggtccggtggcgcctccttgcaggctgggctgatgggcgggggcgggggggggggggaggaagggaatgttccaggtcctccctgggcccgggactgtgtccggggcagggatgacgtcgctgcaagttcttcccgtggccccggggctcaggggcagcccaggactctccctcgcccggctcacggccctgcctggggggcgcctccgggagcagatcacgagccctggggctcagccctcaggcgcgtctagctcggcggtcaccccagtgccgggaggaccctgaagacgcgccccaggcggccctactcagagcctcctcccaaggcccaggaatgcggcgctgtcggaggtgtgcgcggtggccacaccgctgtccgggtccccaaagcgggccccgctcccacttctcgccttggccccgaaccctgggtccagccccagcgctttgtgtgcgaacaccgctccgccccggacccagctccgccttggggcccctctctgcctgcccctccgtgcccgactacactgcttcccctccggcgggcgactcagcccggtccatcgtggcggcttccagggcggcaggctccgggagtactcccggggccggctccaaggactgttcccctcctccccactcccactccgcggcggcggcgggcgagagcggcgacatagggccagggtccggagcggtggaggctcctggccggggagcacgtcgccccacccggcaacgcgaggatggtggcggcgcagtcggctgctttggggtctcaaggcacaggggacgcgaggcacagatgtcccacagcagccactgcggctcccgcagctgctccgccgccgctgcccgcccctccctgctgcagctggcgtgatggcagcggcagctctggacgccccactgctgccaccatcagccttgtgaaataggtactaccttaacaaatgaaattgaagcagagacatgtaatttgcccaaagttactaagttagtgacaaagctagaattcaagaccaagaagtctagcttccatgctcttaacttccaaccatggtgacacctcaaacaacttcagacaaaaaggccaggagaaagtatatttcagagcttaataaacattataattagctgtcaaattaagtatcaagccagggcacagaacataaaagaaatcagagtatggctatgggaacaagacaacaggattataattttacctcttggttctagtttttttctttgttcatatggaaatcgttactgaaaaggtactttaaggatatgcttgttgcaaatcattagctgtatcactgaccaagagtgtttattcctgaaatactaactgattgcctactatctgccaggcacaatatcccatgctataatacaaaattaaacaaaataggattcctcccttagaaaaactcaccgcagagtaaaagaaaaagatacacatctgggtcattataatgatcaggtgctcaagctattcattgccccagtggactggagatacaatggccttctcaagttttggggtattacactcaaattcatatgtaatactggagaaaaggcctaattacaactaaaactggatttcccaccagcctggtggcatgggaatcttggaattaaaattacgtagaatttttaaaagtgatgtatcttctacatctgattttgtgaactgaagtttattctttccaggaaagcatatagatacacgacaggaaatgaaatggatacttgttggggtcagttttatgtatagtttgtattttattttgaaatatgatacactgctattctcttgcattttcttatatgtgactcaccactaaccctatattcccccatttcaggccagttggtcataagcatccatttgcctcagagaatactgggttgttatgacaagaatataaagttggaaagaaatagaatatttgagtctaccctgtaagaataaaaagaataaaaggggtttaaatttatttagaccctattgtttaatcaagaattctggccaggagcagtggttcatgcctataatcccaatgctttaggaggccaaggcaggaggatcatttgaggccaagagtttgagaccagcctgggcaaattattgctcgggaaaaaaaggtcttatttagtattttagtctttacaatgtttttttctattatgcaatattctctcaaatactttatgtccatccacgttgtctgagacatgccactttaacattctagttaygctgtagctgtcattttaccctaagccgttagtagtactgatccacataaaattgggctgtttaggtgtttaactgtttaaatgtataatatatctgatatatttatatattgtataaaaaatcacctaacacaatagatatttactatgtctgctataaatatatatcatataacatataacaatatattataaatgataatatactataatataaaatataataaatatattataaatgtacaatatatccgatataaatatataaatatgtcaactatattatacatataaatgtatatgtataatatatacatatatgtataatacaatgtatttattatgtatatatataaatgtatatgtataatatataaatgtataatatatctgatataaacatatcagatatattatccatctattgtgtcaggtgattctttatacaatatataaatatatcagatatattatccatctattgtgtcaggtgattttttatacaatatataaatatatcagatacattatccatctattgtgtcaggtgattttttatacaatatataaatatatcagatatattatccatctattgtgtcaggtgattttttatacaatatataaatatatcagatatattacatatctattgtgtcaggtgatttcttatacgatatataaatatatcagatatattatccatctattgtgtcaggtgattttttatacactatataaatatatcagatatactatacagttcagcccatcaaagcaccatattttggggggttggtttccgtgtcccaacactagctacgaaaatattagctattagctacctataactcttcagtagtaaattcaagaaacgtaaagtaattctcttcattaagttcttgccttgtctactaaaaaaatggtcatcaccgatgtggacaatgaagacctgtggggttaaaagctctaactagtatgcctccaagattctttgattgcctgccatcatgatcgaagaataaataacttctttttcatcttatttatttattttttgtagagatagggtctcgctatgctgcccaggctggtctcaaactcctgggctcaagagatccttctacttaagcctctcaaagtgctggaattacaggggtgagtcaccacgactgaccattaataatttctttcaatgacactttaacataggctcattcatctttacctctaaagaaaagtctttctggtctttttaaaattatattttttggccaggcacaatggccaggtgcggtggctgacacctgtaatcctagcactttgggaggccaaggtaggaagattgcttgaggccaggagtgcaagaccaacctggcaaacatctggaaaacatagcaaggccccatctctattaaaaaaaaattaattctatttttctaagagaaaaaagattcccaattcaacaacacttttcaaaaactttatctggcagctactcaggagattgagatgggaggatcatatgaagcccaggaattcaaaaccagtgtgggcaacatagtgagatcctatctcataaaaaaataaaaaataaaaaaagctttacttggaatacaacccatgactctggttataaatacaaaattcttcaaattcatttaaaggaatttaatcctagcttctcggatgaaaaaaggaaataatattcacaatttgatccatcatcagtagacaagttaaatgtgtttcacaaaagcaagacatattaattaagcaaaatcatattcgagtaaccacaggaaatataaatatactgtctcttacctagagaaatcttatagtctaattgtgaagatagtcttcacgtgacgaaaaagatcatcattaatccaaaacatataagttataaagaagcgacatataccagcaattctaaaatctggttagcatcctttgtagaatttattttaaaatgcagatatccaggtctcatcaataaagatttaattaattatttttggggatgtgctcagacatctgcgttttttgttttttgttttcgtttttttgttttttgagatggagtctcactctgttgcccaggctggagtgcaatggcgcaatctcagctcactgcaacctctgctcccaggttcaagcaattcttctgcctcagcctccctaggagctggaactataggcgcccaccaccacgttgggctaacaggcatctatgtttttaatgaactctgtaggtggttctatcatgcagttagttttcagaaccattcacactgacagtaaaggctatttattcccagcagttgaaagaccactaaggacacaggaatggttagcaaagctacttaaagatgccagggctggggccgggtgcgatggctcacgcctgtaatcccagcactttgggaggccaaggtgggcagatcatgaggtcaggagatcgagaccatcctggctaacacaatgaagccccgtctctacaaacaaacaaacaaacaaacaaaatacaaaaaattagccggatgtggtggcrggcacctgtagtcccaactactcgggaggctgaggcagcagaatggcttgaacccaggaggcggagcttgcagtgagccgagatcacgccactgcactccagcctgggcgacagagcgaaactccatctcaaaaaaaaaaaaaaaaaaaaaaaaaaagatgccagggctggctgggcacagtggctcacacctgtaaccccaacactttggtttgggaggccaaggcggatggattgcttgagttcaggggttcaagaccagcccaggaaacatggcaaaacctcatctctaccaaaaacacaaaaattagccgggcatagtggcatgcacctgtggtcccagctactcaggaggctgaggtgggaggatagctggagcctgggaagctgcagtgatcagtgatcatgtcaccacactccagcctcggtgacagagcaagaacctgtctcaacatacatacatgcatatataaaattaaacataaaaacaaaaataaataaagatgtcagggcttatgttgaaccttaactgagagcaagattcaaaagacactgaggcttatttttctttcttatatctatagttacacagggagctgtctartcttggatgtatccaagttgatatctggttttatccattgaaacccacagtgaaaatggtaaataggtgctaggtgtttggatttttttaatccaatgtaagaataaaacaatggtatcctaataatgtcaaagcaacattggtcataatctaaggaaattgaattcatatagtaccaaatatatatttagcattgtgctaggtgctgatacattctagataaaaatattacacatgggtaaccaaaactgtcaaatgacatttcagggcaagatataattaagtaccaaaatcattggcatagtctttaagtactgtgaaatgtagagaaagctgagatgaatggcagtgtagagacagatggctttgcaaatcatctcagatgactagctatccaatgtgaggacacttctccctcaccttcaaacaaatgctaaagacgcctgttacttaatcatatgaatattcaatcttgtatctaatgtggtggtattcataatactctgtatatgttttcatcttactggacaagtgtcttcgaactcatttaaatgaatttaaccccagctttgtttatgtatagacttcttcaatctcatagtctatttgtctctttgtaccccacaggctttctttattcagtaacactggtgatttctcttattttccttagcttgaaagatctagccacgtgagcaggacagaagtgcacaacaaccatatcttgatttctgtggaccaggtggggcccctgccagccttgctagacagacccaggtgaacagtccttctaggggatctcatcaccaggcaagcacgtggtacgagaagagcagtcattaggaaggccatttggaaaagcacatcctctctgttcacgtgagatattttacatcctcattcctcatcgcaagcttcctgggatttggagtgtcacagacaagagggttgggggaggccagtaggtatggatttgtttatattaaaatgagcatatgaatatttatatgtttatattaaaacatatatgtttgtttatattacaatgagcatatgaatatttatatgtttatattaaaacatatatgtttgtttatattaaaatgagcatatgaatatttctgtatacttcagataaacattcttttccataaataagcttcatcatccagaagccatgttgaaagttggtaatcaaggataggaagtgtttccaagggttgtcagtgattaaatcaaccttaccttagcatacatgtatgagagaagttagataaattatacatagagagatagctagatagataatagataaataaggtagatgacagattagatacagatgataaacagatatgctatcagtctagatctattactcacagtcagtygtatcacagtgtaattccatcaacttcatttgcagcaaaagaacagcccctgatgtacgcctgtttcctgaatatttggaaatattaatattaatatagatagagtcagcttgccagtataaagaatctatctctcactataggcagagccatgtgttggatattatggaggaatatgtattattttaatcgtttaaaagactaataaacttctaatctacttttgggagcctctgctcaagttcctgaggttcctactctaaaatccacatcaccctccaactgctccctatgtgagccattagggagcacaatgaattagagaatgaatcctattagcccactaaaaaattatctttcaaaggatgaagactgatgctaaggaaaaagagatgaggcctccctggttccgcattattactccttcctttcttgggttacggattgaacactgaccttttctttcactcttctgcaagacaaccccataagaaagctgaaacctgcttttgtgaaagcctatgattactataagacaggtgagcaaaacagaatmctagataaactcagttctttccagtgtggtgtctttgatggaaaaataaaataaaagccaatgtgtttggggtttttttcttttttactttatatagatttagggggtacaagtatggttttgttacatggctacattgcacagtggtgaagtctgggctttgagtgtagccatcacccaattagagtacattgtacccattaagtgatttcccatccctcttgccctgtcaccctcccacccttctgagtctccagtatctgttatcccactctctatgtccatgtgtacaaattatttagctcccacttataagtgagaatgtgaagtatttgacctcctgtttctgagttatttcacttgagatagtagcaacawgggtggaagtggaggccaaacctcaattcttaaagsaataaaagtgtggtaaacccttgtacatcttgttttcagtttaatctgtctccataacttattttttcttccttggcctacaaaactactgccaaaactacctgtaatatacatgtatattgatatgtaagcctatcagtcgtgcaaaataatccaaagtaccaagagttttacgtagaagtgcttataaataaaggcatacataaatcttaaaaagataatatagcaatgcaaagaaataaagaagagcctaagaactatacaaataattatagtaggaactaagagaggggtgagaactatagcgttgagtggtctttaaacagcaaatgaagaggctgggcacagtggcttatgcctataatcccagcagtttgggaggccatggcagaatgatctcttaaagctagaagtttgagaccagcctgggcaactaagtgagagcccatctctacaaaaaattgaaaaataaaatcagccagcatgctggtacacacctgtagtagtcccagctactcaggaggctgaggcaggacgatcattggaacccaggagtttgaggctgcagtgagtgaaagagtgagaccccatccctaaaatacacacacacacacacacacacaccccccaagtaaaatttcagctggaatataaatcgtgggtattatactgatttatggagagaaktatgctaagtctttcagatgaggaaaacatataagaaatatcatgcaagaaaaaagaagcaaatatggaacaagaactgaaagaacacatacccgcgtgatcccccctagtactttgcttgaacactgtagcatgagcaggctttgattttccaccagagtaacggattatactaatggtatcaagagtggaaattccttgaccatgtctatatatttccccagtgagctgacatttttgtgatcacgcaggccctgattcagtatggtttgcagtccttaaataggtcaaagcctctccacatagccctgtcccgttgaagctcccattctcaagcttttctcccattgtgtgtttcagatgaagcaaatttgctgaatacagtgtcccctgcagccgataggcagtttgctctacatatcccaagccttcattttgctctcaaaagcagtyctcctaaatacaaaatcatctacatcttttattagttgatatcagatttatcatactgcaaggtaacgcagaactatacagctttggagaggaacactaacttcctggaaggtttcctgattttcttatcagaagagtgtaaatgaaattaccctgtgattagggtagatatctgatggattccattctcagccataaccagtttggtctcctttagcaaagccctgctgctgtccatatccaattagaattaaattcactccttggcaagcccgaagtcatcctgttcgctttcctcttctctccacaggcacagagcaagaaaatgtttgaggcttgtgtctataaacaagacttggctggaatccccagacccacgactttttaaaaggatattttgtccctgcaatacagatactgaatgaggttggcaaataaatatgtatttctagagactctataattgattccttcttcatttaatgcaaatttactccatgcgcacttactgcttttcattgtaccctgtatttgcaataaacaaataatggcatccaaattgaggtaagagcacctagcataaatttaggaacaattcacaacagcctcactactgcagaacctcagaatatgcaaagcaatgtaatggcaatctgggaaagtttcactccaagaaaaaacttctaaactgaagattagtgacaagagtgtagagtatatctgagtggaaacattttttgcaaaagcagaagaaatggtttattttagcaccaggtaaaatgactggcctgtctagatagaagctccgtattgcagaaaggtgaaaatttatcaatcaatcaattaattaataagttatgtttaggtgggagtcataatattacgacaatttcatggaattagaaatgcttaacttctggtccaaaatctgccactgaccatttgtatgactttgggttgaaaaacatctggatatcagttttatgtgtgtgacagaatcacgtgttattggagaagtataaataagtacaggtggcgtatcccttatccaaaatacttgggaccagaagtgttttgaattttgaattttttagatttgaaatatttgaagtatgcttaccagttgagtatccctaatccaaaaactggaaacccagaatgttccagtgagtatttcctcctagcatcacttcagcacttgaaaagtttcagattttggaacactttggatgtcagatttttggattagagatgctcaacctgtatagtagatcctctcttaacaccattgataggttcttagaaactgcaactttaaatgacatgacatagaacaaaaccaattttaccctaggctaatcaatataaccaaggaataagatctagtgttcagtagcaaaatagagcaactatagtaaacagtaatttactctccatttaaaaataactagaatagtagaattgtgttaggaaagctcctaacacaaataaataataaacgtttaatgtgatgaatatcccaattataagtgatcattacacgttgtatgcttgtataaaaatacatgtaccctataaatacatgcaactattatgtatccataaaaattaaagattaaagaagtccatgaactattatttttcataaagagtcataggaaaatttgcctttttaaaattttgcacataaccttggtaataaaaattatatttaaattttaaaaataaaatgagctgtttctacagcatatatctgatcacagaaacatcaccaaacttctaaatgaagacccaaaacatttctaatattgaacattgaaataaacatgataaataaataaaaacaaggcgactccccaatttatggtgaatcactgagtgacagcattcatagtgttacatgaccaacagattcgtatgaccagtgcacaataacagaccagttacactgagacagcagggtttgtagcagagaaagggtttaacgttcacagagcaccaagtgaggagatgtgaggggaccctcaaattcacctccctgaagagttctgggctggggcttttaaggggatcatggagggtgaggagctggagaattgggaccattgattggctggggtaaggagaatgaattcatcaggacatggaaactgcattctttggtgagtcagctcctatggggtccttcagaccagttgatgtcagtagtttcattagtatgcagcacctgaaaggatatctcaaatggaaaactttgcattttataatgttcaagttgttatctgtagagcagttaaggggaactacgatctagggtctgtgtgattctagggcaacaggcagcaaacaactaggaggaagcaggtccgagcacaggctgacctagtgcttaatgctgagtgtgctgcaagctgggtttattttcatttctccccctcccttcttccctgattaattttataaagtttatagggatggtttccgtagtggtgatgggttaaatcaaggaagaaatgtttacaaaccaaagttttggtaggaagtagcacctcctaccagcatgcagttcaacaacaaatgagaacaaatgtggtggggtcgcgagcattttcatcatgcatcatttattgccatgtatctgtatgattatcatctacttcacagggtagacatctgatggatcccattcttagccattaatttcacaaattattgtgaaattatgtattcattctttgtttctttttccaagctgtgtattctagttcagggtcacaggtggtcacagcctttcctggtagctcagggccaaggtgggaacaaccctgcacaggacaccccgtcgcaggcacactcacacccacactcacactcagactaggaccatttagatgtgccaacgaacctaatgtgcatatctctgggatttgcaaggaacccgaagtgcccagaggaaacccacacagacatggggagaatacgcaaactccacacagacaggtggccctggccattgtctcatcaacattataacaaaacgaggttgaacaggaacaatcttattggaggacctgctgtacaggaacaagttttctaaggagattaaaaaaatgtagaagcacaaaagagatagaagggttaattttttaaaaggcaatactgagtatctaccatctgcctggcactgctttaagcatttttctggtattaggtaattttatcctcacaatcacattatgatgtagatactattattaatcccatttttaaatgaaaaacagaagtttggagaagttcagaaactttcccaagctccaagtgaaaaatgaggcaagattttaacctaagcattccagctccagagtccatacccttaactacttctcagtgctactcagctgtgaggaaggagacggctgtctcttcttttgagatatcagatgatggtgggaggctgaatgcagaaggacagatgtgttcaaaagaagagaaagtatgtaaaagcaaagcagaaaaaagaaaaatggggcaaagaaaacaggaaaggcatctgtgagacccttgggtgagttcatgtctgagacctgttggcatcagcatggcgtgattgtccgtttcttgtgtgaggcatgtggcactggtagactgtgaccagtgctgctcacgatttgaatttgcccttcccaaagtcagactatgctgagggaggagaaaaggtaacacctacaaaacttcttgcttagagtctctttatttaaagattatgtggccctaccttctttcttcccagagtagagaaagaaaagagcctctcagtgtcctcgaaagagccaatagacttataattggataatacaatggagtccaagattatgaataatccactatcctgtatttaataaaagggtcagagaatctccatcctcagaattggatccagccatgcctgcagacgctcttatataaggcacatgagattcctgttgtaaatctcaatcacaagagagctgcatcagctggggcccagatttgcagggctccccaacaaatggacacaatagagaatgccaccttcgtgcatagtgctgtatttggtgggaaacgaaggaacagagaacatcctgttgattggtctctgactcttaatactctgatatttttgtctaattgcaatgaaaagatctaagtaaggcttaggacagaaaacagagcagttctcaattggggcctatgctaaaagagttagacatggtttaatgttgaaaagtcaggacagtgttgatggcagtgataaaaagtgaggctagagaaatcagttgagactcatttatcaagcgtgttaacagaagttttcatgttattttataagtaatggtcttaggggatttttgggggtgttgattttcccgtatgcagacaagtgaagggtgaacaagacaaagatgagctatactaagcgttagaacagctcagaggagacctgcagtggctagctctctgtagacaggttgtcctgacgtctgccatcaacagacaggaagcgtggagaggattgctcctctccgcagctggcctcctggaaagggttgctcgcctctgcaggtctctgaatctctcagcagagagggtagttcctctctgcagctggtcttcccattgtgtcatctctgtagacaggtcatcctgacatctgctgtcagcagagaggaagccctggagggggctgctcctctctgcagctggcctcttggaaagagttactcctctctgcagctggtaatcccgtctctggaagtctctgaagctctgagcagagagggtggttcctttctgcagctggtcttcccattgagtcctctctccgttctctccatcctatcttgttctggctgagcccagggcttttatggacctcggaggggaggaagtgtgtgccgattggtccatgggcaccatgggtgggcaggaagaggcactacaagtccccactccagttggtgggactggcagcctggcccccagccttcaggcccttcctgatctgaaggtggggccttactgggggcccgcccccttcctcccaggactctgcctcctgccaccattcatggctcccaagtcctcattccaagatccaagccagtgccaggagcagagagaggccaggcagtggaagcagacacccctgagcttgcgaacaggagtgtgggagggaccttcctgggcccatgagggtgcacactgcagagatgcccaggtcctgcgccaggggagctcccacctcggcaacttgaaaggggggaggttcccacgtgtccctggctcctgcctgctccgtggagcgcgaggcccaggtctgcagctgaggattgggcagctgcagctgcacccaaaagagcagatcctgcctactcccggccccctccgggagcacagggaggctcatatccacaagcgcatttgggcggctgtagccccacccaggaggacggggctcctgcctgcttcatagagcaggaagcctgggtctgcagctgaggtttggaggactgaggtttgcagggctgcagcagcacctgggggagcccccaccccaactcagaagaggcgaagctcccactggctgcatggggcatgatagcaagcagccactgccattaataggaagctaatgaaatcttttagagacaacacagcggcaagatcagattttgtttaggatgataacaagtggcagagctagtgtgagagagacaggtggcaaggagattattacagtcatccttatttctcatggaaaattttcctgaaaaatgggctataaggatattccacttcttaaaactgtatttcttaccgcttagggagagccaaaatgctttgcaccaatgtgacacgttttagaccaactgaaagtctacaaagagctctattttaataattaagtctactgtagatttcaggttcagcttcctacgaagattttttttctgaagtttattaaaatcaataattgacactaggtggcaagtcaggatcaacaattactgtgttcccagcgtagttatgcatcttgatttgaagtgaggaatgggggagtactatgataaggttagacacagactaatagcattctgaaagacatatactgatacataagacacgtatagcatatatcagattcatgccccagataccgagcagtattattttcaaatacgttttttatatgcttcccctacacttacttgttcctgtttggatggcttagcagaagctccaagatgcccctttcatatacagtaataaaagatagccacagggtggcagcaaaggttaaaaaagttgagtgctgctacttcattaaaaatctcgtaaaaaataaaaataaaaataaacttaggcaatgggaacagagaagagaggagtaaaataaccatagaaacctgaaatgagaaga

SEQ ID NO: 6961 - DNA, 57759 bp, Homo sapiens
ctcattctagtttttcaatattcttcttaacgaaaaattatttttgttactggtaattttattttttaaaagcatgctggccgggtgcagtggctcatgcctgtaatcccagcactttgggaggccgaggcgggcgaatcaccagaggtcaggagtttgagaccagcctggccaacacggtgaaaccctgtctctattaaaaacacaaaaattagcagggcgcaaaaattaggggtgcgcgcctgtagtcccagctactcgggaggctgaggcaggagaatcgcttggacctgggaggcagagcttacagtgagccaagatcatgccattgcactccagcctgggcaacaagagcaaaactctgtctcaaaaataaataaatatataaatataaataaataaataaaatcatgctgttcaaatgtcataagatactattataaaacaagatttctataagttcaggatactctaagaataagtttttgataattctttaagcttttatgtccagaaatttgaaaagttaattttgattaagtaataaataactttttctggcagctgtcgacacttgttggaggattggggtaacttagatggcataatccaggctataccttcgagtgtaaacttatctgccttgctctgacggcttgctatttgaacttcaaagagatttaaacaaattattaaaacactgtacttgttttgttgtgagaaaaagaggaaccaaaccctatgcttaataataatcatcagctctttcctgggtttggcaaacatgttttcatgtggttggtaccagccgctgatgagggtatctgcctttattttaaaaacaatcattagtttgtcattacaaacatgactaaattgctagcaatgtccttcataatcaagcaagatttgtcctcttctacaatcctttatatataatttatcctccattccaagaatattaaattctaaagtggctgacaataaatctcaaaagaaggcaacacattctacggaagaaaaaggagcaaataaaatagaattatatagaaatgaattagagaggcttgagcccctcaagttctgaaatgatttcactatctggcacatagtgatgatcattaaatgtttgctaaaggaataaaaattcaagcgttagggataattctacagcgagacatacattataagaaagtagttagctttcaacttcaaaatgtttgaaaactacttatgagttcaacatagcattgtagtcattaaaaaatactcagggcagggtgtggtggctcacgcctgtaatcctagcactttgggaggccaaggtgggtgaattacctgaggtcgggagtttgagaccagcctaaccaactatggagaaaccccatctctactaaaaatacaaaattagccgggcatgcaggctcatgcctgtaatcccagctactcggaaggctgaggcaggagaatcgcttgaacccgggaggtggaggttgtggtgagccaagatcgtgccattgcactctagcctgggcaacaagagcaaaactccttctcaaaaaaaacaaacaaaaacaaaacaaaacaaaatccgcagatattttcctagcatgatgtaattcaatctcttgtaatacaaattgatatattataaattacttcttgtatttccttctttcctttttcacgttgaaaaattcacttgggcaatttaggtagtagtagttaaaagtaacccatacatgagctattgggcctgggtagggccatccataatgacatgttcaagcaacaaactggacaaaagaaccttcggaatgcacttggttgttcaaaaatagcaggtggttgctttaaaaaaaaagactatggaattccgatttttctttgagaattttgtttattgcaataggattatcaaagaaaaattaaaaagtaataaaaaattttaaaaaagaattttgtagctacccttcctaaaaaacttacccagattacttcttgacctatactttgagagcagaggaagtctggctacattaactcagtagctctgcaacttctaggtacttttttacctgaacggtgtatcctaagtactgtaattcctgcattgcttgcacatttgcgtttattattccatccctgtattacaataaaattttttttttttttgagatggaatcttgccctgttacccaggctggagtgcagtggcgtgatctcggctcactgcaacctctgcctcccggattcaagcaattctcctgcctcagcctcccaagtagctgggattacaggcacgtgccaccatgcccggctaatttttttgtatttttagtagagacgaggtttcaccatattggccaggctggtctcaaactcctgaccttgtgatccacccacctcgacctcccaaaatgctgggattacaggcaggagccaccgcgtccggccacaataaatattctttacataaactttcaagagaaaaagcattcaaggtacgtgtgtgtgtgtgtacacacttacatatatgtatatatatactcctgtaaaccataattggagtttaaaaaatattattatggtatttacaattttctttcttttcttttcttttttttttgagatggagtctcgctctgtcacccaggttggagtgcagtggtgtgatttcagctcactgcaacctctgcctcctgggttcaatcgattctcctgcctcagcctcccaagtagctaggactacaggcgtgcaccaccatgcccggctaattttttgtatttttagtagagacggggtttcaccatgctgtccagactggtctcaaactcctgaccttgtgatccacccgcttcatcctcccaaagtgctgggattacaggcataagccaccgcgcctggccagtatttgcagttttcataccttcagaggcatataataatttgaaattatttttggaagatctgtcataagccaaataaatatttgagacaacccaggacaattgttaaaattctctttagaaagaaggcagaaatttatgattagggtccaatttgccaccagtggaacacagaaacagctattaagcttattcatttttattgtcataaggacagggctggcatatcaaccaatgtgaccactataacttccaaactcattttaggtcaaatgcaaaaattgtaaactaaagttctgattagcgataaacctgtaagaaccttgaaaatgtccattaattttttaaaattatatttatatatttattattattattattattttgagacagagtttagctcttgttgcccaggctggagtgcaatggcttgatctctcggctcaccacaacctctgtctcctggattcaagggattctcctgcctcagcctcccaagtagctaggattataggcatgtgccaccacgcccggctaattttgcatttttggtagagacggggtttctccatgttggtcaggctgctctcaaactccctacctcaggtaattcacccacattggcctcccaaagtgctgtgattacaggcgtgaggcacttcgcctggccattattattattttttgagacaagagtttcactccgtcacccaggctggagtgcagtagtgcgatttcggctcactgcaacctcagcctcccagattgaagtgattcttgtgccttagcctcccaagtagctggaattacaggtctgtgcgaaaatgcccagctaatttatatatttattatatatatatatatatattttttttttttttttgagacagagtcttgctctattgtccaggctggagtgcagtggcgtgatcttggctcactgcaacctccgcctctcgggttcaggcaattctcctgcctcagcctcctgagtagctaggattacaggcatgtgccaccacatctcagcctctcgagttgcagggattacaggtgagtgccaccatgccccactaatttttgtatttttagtagagacagggtttcactatgttggccaggctggtcttgaactcctgacctcaggtgatccacttgccttggcttcccaaagtgctgggattacaggggtgagccaccatgcccggctaatttttatatttttagcagaggcaggttttcaccatgttggccaggctggtctcgaactcctgacctcatgtgatctgcctgccttggcctcccaaagtgctaggattacaggtgtgaggcgctgtgcccagccgtttattacattaaaaaaaaattttcctagccaactaatgcatgcaagatgtcagtatatattatctgatgtgcactgtgtcaggcactggaatacaaagatgggtaagaaaggcataaaatccttgtctttaaggagctcatattttaatgagaggtgtcctttttctttctgttttttgtttttgtttttgtttttgttttgagacagtcttgctctgtcgcccaggctggggtgcagtggcgcaatctctgctcactgcaacctccgcctcccaggttcaagcgattctcctgcctcaggctcccgaatagctgggattacaggtgcccaccaccacgccaggctatcttttcaggtatttataatatagttttcatatacagttacaggaatagtatgttacagaacctaaagaaaaataaagaagtattagttgaggagttcagaagtgggtttatactgtatgtactaggaattgcctgttgaattaaattaacatttcagaagtaactatttaaatctgtattgttgacactgcagtgaaagcagcgaaacgtgtcagcagatgattaagttttatggttgattttcacacttttgtaacttgggaccaatatcaagtttctgggaaaaacatccttcctctctccccaccctctatcattaaccccgggtttctgcctgttggtgttaagtgtgtccttgggacaaaggcgaatcaatcattcggttttcattttcctcttatcaatctgagaagagttacttcagtttttttcttccggagtctagaaagcgcttagattgttgaattattacatattctgcattgaaaagtctgtacgtcactcgttattttttccattcccaagaccaccagttactggaattatttctgggtgagtggaacaccctttacaagctgctagaggaggtatgcctgtccctaggttattggctttccaatgcctagtcttttaaagaaagcggcactgttcccacggaaattaacaatcattcaattcggagagacttgaaatcttaaggccgaagtggaggaaaaaactggattgttatgggttgggttactatttgagaagggcaagcgggagttagcgaatggctagggtgttaaaatgggactttattaaacgactcattacaactgcacaaaaactaaacctttgctggccccagaggattttttttttacaagcttcaaaaacctaacttcaaacaaaatttaggaaacgtgggattagtataaattcagtctgggtgcttacaagaccacctcctctgtcaccgacagtggggacaggtgtgagaattttgcaaaagcagctttcagaacaatttttcagcgctcaatggtgcccctaacaacttcgggggcggaaaacacgccaagcagcgcagccctcccctcagttgctaacctttccctttcccacctcgcctctccctctccgccgcggcctgcagccgggggggggggcgtttgtttatgtgacgtccgccgtagtaagcagtccccgcccccgtttccctctggccgccgcgtttcccgcgccgcggagcttctccccttaaaaggacaatagaggcctcgggagcgcgcgcggtcgccgggacttctccccctcccagcccgcaacgtgcgcgcgcccgtatgcaaataagttcgattcaagagaattttgtgccgggagccgcgcgtgcgcagagggaaagcggaatctacaccttcccggccagcggtagcaactgcagaactgcaggagactatctttctagacaaggcagttgaggaggagggagcgcttgagggggactggcctggcgtgcactccgcacctcggggacattattgcgcgtggaacggctgcttttggaaggtgagtgactctcaccatgcttctagtgcaaaactgtctcacgaggctttgatttcagtgtttttttttttctcttttcacctccacccacctccccccgtccttccacatacacacaggaagttttgtcttggaggtggcattgttgggagcgctgttttcgtgatcttcagaccccaggttctttggtacgctcgtgtttagtgtgtatttattaattggggagggtatttgaggcaaaccgaaagtctcggggcggggaagtgagtggagcctgggcataattgaggagtcgccggagttgagggatccacgttgaaggtgacaatgacttttctccgccgcagtgttctctcgcggaaaggagcccggcggccgaaaggcccgagaggaaagcgactcgttggccaccgcgcagcggccggggtcggtgcgtccgcgtgggcgcgaggcgcgggcagggtcgggcgccgttgtgaaacctcgtggtttagttgactgcagccctcggactagggtggacaataaacgccattcgctcggaaactaagttgccatccgcttccgagctggcggccgagggtctttaaatcggcctttgggggtcagtgctgggctctgccggagcgcacgcggcgtggcgttgtttgctcaactccggagggatgcggatgcgacaatgagagcaacacgcggtcgcttaaaaacagcccgtcttccactcgcctgccctcttcggaccgcgcccaagagcctctggtgtccggggtgctttcggagcccgaagttttgctcccggtgcgttcacctgtagcgtaggtgtgggcgacaccgcgagggcttcccgtttatgggcggccgtccgcgctgtaagatggccagggaagccaacttggctggagatggaggcggcggcgttgtstacgccgcgggagtcagtgaactcygcagggcactgctttttgtgctctacgtgacagaccacgtgcttcgggctgcgaccctggtccttgtccgaatgtccagccccgcgtgagccgtgggatgcggccgccgtcgggcaggtccggccggcaggacaatgtggtttgctgatgatggcgtcttgccagtttaaaaagcagagtgaaagtcgccaactctccgcccgtgcggggcggatactccgggcgtttctcatcaaggacactgcaaaactttgattaaatgggcctgctcccgaggggagggtcggggggccaggctccggactcttcggggcgcggggtccggacccctacccagggtgatcgtccagtgtccggcccctgcgaaacgctccgacatccctgatgctgcacgtaggcagcgcccggctggacagaaaacaaagggctgcatgtgcccgtgcgggcccccggcgctcggggccgccgcctgggcgtagggccgtgcaggtcggaggccctcgaagttcgggcgagtttcgggaggggcttttgtccctcagccccctcgtggggaaactttggcggcgctacttgtgcgaggtgccatgctggtgcgtagggaggcggcgtgcttccccgctccgggcgtgcgggcgggcgaccgagggaggcggcagtgcccggcgcttcagccctggcgtcgggggttgcgacggccgagggttccggggagcttggcccggactgctcggccggtttctcgtggcccgggagcctgtgtctgggaggtctgtgggttcgcctttgaagtcgaactgttgccatgtttgaattacgtcagggcaaagccatgaggaggaacaagccccggcagcgcggcgtgcgggaggcgcggcctgcgggaggcgccgggccgggctggcgcggggcccgttgttccggcgcaggtgagggaggtggcggcgagcgacgcggttcacctcccgctgccctcgccctcgccccggcgagcggcccccgcaggaactttcctcccgacgcgagatgtcttatttaccaacaaatccaccagggagcattcttacttgctggctcggcgtctctctcggcagtcaccggagtgcccgagggggaagcacgatttacggaaggtggggacccgagggccctgggaggagcggggaggcattttactgctttcagagaaacgggtgagggcggcgagcacctcctccccagccgagctgtggcccgcaagtccaggggacccagccccgacgacgcccgataaaccaccgtggggaagttccggggctccctgttgccctactaagggaagtgaggactgtgggcgaattgtgcgtgcggccagtttctttgtgtgtttctagggggtggggggagcggggaagggcaaggtttgttttggtgtagggggagttggtttcttgaggtggtagggcggtgcagtttgttctggtaactatgaccctagtcagtttctttgtttttattttcttcctgtaaccttccattacttcaggcactcggaagattaggatttactcttgagttaaacagggaccctatccgagacagttttaccccagcaattctttctcccccttcttaagttgtcctaaggagggttaagaaaagcttttctttttcttttaataatttaaaaatgaatttgaccttgttattcagagtacgctgaaagcacctgtttttgaactggaatttgccagacttgaaaagccttttaaaattttatgtcgcaaaattgaacacatttagttgcccaatctaaaagtctgggagtttgtttctggtggagtttcggagaaaaccctcatggcatttaaagtatttatataatgattttgggaagggggatcttttttaggcgaaaggtatgcgtgactcagtgtttggtggttattcagtgccttaggatgaccttgaagaagcaaatgtttagggagttgggccttttggaaacattgtaaggaggctggggagctggctggggaggaagctgctcaggaagatgacacagggtaacggctagcttcttcccagatcccgtgaactgtggttgaccttctggttacctctcctagatttttcttttcaagctaaccttttctttttttgtatgtggccccaggcatagctcaaaaattatgctggtttgacacatggatgcttctttggtatttggggtttgcctgtagtctagacatccgatacccaccaccatatctgttgcttctttcctgatttctcctgcatttgaatcatgtgtaaggcctagaatctaagtgatcattactaggaaataatacccttgaatgcccctgcccccacacacctaaaaatcgatactagttgaaatccattttttttcattattttgttattaataaacctatttttcccaagttttggttgaccaaattacaataccaaaaggcaacctatattagtacatttctgtagtaaatagaaagagcatgtyaggaaaatgaaaaactttggacctatttttcccaagttttggttgaccaaattacaataccaaaaggcaacctatattagtacatttctgtattaaatagaaagagcatgtcaagaaaatgaaaaactttggatttaataactttggctttcctttcgcagctatttctctgggtcctgtatttaaaatgcatatgaggtgctttgcaaatacgctgagattgtttgagttgtttttcttaattagtatttcatagctaagttatggctagaatttccatttcctagcagatttcatatactacatacagagcttaatggtttttgttttactaattagatgatgtaaaacagagatttggattatcaatgtgaatgaattcagggtgggaaagacccacagacaaggtctctactgccttctctttgtattgcttttgtgggaggttggagatacgaagttcaattggtagaatattctagatcactggtggacagcaggccccaagtctgtctgtccttgcacagtattcttaattctgtatatctggaacctgaatggtcaatttttttttttttcccccagagtggttatcaagtcctgggaaatcctgactcatagggctcaaactcagacatatttatgtcagagaagcaatttaagaaccattttacatgtaaaataaaagtttttcactggggaaagcataaacttttaaatctaaaccaactatacagggctcttatgaggataaattaatcaatttaccatgccaggcacatagtaggttgctttaaaagtatgtcattttcgttttttcttaagagatggtaggaatataattggttgagcagaaaaggaacacatgtattgaggcacgaagttttgctgttcagaggtttctgggttagtaatgcttgggtttcaaagctgtcatcatcttatagtcactttgtgatccagtttttttcatctgtaaaatggtagtaatacctattttaaataagttgtaattaagccagtgacatgattgataaatattagctgtgttgtcctcacaacactgggaagtagacattttacagaagataaaactgaggcctgtgtcagttatcgtttctggggaaacattaagtaaatttttagtggaaagaatgagtgtctttggtcccctcccttaccttaagaaagcagttctgggaagacactgcccttgactcttggttgtcttttcaattctgattcaaccattttacatcagaaagtcctgcggaaacctggaaaatgtcatttttctttcttcctgatttctcttgtccacaagattgtcttgtatttcccacacttaagttttgattttggggtgttataaattgagacttttttgttgtcttttgtttctccagttttttattgaatctgcaactaggatttttctgtattatggaaataatctggaaatgtcatctagtccaaaaagggagtttgttttcaaggtagggaggttttctctttgcctcagaaatactaatgtcacaggtacaccgctgttacatattcaagtatgaaagttacagttgaactaaaagaatttatttctagctttgtatttagttgttttccacctattataagtttggtttggcttactgttattttaatttggtaaatgttaactgtgctgagttgaagtagctctcatttctcatttctccccacactagtctaatttccttccccctgctcctgcttgaaataagcaagaaacattttttcctatagcttttaaaacctcaggttttttttcctgcaaaagtctatagaccaaatgttaaaaaaagactcctttttaaaaacattaaaaatatttctatgatcaatagtgcaaacaatgactcctttcaaaacattagtttttaaaattcacgtctttattgtagacaccatttcccattccatgcccttaaatatactgtttatattaatcttggctgccccactctttgagtagttagcaaattctacccgtttctgtgtactatgtacagccagcacctggttgtaatacaagacttagtttctgctctacagcggtttactattgagtagaggagataatgcagtaaacaagaagtgaaatcttatgtggtaggtgttctaataaaggtatggaagggttttgtaaaataagtaattcttaagagaatttcccaggtcaaggggatagagggtaagccgtctcaggcagaaataacagcctgagtagagggtggctagttattaaagtttgtttgacactcctagaatatcagaattccaagttgggagcagctggtaggcaggagcagatcctgaaaagctttgaattccttgccaaggagtttagatactatcatgaagccagtgttggtaccttggaagggaagattagtagttgaactttaggaagatatcacatgtttaaaggatgtagggaagtcagttacaaggttctgacaggagttcatgcaccatgatgaggaacaaacaggcagtggggatggaagtgaaggaagaaacagaatttctaaggacttcacaataaatttgatggagggccatgcagagggtgaaggaagagctcagttggcttccaagttgtttttgtgtgactgtggatgacaaccaagataggtaaatagaggaagagcagatttggagggaagattatataatcaattctcagggtatttaaagattggaatggattggtggtcagttggccatatttatcctagagctaaggggagagattggaccagggaatgaataataggtattaccaataaggttggttagtaacttcctgcgagtggattgcccaaagacagaaagcaaaatgatacctgaaatgtaagaggaaaaaaagagagaaagaagaaagattggtgagtaaaaagaattgtcagagctgagtgcataccttgtgccgatctttgtgttgatgttgtgttgatgctttacagatactattcaggagatttggatttgtcattattattttgagactgagctttgctcttgttgcctaaactggagttcagtggtgcgatcttggctcactgcaacctctgcctctgggttcaggcaattctcctgcctcagcctcctgagtagctgggattacaggcgcacgccaccaggctgggctaattttttgtatttttagtagaaacggtgtttcaccatgttagccagactggtctcgaactcctgaccaggtgatccacctgcctctgcctcccatagtgctgggattacaggcgtgagccactgtgcccggcctgtcattattttatagatgaggaaacaggattagtgaggttaaggaactttcctgaggtttgggtcaaatcaggtgtgtatactatcatgtatccattttcttaacatttttctcaagtttgaaaatgggagaacagcttcatagaggagtatatggggcttttcatgaccttaaagtctccctgaaaaggctaagttcctcttttcccacagacctgggcttaaaagaaaatctttagtaatcagaattttaccttcagttaaatttgttgtatatatcttgggatagatagcatttatttttctgtaatgtgcaactcttataaattcaaggaaataaacagaatttcccaatgttacagaagggcaaataaaattaggagtgacttcctatttagttgtaaagacagaagcagaaatatactccaaattgactcattgcagacccaagtatggttatattttctaactcataatcatccattaaaagcaaataaatattctttctgacactttcagttttttttttcatgtactggaattcctcttaatctagaattgggagacctagttttgtttctctttttttttttttcgctctaccaaaattggaggggcctggtgttttacactatctaaagcccagagacttgaatttgtaattttatttttaacctatgccatttcagttgaagacttgtttatttctgagtttgacctctttcctatataggatgagttttaggctcttctgccaagtgtggattccatagacagccacagttataaatgctttaccatataatttctcagagacagggcacatgtttgaagaggctgttggcaaacaagtggggtctgctacccctttctcagttttattctagacagatttacatttatcccttaaagttagctaaattcaggaattttgctgagatgtaggctgctatctagaagcaggtaagaggaaataatgtcttactgctccatgggtttccttaactgcagatgaaacatgtctcattattggggaatactgcagccaaatagcctagccgcgggagaatacaaagcatttagtcctgttgaccgtttgtgaaaagtgttgctccagttacactgttagtgtttactggatgctgtacttaaatgtgattaatgatagcatatgattgactaaaatggtgtcagtggtggcattaccaattacaggaactcaagtatccccacagtttgtgatcgcgagtattttttcgtgttatttcttttcctttcccatcatcatgatttctagtttggctctaaagaaatgcatctccttcacttcaaagttgtctttggttgcttagttctttttgtctttgttcactgctgcttccttcccactttacaaatctttcgcttgtctcctgtctgcagtttccttcccattctgctctgtgtgtatttagatcttaccagtctatttcgtagtctctcccatggagtgtattttctaatttgtatctctccatctgtatgtctttgaggaagtttatttaagctctctgtgcttttttagattactcttaaggtgtgtcttgataaccaaggttattggagagtgatgctcttggttaaaaaaaaaaaagcaggaggtagtaaagtgaaagtaagcttcttttatgcttgtactcctcagaggcaaccactatttactatttttaagaaccaatttaaaaagaagtttgtgtagttacagtctcattttaaaaacatcctgtgagattatactgtattactactgttcaacttgctttaaaggttgaaacagcgtgctgtggtgtttcaaccataatttaaccagtctgaaaattcgttgacatttaagtcacttcaactatcttgtgttttttttttgtttttaaagacttaggccagttgatttttagaaagaaaaaaatgataattagaagctagggttttggtttattggaaacttaaggatagtttcatttgggaggttgttcccctaatttgtgcatatcagaatttcagttcccaagatgacttggacagttgtgaagttaactgttatttaccacgtttgactattgctctcaattttcttccatctagtccacccagtggtattactgagttttgaaaggtacttttgaatattaaaaaacgctttacttctgaatatataaaaaagccagaagaaggaatctagaaagtggaattggggaagttagagtaaataatgatgtccttyaaagcatgcatgccaactaaggtgaacttaacatatgttaaattcatcgtaataagaaccctctccatatccttaaatgtgagttaacacccttataaagatttaaaaagacaagaaaatagttgaattaaattcatcaccttttctctgtctcctattccatattaaaaagggtactaaagctctaaaatttgcatttcagtatttttcattctgtttcctggttggagcttaaaatgaacaagtatttagtattgctgagatttataagagataatctttaatcttatttatcagaaaacttttcttaaatagcgtctttaatataaactatcgctgtgaaactctttttctttcctatgtatattattatattcagtaaacttatgtgtttaattagatgtaaaattagacgttattcttgatctttggcttcccaatttcattagatgggattagaattgtcccttttgtgtctttgatatattgtggttatctcatccctttcttgactcatcagcaccaaggttagattcattaagttagattcattaagatcattaaatttatatgaaacccacagctttaaagtagaagaaaaccctacaaatcagccaaaacagatgtttagaattgattgttgtgttttaaaactttatttttttgtttatatatattgtccatataattagttatctttttaaattgcttttgctgacttagctattacctttaatcttttttaactttgggatattcagtttatttggtcagagctataattatggcatggttttttttttattttttatttttgagatgaatttttgctcttgtccccaaggctggagtgcagtggcacaatctcggctcactgcatactctgcctcccgggttcaagcaattctgctgcctcagcctcctgagtagctgagatttacaggcgtctgccactactacgcctggcaaatttttttatatttagtagagacagggttgcgtcatgttggtcaggctggtctcaaactcctgacctcaggtgatccacccaccttggcatcccaaagtgctgggattataggcttgagccaccacgcccggccatggttgattgtttttaactgttacagtattaaaacaatttttgggtttttggctaatagtagtcaaagaaagaatgccagtgaaagtgctttataaaatgtaaagtgctatacaaatgacaacttaaaatttaagcaacacatttattacacctgtgaaagcaaataaaagaaaaaactgatcaacacagtcctcctctaaatttctttctggcccaggaatgtgtgtatattgcaaaaacagctatgtcagagataagcgttacaaactcccataaataggcatgttttaactgtaacctttcaaatcctgaggaacttctcaaaatgtttgtcctatttgaagaaacttcagacagcatactgtagacagatagatgatgatagatggtgtcagaagaaaagataaaactggtccaagatggctgcagtttggacatatgcataattaaaccactgcctacaaactaaagctgaccccttgggtttgtaactggagtttgttaaatattttactgacagatactggttgtaaacttgtttatcagatacagaacaaaggcaggatggaatcaatcatccttccaccagaccctaaggtgcctacacaattattaacttttctcttctacccactcaaccacatatttacttgactttaggcataacatcactgaatatgaaccaaattctcaactattgcttcaccataccgcacatattttcctgtttaaaaaatatataaagactgtgcctcatgcagtctacttcagagcacaggtaataagctactggaacttgtgcttcctgggtgcgcatcctcaagctttgtgtttgcaagcagcacattcagattcagaacacctcctgacttagtcaatctaatgagaaggtattaaaaattatggagaacaaatcctctaaatcgactaaatcccctgcaactgcagaacatctgattccacctttagaaaccccagctgggttaatatacagtacttggggtgcctcattgtgtaattacttaaacaaatggaccaggatgactgaagaatgactccacatcacaatggcctaaatgcagatcctttgatatatgcagaccaggatggaaggtgctagtgcaaaaattaagcaaccagaatggggaaactacttccagtggtatcttgaaagtagcaaaagtgggtaggatgatctttcttccttatagaatgctgataaacaacttagaggtgttaacagatagctctcaaatatactctcctattaaaaaaaaaaaatcttcagaagtacctctctttgggcctccttcaccacctacaccttcactctatcttcatctttcttttttttttgagacggagtctcgctctgttgcccaggctggagtgcaatggcgcgatctcggctcactgcaaactccgcctcccgggttcgcgccattcttctgcctcagccttcagagtggctgggattacaggcgcccgccaccacgcccggctatttttttttgtatttttagtagagacagggtttcaccgtgttaggcaggatggtctcaatcttgtgacctcgtgatccgcccgcctcgcctcctaaactgctgggattacaggcgtgagccactgtgccctgccactctatcttcatctttctaactctccaggctggatctgatttttcttcttctgccatctctttctccttgtctgccacttgttagactgtgacaggaaacacggctccaaaggcccctgctcttgttgtccttccacctaccctggcagcaacctcttgttcagaagtgacggacaggaactccacaggaatgcttcctgtggttgcctcattctgggaacagcctatgataggtgggggattcctaattctctttctcttttttttaagggattaaaacatttaattggccgggcgtggtggctcacgcctgtaatcccagcactttgggaggctgaggagggtggatcatctgaggtcaggagttcgagaccagcctagcctggtcattatggtgaaaccccatctctactaaaaatacaaaaaattagccgggcgaggtggtgggcacctgtaatcccagctacttgggaggctgaggcaggagaatcgcttgaacccaggaggtggaggttgcagtgagccgagatcgtgccattgcactccagcctgggcaacaagagcgaaactccgtctcagaaaaaacaaacaaacaaacaaaaaaacatttaattacacatatacacmcagatattacacatattcagtgcattcagaatcccagcaggatgtttgtggaaattaacaacttattctgaaattgttttgataatgaatagggccaagaatagccaagataatcttaaagaataaagttgaaagacttatcaggtatgacttataaagctgtagtaattaagatagtattagtggataatatacaattatatgaaaagaatagagcattcagatacagccccatattgaatttatgacagcagtaccactgcagtgcaataaagaaaagagtgatcttggctgcatggggtggctcacacctgtaatcccagcacttcgggaggccgaggcaggtggatcacctgaggtcaggagttcgagaccagcctggccaatatggtgaaaccgtctctactaaaaatacaaaaaaaaaatagctgggcgtggtggcgggtacctgtaatctcagctacttgggaggctgaggcaggagaatcgcctgaacccaggaggtggaggttgcagtgagccgagatcgtgccattgcactccagcctgggcaacgagagcaaaactgcstctcaaaaaaaaagaaaagagtgatcttttcattaaatggtgctgggtgatctacatatccatggggaagagggccagggaagaatctttgacccttacctttaatgccatgtaaaaatatcacaaattctagaacaattaaaatctaaatttgaaaggaaaacaaacttctggaagataataatggagattattttcccgacctggaggaaagcaaagatttcttaatcaggacgcaaaaagagctagctacaaaagaaaatgctgataatttgtactacattaaaattaggaacttaagttcctcaagactcagttaaatgagtaacagtgaacagagtaaagacatctatgaaacatataaccaccacaggtcttgtatccagaagataagcacatgactgaagaggatacctaaatggccaataagttctaggacccatttggaatcagggaaatgcttatcaaaaccacactgagataccactgaaataacaaatgactgataccaagtgttggcaaatatctgaaataaatggagccttcatacaatgatggtatgagtgttaactggtaccatcattttaggaaacagtttagcaagatctactgaaggtaaatttacacattttctatgacccagcagttctattcctagaaatacacacactcacacacacacacacacaaaatacgtaaaacaatgttgaaaacacattacttgtagtagccaaaactgaaaatgtcccaaaatgtctatcgaccctagaatggatatgctgtcacacaacggaattctatacagtgaagaaaaataaaaaatacagcatggataaatctcacaaatgttgaacaaaagaagccagactgaaagagtacattctgtatagttccaattaagtttaaaaacaggaaaaaccaattgatggtgataaatgtcagttgttaccattgggaccagggaacagtgactgggatgacacctgtagactgctggtaccatcctctttctgatcaaaagttacttctcctttgccagctttgtcaaacagctagctgaaaggctaccataaacaaagtatcaggggcacccaggaccaatcaaaaggccacacattcttgaaaagatactagtcattaaaatggaaatagctggtggatgccaccttcatcaagtgatcaaacttagcatcatcaacgctgggacaacattcctcccatctttggtctgacccaccaccccacttaaaagttccacagtctttgggttaggctggctttctccagaaatgttcaagtatggagtgataaagtcaytgggagacatgaaaaattcaccatttttctcaatgcttgcatacttcaaaaatattgttataagctcagttggatctgctctctcagttaaagccaccttggcagccgccatgcttggccctgggtccagggggctgcgggacccactcactggcttgctcatgctcggtcccagtggttcacttccagtaccagcagcgtgtgtgcccggcctgcctggagtcctgattctctatcaaccctagtcgaaggccaaattatgggccatagttaaggaatttcctgacccttatgaagatcggatttgctttaccaaagaatttgaactcmcaattaaaatctatgacccaggtcattctgacatttatcggcttgtctacatgctggtttcagctgcttaagctaaggaatagctagaaaaagcacagtgtggttggatcccctaacagatcttgttcctgaaaatccagtatgacctctgccacagccaactccccagctttcagaagatggctcaaagacgcgtgggtatgagcagcttctctgttaaatgccattcccttgtttttttcaaaagatcatagattacggccggacactttgggaggccaaggcgggtggatcatgaggtcaggagttcgaggccagcctggccaactggtgaaaccccatctctactaaaaatacaaaaatcagccagtcgtggtggcacacacctgtaatcttagttcctcaggaggctgaggcaggagaattgcttgaacctcagaggcggaggttgcaatgagckgagattgtaccactgcactccagcctggcgacagagtgagactctctcaggaaaaaaaaaaaaaaaaagatcgtagattagattaaaatccagcgatgctgccagaatccagatgggcctgttgtagatttttttacccactttgataaaacatgaaaacaatattgcagatgtcaatggacaactttgaaaacaataaaaatgacatattattaaaatttcccaaacaatttgggtgatgcactacccactcttgtcaaatgtcacatgactgactaggtgatggccagaactaatgactggtcaactggctgaccagttgtcctgcacaatgatgaaaaaggaaaatcaaaaggctgtacacttaacaatggtaacacttaacctcttaaaactcccaggctaggaagtcttggtcctaagaactcttctccccttgtctgtcactactacaagaaactaggcattttaaaaggaattgcaggacattgaaatggaaacaggatgataaactggaaaactaggactcctctgaggaaatagggggttttcatttctcccaatatgctgctttaactcactctttgggagaaattaacacaatagtaggcacaggagctcctgtatcagttataaattccaccttacttgaaaaccccatttctcagaggaatgaaaaagttaacatggtgggtatacctaataaacccatcccttgctttaagttcacatctttgctttagtggttcattgggtttggcttcctcccaagggctgtgaatgtgatacccttagccaatcccatgttttcctgatatgcccagaagtacctgtttaaccttctggattgaaatttccacgacatccataatgctcatctctttttccttaaagtgggaaatgttgctggaactgaaatcatgggattggggaaagcaaaccaaaaaatgccctcataatatatcacaagttggccgggcacggtggctcacgcttgtaatcccagcactttggtaggctgaggcaggtggatcacctgagctcgggaggttgagaccagcctgaccaacatggaaaaaccccatctctactaagaaaatacaaaattagccgagcgtggtggtgcattcctgtgatcccagctactccggaggcttaggcaggagaattgcttgaacctgggaggcggaggttgcggtgagccgagatcacaccattgcactccagcctgggcgacagagtgagactccgtctcaaaaaaaaaaaaaaaaaaatcacaagttgatgttagtggtgtaaagacaccttcatgtgattgggaaaatgagaaaacaaaatgaaatataataaagggaaggaaaccataaggctccttttaaacttcaacttttctactaatgccagaagctaagcttttacttgaaactatttcttacctgctgtggtcccagtctaacataggcataggaaagatactctcagctactccaataaaggttgagattaacactaagaatcccttgcttaacgtaaaataatagccactatggcaagaagccatagatggagttgccccaatcatgagattatcttgagagaggttttattattccctgcatcagtccctgcaacacccccattttccttgtcaaggaaccaaatgggaaggggatggagatttgtacaaaacttacgggctgtagacagtattataatacctagatatccagtgcttcttaaccttcatacacctgtctgccataccaaatatcaaggatgatagtgttctttttttttttttttttttttttgagacagaatctcactctgtcacctaggctggagtacagtggcacaatctcagctcactgcagcctccacctcctgggatcaagtgattctcctgcctcagcctgccaggtagctaggattacagatgtgtaccaccacacctggcttatttttgtatttttagtagagacggggtttcatgatgttggccaggctggtctcgaactcctgacctcaagtgatccacccgcctcagcctcccaaagtgctgggattataggtgtgagccactgtgcctgtccctgacgatatttttcagttgcggatctctgtagtgcctttttaaagcatccctatacatctaggtagtcagtatttgtttgccttttcctggagagaatgacggtatacttggactgtgatgtcacagggatatacagcgccccacttacttttcccaaatactgaaatatgaatttagcagactcggacttctctcaggggatcctcatccctcatccagtgtatgcatacctcctcctttgctctgacacactttcttcctctgaagaagaaaacttgtacttacttcaacaattgaccattacattaagggtaaactttaattttgtctttctcaagtcaaacatgtggcacatgttatgtcagccaaaggattgagcatcaatcctgatagaatcaaaggaatcttagcttttttgatgcttcctactaaaaaatagcttagagggttcttggagttggcctgctgttgtggaagctggatactaaatttttattgtgtgactcaacccttttgtacctgtttaaagaatgaccagcctgatcccatcatgtggactcgtgagggacagccagctgtgcaacaaattaaagaaagattagtaggccaggcgcggtggttcacgcctgtaatcccagcactttgagaagctgaggtgggcagatacttgtggctaggcgttcaagaccagcacgggcaacatggtgaaaccgtgtctctactaaaaatacaaaaattagccagatgtggtggcaaaatgcctgtagtcccagttacatgggaggctgaggcaggagaatcgcttgaacttgggaggcagaggttgcagtgagccgactgcattccagcctaagtgacagagcaagagtctgttgttgttgtttttttttaaaaggttaataaatgccccagcaataagacacccaaactatgaactttctctctttctgttcatgaagatggggggaacacatttggtatgttgactcagacctataggctattatagtcagcagttagatccaatgactcgaggatggcccccttgtatgagggcaatatcagctatagcccttctatataaaactgttggagagatagtcatggggtcctctcccttactgccttcattccgtattcagttgagctacttctgaattcccatcataactcaacacttgtctttcaatagattaacttcctattaggtcttaattttattatcctctaatgttaccatctcgttgcagtaatcctaaccttgccactctctctctctctctcttttttagacagggtcttgctctgtcacccaggctggactgcagtggtgtgttcacagctcactgctgccttgacctcctgggctcagttaatctgcctgcctcagcctcccgagtagctgggactacaggcttgcaccactgcacctggctaatttttatattttttgtagagacagggcttaccatgttgcccaggctggtctcaaactcctgggctcaagcggtctgcccaccttgagtggcacttgtggatctctagtgcctttttaagcatccctatacatccaggtagttagtatttgtttgcctctacctggagagaatgacggtatacttggactgtgatgttacagggatatacagtgccccacttacttttcccaaatactgaaatatgaatttagcagaccacaaagtgctaggattataggcatgagccactgcaccaggcctggccagtcttctgataagacctctcattacttcatcctgatgacacacccaactttttaccccaaggacagacctacaagaatcaccactagataatgctaagacagaatggtttacagatgtatcttacttgaggggagaaggtggtaaggttaaagcaggatgtgccatggtcattgaagctggtcttcttcaggctaagtcagcccaactggctgaactgattgccctgactcaaacttgttaactagcaaagaataaagtagcaaaaattatgcccctatgcatctgatggtgctcatgactttggaatgctatggaaagagagagggtatttaaccttctcagggcaacccgtaaaaaaatggactagtcttggatctcgcttttggcaattataaaggttccaggctgctctgaattaaacacaacacagagtcaaggtaatcactttgctgatgcagtagctaagagtgctgcatttgagacaccagtccgatccttggaatgactgtgagacttaaacagttaaatctacgctaaaggaaacccaagacttagctttcatcgaagaaagatctacctggaaacaaaaggggggggtacttttcccgcaaactgaactatggtatggacctaatgataaacccattatcctagtggggtatcagatacccctcatggaacacatttacagcttgacccattggaattcagataaaatgatatcctattataaacaatattattggagactgtcatcatggcacagaagattgatttacagtgtaccatctacccaaaacacaatcctggaaaacccctttatggggctcaggatcattttctttttctacctagaccttttgagatgtggcagcttgattttatctagctgccaccatcttaagcatataaatatgtattggtaatgatatgcatgtttttgcattgggtaatgcaattgcccatcctgctgatgggcaatggtagtgggtaaaatcttattaagggattaccccattatggggagtccccttttgaacttcacagcaataggggaacttattttactgcccaggtcattgagcatttgtaaaatttggggctgggcgcagtggctcatgcctgtaatcccagcacttgggaggccgaggcgggcggatcacctgaggtcaggagtttaagaccagcctggctaacatggtgaaatcctgtctccactaacaatacaaaaattagccgggcatcgtggcgcacgcctgtagtcccagctactcaggaggctgaggcaggagaatcgcttaaacctggcaggcggaggttgcagtaagccaaaatcatgccactgcactccagcctaggtgacagagcgagacttagtctcaaaaaaaaaaaaaaaaaaaaattggcctatatttccgtattttgattgtgcctaccacccttagttcctctggattggtagaatggaacaatggaataataacacaattggctaagtccccggattggtagaatggaccaatggaataataaaaacacaactggctaaatttatggaggcttttcacctctgctaggctgaaggcactccccttggtattgctcaacctttgatccatccctttatcagctctcttctcatgaaattgtaactggaagacccaggcacatgggaatcaagatgactgatacaaatttactgaatggggacatcttgcactgttgtaagggacttgttcaccagctcatgaaaagccagaccttagtgcaagacacgtcccacagtgcgctcctgggagatgaagattctggtcatgacctccaacctggaaattttgtctgttggaaaagacatctcataaaggactccctccagccttggtggaggggcccttaccaggtatcgttgactaatccatgcacagcagagttaaaggttgtagactcacggatccatatctctcaccttaaaaaggcacaacttcctgaatggaccatgactcccaccaaagatccctgtctctgattcaccaaacagcttcaaccctgaaaccaggacgagaagttgacaacatctgagtggacagctaattgacctaagacttcagaccaggcctgtatgatctcctgtctaaacattcttagagtattatatttactttggggactattggccttgtctgctttgactcagattataggatatataacctggttaatgtttctgtacacatgatggccacctatgtatatacacttgacttttcagggtctctgctggggatggaaaaatagttcattagccaaactctcctaaagtgtggcagatggaggcagtctctcagattgctggatttgtcaccagcttccaagggccattcaagatcattacatgctacttgttgcaccagagattgatttttctgacactccaaatgttaccatatacttacatcagttccctccaaatgtcactttccaaattcaaattcagcttctaaagccaggccatattttcattctgtgcttagtaataagccctaagtctcacccttccccaccgcccccaggtctatctatcagtaagccaattagggacaaattctctaacttatctagaacacaaacttaattcctcatcttttccaggtccctgcacattcctggcctcccaccgttactgtcataactggcaactgaatgtccaaaggagaaaaagcaaagcagattgtgccagcacgtctcatttgttatatatcatgcttatgcaggcctttgtaaggcctgcagtaaaaccaatccatggctcactcatgttttaaacaacttacctattcaaactattatgaatgaatagttaagagatacattttggtatgtggcattgggccacacccaccaactcaaggatgggcacatagtgtaaatagctggcaaaatagctggcaaattgaagggcgctttttttttttttttttttgagggagagtcttgctctttcgcctaggttgtagtgtggtggtgtgatcatggctcactacagccttgacctccctgggctcaggtgatcctcctacctcagcctcccgagtagctgggacaaggagtctgtgcagtagctcacagtgcctgttgcacttacatcgacacctcgggtgaagtagagacttgcacagaaagaatttccaagcaagctaaatggttacaagaggcacaaactactgatcttctcaatgatctatttaattggcttcctatttcttccagtctgcagttcaacccctttttcatgggtaaagtgccgacgtcataacaaggtttgagggaggcacatctcacacgtgtgaatgcccagtcatcacacttacaaatgacaaaaggatctcaaaccttgatatagtctctatcctacttctcttactatcacttaaattactcatggtatttataaccaacttacgtaagtctattgctaaaaccagaattataggtcaggtgcagtggctcacactcaatcctagcacttgggaggccaaggtgggaagactgcttgaggctaggagtttgagaccagygtgggcaatgcagtgaaaccctatcttgataaaaaaaaaaaattaacaccctccccgcccattatggtagcacaatgtagatagaattatcctgtaagcgtagcagcagattctactacatacccctggagtgtccacctcaggcctacatcaacctcatctcacctctttccctccaacgtgggacatgacttcctgggaatgagccttcccaatgcagaaggacaaaaggacatgaagtatgatcatttgtgttctctaaagagaaattttgatcaaaagggggaaaatgtggaaatacaaggaaaaatgggttgacacagcctcttctaaatatttgttctggctgaagaatgtgtacgtgcaaaggcagctatgtcagttagatcagtgttagaacctcccataaataggcatgttttaactgtaacccctcaaatcttgaaaaacatcttgaaatgattttttttttctatttcagggaccttaagaaaacatattgtagatagacagatagatgattgatgatagtgtcagaagaaaagagaaaagtgagccaagatggctgcagtttggacatatgggtaataaaaccatggcctattaactaaggctgaccctttgtgcatttgtaactggagtttgttaaatattttactaacaggtactggttgtaaacttgtgtatcagatatagaacaaaggcaggatggaatcaatcatccttccgccagaccctgagatgcctacacaattattaatccttctctcctacccgctcagccacatacttactttaccttatgtgtaacatcactgaataccagtcaaatcgacaagagtgtaattgttgcttcactgtactgcaggtatccccctgtttaaaaaaatgtatgaataccgtgcctcgtgtaatctgctttgaaacacaggttataacctrttggaacctgtgcttcctgggcgcacatcctcaagctcggcctgataaactttgtttgattgagattcccatcttggtctctcaatttgggttgacacagctagtatgagactggcatccgagatgatgagtttacaaagatgataaagacaagtgaattcctaactcagttatttttatttttaaatatctcaaaaacaggcttactgagatctttcacgtaccataaaattcactcatttatataccataagattcactcttgtaatgtgtacaattcagtggcttttagtatactcagaattttgcaaccataccactatttaattttagaagacgaatgacagttcataatcagtattttaagtttttcttgatttttggctttatctcacagcttaattttcctcttctttccccaaacacatggttaaggatgagattgtatggggtctgttctcagctgtaactattaatcaattagaaagcagatagtattacctttcttcctttaaaacatagtgcygagtgatatgatgcctatgagaatagaggcaaaattcacagatagtttcatagctgatggtgtcatttgaacaaataagatagattgtactggaggaatcatttaatattgcacaaatttggtactaggaaagcagtattctaaagaaccaccagattgcttgaaaaaacaaatctccagtttaaaatcaagttatgccacgcccacccagtactttgttaaatatataaagtaacytggtttcagagaccattttatgtccttggttttgctctagggattaagtagtgttttttttttgttgtttttttaaacatttcatgggtttgtagatttttggaaataatttcagttaatctcagggcttcccaaaccttgaaatggttaaacaccaaccactgcttaacttggttgttgtaaacaaagcccgaaatgaaacccctgtgtatttgctgcagattcccaggtgcctcttaagtgtgaggataagctcagaaaaggcttaataggtttattaagttgtcatccattaaaaggttcacatgctccttgtgtgttgcataaggacaggtgtctgccacctcattgcatttctcactgagcattgcctaggagagggtaagccctaggatttagatccctctcagatgttcaggcagaataattttgtcaggacaaaagtaaggtcacggaactatatgaaaatggattatgaatcctaagayatcagcctattctcccctatgtctaagaagaatattcctcagcttatgactggaatgtcttgctaggggtgctgggtaagttttgtggaggtccccaccagcagaaaaaaatcattgaagaggaacacttaattcacaatggctgctgattaaaaagaaagcctcaatattcacctataaccctaacatccttaacagcttagcagtgtggtaactggcacaaactatggcgtcttggtcaaatccaacctcagtgaaggtagttcacatcctagagatgagctgaatgctgatagctttgaggacttgtttatttgggggaagggaaagagatggtgagggtagagataggaatctgtctgtcgtaataggatttggtctgtgtattaatggaatgaactggccttttttgctctgcttcttttgtccttgctgagaagggaggctgaagtttccaagagttatggatgaagttggagagtattagaggaactgttctctgaccttcttgatggtaatgcaagctgttgggcgagtttggagaagagcgcagggtggtgtgaggacgagggccgtattaacattttgccttaaaacaggaatacacaaattaaagcaataactgctactctgctttcttgtttctgcaatcttctgtcatttgacattgttttttccaaagcaacatgcgaccattttcttcaggattttcttttcagttatcatatgggtttgttgttggattgagaaaaaaaaatctgcctcatttgagcaggcctctctagatcttttcttatgactgtgtagagggtacttcctcatttttcttcctctcaaagacatcaaattcccaagcatttaactaaaattattatcaactaaaaatgttttttttaaaacagttcttagaggtaactgtttagacttaattattgaaatgcatgaaggccttctgccttgcccccatcccactcttttgcctgcctctctcaccaacaaaaacatggcagaggaacagtttattaacaatagcctgtttgaaagggaagcttcagtttttagctaattatttgctaataaaagttttaaaaaaattttcttttaaaagttgtaaaacctctgtctatatttcaaaacccctcaataccaaaaaaatacacataaaaagcctggatatttggttctgaatcattttcattaatacttgctatattatactaaccagaattggaatggaatgggatcagacgagataatccaaagacaaatacagccatatgtcacacaaggacgtttcggtcaaccacagactgcatatatgatggtggtcccaaaagattatgataccatatttttttgtaccttttctatatttagatgcacagattcttaccattgtattacagttgcccacggcattcagtaccgtcacacgctgtataagtttgttgccttggaacagtaggctatcccatatagcctaggggtgttgtaggctattgccatcttggtttatgtgaggacactgatgtctgcacaaggatgcccaatgatgcatttctcagaatgtgtccccattgttaagcaacacatgactgtactgaagctttaggtttactcatctaagtttatttctaaaacaactttaaaaagatagtgttctgtggtaataactcctaaaactatggacacgaaagtgatattaataattttcttggccgggcacggtggctcacgcctgtaatcccagcactttgggaggccgagacgggtggatcacaaggtcaggagatcgagaccatcctggctaacatgctgaaaccctgtctctactaaaaatacaaaaagttagccgggtgtggtggcgggcacctgtagtcccagctactagggaggctgaggcaggagaatcacttgaacctgggaggcagagcttgcagtgagcctagatcgcgccaccgcactccagcctgggtgaaagagtgagactctgtctccaaaaaaaaaaaaatttttttcttttattgttgctttatgtgataattttgtgataatttatagttagaccctcatacatacacacatcctctgacttgtccattggagtttagtttctatattcattgccttttcatcacctctcttagtccggttgttttggtgagctggcccttgatttggatattccaaattacttttcctaaggtacagatttactgccagctacatatttgcatccagccccagagctgttttcattccttccttgacgttgagattttttttttttttaacaggaggactgcaatttatttcactctacgtctctgggacatttgcctcccactgttactactctcaggcacaaagccttgtagaagaggtccacaaacctctaacaactaaggggcagatcagcggtcagacaacatgagctcgttctttttttgtcttaatgataataaggaattattattattaaattctaaccttggatttttgtgaattttacatcttcccttcagcagtttcaattcaggggcaaacttgactgcttagaacttcccatttatcacagaagaaatcccctctgaattcccattaggcaaagtagtatgggctgatgcatagtgagctagttgtgtgcttagtatcaaatagtattcatggtaaatgctcaaaacttccccagaggggaatcacgttaatgcaaatgtgcaaaataaaaagrtgtgtcttaaatttaaggatgcatccttarttgtgtacagcttcattattttacaggattgtttgtggcatttcttacttcaaaacctgattttaaaaaatgcttctcttccccatttttagattgcatgtttgttaggcgagttaggaggtagtagagtcctccttaaataactaggcttttctttgtgttttatacgcttgccttgatagtgccaagaatggaggtcgatccaggaggtcttcccttgagctgcctgcctgtcttggtcatataacaccaagttgcttgggggtggggtggagcagagagaactctttaatggttccttgttacagccctcaacaaagatatgtcaattcccttggctttacagactatygcccagaagaaaagatgtttggttttcacaagccaaagatgtaccgaagtatagagggctgctgtatttgcagagctaagtcctccagttctcgattcactgacagtaaacgctatgaaaaggacttccagagctgttttgggtaagatcacctgatgtttgtactattcttagagtgaaaaaataccacagcatacagaaatatttgtaagcaaggtgattggaacaatgtgctaataataaaaatcacttattctaatttaggctgtgtaagtctcctgctttttaaatgaatcaaacaatgctgacagcctacttttttccagattatgaggagctaccacattaatcgtgaagccccttaaagttgtagctagacaaacccttttgttgttgacttccttttgtggttaatttttaaaaaggcttttaaaaaaattacccttgactgggtgcagtggctcacaccagtaatctgagagcattttgggaggccgaggcgggcggatcacgaggtcaagagatcgagaccatcctggccaacatggtgaaaccccatctctactaaaaatacaaaaataagctgggcgtggtggtgcacacttgtagtcccagttactccagaggctgaggcaggagaatcacttgaacccaggaggcggaggttgtagtgagccgagatcacgccactgcactccagcctggcgacagaatgagactctgtctcaaaaaaaaaaaaaaaaaaaaaaaattacgcttgaccgggtgcagtggctcacgctagtaatcccagcactttgggaggctgaggcaggtgggtcacttgagcccaggagcttgaaaccagcctgggcaacatggggaaacccatctctacaaaaaatacaaacaaaaaactcaccagacgtggcggtacatgcctgtagtccwagctacgtcggaggctgaagtgagaggatcacctgagcctgggaggttgaggaaatgaagatactaaaataaaaataaaatttaaaaaggcatgcatggttggcacagacctttttgacaccttcagaatagttaaaaagtccaggattaacaataaatgatcaacaaatgttttgataagaaaaagtggtgaaagtaatttctaacatgggaaatcattctttttttcttttcttttttaaagagacaatgtcttcctatgttgcctaggctggagtgcagtagctattcacaggtgtgatcattgtgcaccacagccttgaacttttgggctcaagtgatcctcccgtctgagcctctcgagtagctgggactacaggtgtgcaccaccttactcagcaatataatcgtttgtttgtttgttggtttgtttgagacagagtctcactctgtcacccaggcagaactgcagtgtcactgtcatggctcactgcagccttgacctcactggcctcaggtgagcctcccacctctctctcctgagtagctgggactacaggcatgtactaccatgccctgctaatttttctatttttttgtagatacaggattttgccatgttgcccaggctggtctcgaactcccggctgcctcagcctcctaaagtgctgggattacaggcataagccacctcatctggccattttcattttttaaaactacagtgcctctctggttttgtttgctgcgaaactggaatattatggcacattattttacttgccaaaggttagcattttgatacttatgaaatatctacacaggccgggtgtggtggctcacacctgtaatcctagcactttgggaggccaaggcggacagatcagttgagcccaggggttggagaccagcctgggcaacatggcaaaaccctgtctctacaaaaaatacaaaaattagccaggcgtggtggcacgtgcctgtggtcccagctactagggaggctgaggtgggaggatcacttgaacctgggaagttgaggctgcagtgagccataatcccaccactgtactccagcctgcgtgacagagtgagatcctgttcacccccacgcccccaccaaaaaagaaatatatttacacatttcaagaaagattaattaaacagcaatgtttaaaaccgtgataatcagaatctcttttaggtcttgagttttactctttaattttaaaagcatttttttaaattaaattaaaaaaaaaaattttaaagtagagatggggtctccttgtgttgcccaggctggtctcgaactcctgcactcaagtgatcttcccaccttggtcttccgatgtgctgggattacaggtgtgagccaccacaccagcctatttaattatttaattttttttttttgagatggagtctcgctcttgttgcccaggctggagtgcagtggtacaatcttggctcactgcaacctctgcttcctgggctcaagcgattctcctgcttaagcctcttgagtagctgggactacaggtgtgcaccaccacaccaggctgatttttgtatttttagtagagacacgggattttgtcatgttggccaggctggtctcaaactcctgacctcaagtgatccacccatctcagactctcaaagtgctgggattgcaggcgtgagccaccgcacccagcctggcctatttaattttaaaagcatttcttatttcaaaataaccaaattgccgtacatagaattggtttgttgaatctagaagataattttatttctgaaatattctatagaaacaatggaatgggatcatccaggatgattaaattgtatctataaaccatacatagatacagttttttccccaaaagaaatgtgcttgcatgaattctttaaggtaagggagactgataaaggtttgattgttttcttatcagattgcatgagactcgttcaggagacatctgcaatgcctgtgtcctgcttgtgaaaagatggaagaagttgccagcaggatcaaaaaaaaactggaatcatgttagtccatctttcttttttctcaattatacctctactgtatttaaagtaacattaatttccccctaatttaggaagtaatatatccctagggtagaaaagtctgaaaagaataaagaaaaacactagctgctgttcagatataatggcctaacattttggcatctttagaacagaatagcctggtgtggcatttccttaaggctgtatccaatatcccccttctggagattcacagtaagcattcacctgtttttaggcttaactcagtaattcccagagttaattagacatgaattctttttcttaaatctctttggataacatgatcctttgaactcaggttggtactaatgaacatgtagatcagacttgaatttgaattttgcctttaccacttactagttgtggattttgggcaggttatatttattcatgaagtgcaaagataatagctctcttacagagctattgtgagaactggatgagatggtgtatagaaagtataacacagttatcgttcacactagccttacattgtcctttgatgacagtgttatgttattataataggtcatgattttgaagatgataacaaccttcctttttacatggggtagaaatctgcagctaataaatgtgaatgaatacctaagaaacaggaccatatggggcgagatcaatggctgggctagactgtgggagaacatgctattgctgtcgtgtaactcacctcagagattaaggtgtaaagtgaaaaaagcataaagaataggcctgaagaccttgattccaatcttctcccctctccacccctcttacccatttactcgcttggtgaaataaggcaaaatgcataatttatctttgccttgttttccttctgtctaaaattggagtaacaaaagtagctctattttttgctttgtactaaatataaaaagtatatgaaagcttttcgtaaactgcaaaacattatcctgtagaaatggagttgtttttaggtttgattcttaacctagctgggtcatccagtaatgattatcccatatacaaatctatttaaatttttttccaatagactcccactattacccacttcacaggaaagaatatctttaaaaaccccagtagataaatattatttattcccttatgtcatgtgatgattaaaggtgcacatggagcttcatcctcttttcagtataaaactgtggttctcaaataggcacggatctgaaccaaagggatacactggtgtcattttaaaaatattattaaatattcagtattttcttccaggtggtagatgcaagggctggacccagtctaaagactacattgaaaccaaagaaagtgaaaactctatctgggaacaggatraaaagcaaccagatcagtaaactgcagaaggaatttaaacrtcatagtaagtttgatattacaacattagtacttaataattgttttgttatttttggctgggggtggtgtatggcatgtgtggatcattttttcctttattgctttttataaagagcactggaaggcaacgttgacttggtagagatgttatcttatttctgtgaaatgttggcactttttctgattttgatgtctcaagagagtatttctactagctaaccacttcagattgtactgagaccaccctgatgtctttattgacatcttaattttctagaaggtgcatttctagctcatttacttgatttttatccataaggaaattgagtcctgcagatgtgcaagaaggtacgtaaaggggacaatctgagaccaaagtccagattttctggaaagtaactttagaaatcataacgcacatattgaaattcagccaacctcagggcttgctttcaggtttaaggggcagtgtgtgttgtgtgatagaatgagaaaggaatgtctaattaattaatgtcaggtcacatgctattattggaagttttggggggttgctgtaatggcacatctgtattttggaattgagattttagattttgaaaaggaaatacactgcatataatgttattgtctaataaatatctctattacccttggggtttgaaggagcattattgaaccaaacacattagtatttttacagcaaaaagtagcagtattcacatttagtggaataaatagatggtacataggctagtcaggtttgtctgcttatagtcatagtttaggtcatgccagattttgtggccaaataggttaggaatatactttctgtttccagagctttctcagaattgcggctaggggttgtggatctctattggagctctcagtacttttaaaaaatctatagggccctgttagagagaacattatcaatcaagacatggttatcatgcttgttttagaataatggaaaaagacatctaagtttagtgacggtaaagtgaggagtgcaggagaactcaacattttttgagcattttggtatactaagcactttacatatgtaatctcagttatttccatcttagagctcagaataggaggcacaaagaggtgatttaaacttgatctgggccacttaataagtggtagagatgtaaaatatttaggaaatataaatttgtatatgtattttaattatacacttacctttcctaaccagctctcaaccccccatctccctaaagatttaactctaccttccattctcactagatattttcttttatttcttttttttttttgaaacagggtctcgctctgtcacccaggctggagtacagtggtgtgatcttgggtcactgcagcctctgcctctggggtacaagcaattcttgtgcctcagcctcctgagtagctgggactacagacatgcaccaccatgcctggctaatttttgtatttttagtagagtttgggttttgccatgttgcccacgctggtctcaaactgagctcaagcaatccacccacctcggcttcccaaaagtgctgggattacaagtgtgaaccatcacacccagtcctcactagatgttttaatgaacatttgggaaacattaattttcttttatcacttgaaggccgaggaactgattattcatatgtatattcttagccctttcccttaattatagagaaagtgatatctcacttttgtcttacttaagggaatattcagtgtaattttagatttttattatgaaactgtgctgtgtagtagttagagactgaaaataaattcctttgataataaggtgtgtagattgtggaggctcagactgaaacagggtgttcaccaggtacagtataaattgctggcacctttgtgcattgaagcagttgggaaacatgtgaatttttatatatcacccactaaatggtctgtgcttctggttatgtgtttgcttctgtgtatcctgcacataccaggcctgtattctcttctttctttctttttttttttttctgagatggagtcaaacttgctctgtcaaccaggctggagtgcagtgcagtggcacggatctcagctcactgcaacctccccctactgggttcaagcgattctcctgcctcagcctcccgagtagcygggattacaggtgcatgccaccacacccagctaatttttgtatttttagtagagacagagtttcgccatgttggccaggctggtcttgaactcctgacctcaggtgatctgccctccttggcctcccaaagtcctgggatttcaggcgtgagccaccgtgcccagccctgtattcccttttcaagacattttgtggtgtactgaaaaggcattggacctagagttacagatctggatttgaatatcagctcttgtcactagcaaatgtgtaactctggagtcacttgacgtttaaccataattttctaatcagagaactggggataatcaagtaaaaaatggctttgtaaaacaaaataaattcgtctataaatgttagctattctttttgtgtcatccttttcaaaatctgcagtgatttctgcttactataaaatatggttgagaattcctagaaagtgtttgaaggtcctatttttgtttgagctgagtcagttcctggagtgtttttggcttccacagctttgctcattgactttgcccattgtccctaccgacttgatgccatctaatcactccttggtgccttctaaatcctacgtaatttttaagacttaaaattgcagtttgggctgggcatggaggcttacacctctaatcccagcactttgggaggccgaggcaggtggatcacctgaggttgggagtttgagaccagcctgaccaacatggagaaaccccgtgtctactaaaaatacaatattagctgggcgtggtggtgcatgcctgtaatcccagctacttgggaggcagaggcaagaaaattgcttgaacctgggaggcagaggttgtggtgagccgagattgtgctattgcactccagcctgggcaacaagagcaaaactccgtctccgaaaacaaaaacaaaacaaaacaaaaatggtcagataattgaaatttcaaatagtttaaagatattaagcacttcctaggagagtgagttttcctcagcagcatagaggtgtctgttgatgttaattatttaggaagtcttaaacatcccactagactcatttttttaaaacctgctactcttgaggattttgtttgctaagttaacatattaaaaatactaacggggctttcttttagatacctaattttatgctgttttatgtaaatatttgtaaatataaaatatttgtgagctctattcagaaaacgttttcttgactgggtgtggtggctcacacctgtaatcccagcactttgggaggccaggagttcaagaccagcctggcaaacatggcgaaatcctgtctactaaaaatataaaaaaattagttgggtgtggtagtgcacacctgtagttgtagctactcgagaggctgaggcatgaaaatccaagaggttggaggctgcagtgagctgagatccagccactgcactccagcctgggcgacagagtgagactctgttttaaacaaacaaacaaacaaacaaacaaaaacaaaaacattttcttggctaggtgtgaccatgcctgtaattgcagcactttgggaggccgaggtgggaggatcgcttgaggctaggagctccagaccagtctgggcaaataacgagaccttgtctctgctaaaaattaaaaaaataaccagccgagtgtggtggtgtgtgcctgtggtcccagctactcaggagactgagacgggaggattgcttgagctcaggaggttgagactgcagtgagctgtggtcatgccactgcacttcagcctgggtgacagagtgagatccggtctcaaggaaaaccaaaagataaaaataattaaaaaaaaaaaaaaacccaaattttctttagtctgtttctttccatgcagcatgtaacataggatttgatgccttataaatatttaataagtacttgattggttatctgaatggaaggattgctctgtcaacgtgtcctgggatgggcaaggtgtatggtaggccccacctgtgtttatgaggtttatgatactgctcttgctgtgacgtggcagtacaacagccttatagcacaatgactgttaactaagaaacttattttctggcttgtacatttatctgacatcttcacataaacaggcaaagtattaaatcagggttagctctgcatctaatgaactgcctttattccttattaaatcaggatcttttgttttctctttataggtataatgtcattattctttggctgctttcaagatttttctcttggtttagtttatagaggcttaattatgacgtgttttggcatggatttctttgggtttattctgttgggctttggttagcttcttgagtcttaggtttatgtctcgccaaatttcacaagttttcagccactatatttgagtactttttcacctctattctctttttcctctccctccaggactgcaatgacatgaatgtagatgtatgtttgactaagctccacaggtttctcctgctctgttcatttgttttctgtgtcgttcatatggggcaatttctgttgttctttcttccagttcactgtttgttttctctctcccctccatgttgctcagcccatccactgtggtttttattttctttattgtatttttttcagttacaaattttccatttattttttccttatagttttctatcttatttttactgaggcttcctatttctttgccaagcctatgttttcatttatttcaaacatgttcataattgctcactgaagcatttttgtcgtggctgctttaaaatcttggtcagataattctaatgtctttgtcatcttagtgttggccttttcatttagtttgagatcttcctgattcttggactgatgtaattttttattgaaacctggacattttcagattatgttgtgagactctgggtcttatttaacccttctattttaactggcttttttgacacccctcagggcagggaaagagggaggggcctcaccaccctattaccgccaggtgttagaattccagtttctctctcaacctccattgacatctgaggttggggggagggggaggctccttgttactactggatgtcaggagagagttcaggctaccacctggtgagggtggccttgtacttagtgggccataatgaaaatcctgacttcgctaggcttcctctgacaccaccctggtataggtgttggggtgcttcctaagtcttgtgagggtggaaatgtaggctcttcacctcagcctctgctggggttaggaaaggtgtccacagttttttccgtgggtttggctggaacaggaaggttagtgttcagaaatgttttctgtctggctaggctgcccttttcctagttctttgctagagagatcaggttttaattggggttttggatttttgttttgttgttgttgttttgattgtctgtacacattggcatttctgggtggctgctgtttcacttccaaagctggggattatgaggcaaaaggaaaatccagaaaaactaaggaacctaccaccatggcttgccttgggtcttgagctccctagatgatcatcaccttttggagtctcaggtttgttttatatataatatccagggattttagttgtataagcaggaggaataggaagtatgtctattccatcttcttcacttctttaaaaaacacgttagtctgaatatcttcaaatatcagtagtgcatagaaaatgaattattttttactttttcttttttaccaactctttcacagtgtcttatgctgaggtttagttgcaattacatgtaatgaaattgaaaattttattttttctcttaatctttattgcagattctgatgctcacagtaccacctcaagtgcctccccagctcaatctccttgttacagtaaccagtcagatgacggctcagatacagagatggcttctggttctaacagaacaccagttttttcctttttagatctcacttactggaaaaggtaaaagaaacaaagtatctctctaaccagcaaaccatcttaattatgggcagtatttttctacttccttagcaattaaatggcatttggcaaacagttggtaacacacgattgcagtggattaagcaggaattgagcagggaagtgggatttttgtatgttcttcctattaaaatttatttaaaataaaaatcacatcaaggtacctacattgcctattgctagataagtggagtagaaagacaatatgcagtggagagaatcagtaaaactaagagttggtccttcaaaaagacgtgaccaaaaatatactagagataaagtggatcaggaaaaggagataatacacataagcaattttaggaaagagaaaagagacttaggtatagataaagcagacatttaaaaaataataggatattatagacaacttgatgccaataaatttgaacatacaggtgaagcaggtacagtactagaaaaaagacatgttgctaaagctgtctcaagaaaaagtgaaaaacggagataatctcataataaattgattcaggccaggtgtgatggctcacacctgtaatcctagcattttgagaggccaaggtgaggggattgtttgagcctaggaggttaggtttgcagtaagctatttttgcaccattgcactccagcctggtgataaagcaagactctatttaaaaaaacaaacaaacaaacaaacaaaccacaataggcaagttgtactaaacatccaggaacagatgattggagcctatgcactggcttttccagactatggataaaatagggcataggccccaagcatttttaaggctgatataagtttgataccaaaacaaatatatcatcagccactagggttattctaggtatgtaagattggtttgaacatgagacgatcaactaatataatttaccacattgacagtttcttttttttttttttttttgagacggagttttgctcttgttgccaagctatagtgcaatggctcgatctctgctcactgcagcctctgyctcccgggttcagtgattctcctgccttagcctcccgagtagctgggattacaggtgcatggccaccacacctggctaaatttttgtatttttagtagaaaaggggtttcaccatgttggtcaggctggtctcgaactcctgaccttaggtgatccacctgcctcagcctcccaaagtgttgggattataggcgtgagccaccgtgcccagcccacattgatagtttctaaaggaaggtgttgtcttcttagtggtgcaaagaaggagtttgacaaatttgaacattcctttaaggtttaaaaaaaaaaaagttttagcaaaataggaatagaaggaaacttttttacttagacaacaggtatcttacaaaaaggacaaaagtacataatacataattgtgataaaatgaaagcattttctctatgatcaggaacaaatcaagagtgttgactatcaccatttctattcagcattatacagaaggttctaaccaatacaatattggtagtagtgtagtagtaaacactttagaacagtgcctagtgcatagtgtaagtactttaaagtactttaaaccactttgtttgcatttatttaatctttttttttttttttttgagacagagtttcactctgtagcccagactggagtgcagkggtgttatcttggctcactgcaatgtccgcctcctgggctcaggcaattctcccacctcagccgcccaaatagctgggtctacaggcacgcaccaccatgcctggctaatttttgtattttagtagagatggggtttcgccatattggccaggctggtcttgaacttctagcttcaagtgatctgcctgccttgacctcccaaagtgctgggattacaggtgtgagttactgcacctggccttatttagtctttatgacaattctgtgaagcattatgtgaaaacacaggtacaaagaggaagtactttgtttaaggttacatagtaagtagagcaggatttaaatctaggcagtttggcattagaatgatacattttatcatagtgttaggaaatataaaataatgtagtaaaatatcaaaagccctttggaggagttatgtaaaaatcatacaatattgtcgaataacatttatttatgtgtgtgtgtgtgtgtgtgtgtgtgtgtgtgtgtgtgtatgtatatatataaatatatgtctatgttgagagagagagactcactctgtcacttaggctggagtgcagtggtgtgatcttggctcactgcaacctccgcctcctgggttcaagcgattttcctgtctcagcctccggagtagctgggattacaggcatgcaccaccacaccctgctaatttttgtatttttagtagagattgggtttcaccatgctggccaggctgatagtgaactcctgacctcaggtgatctgctcgccttggcctcccaaagtgctgggattacaggcatgaaccactgcgcccggccgttgaataacatttaaagacacctaaataaattgagaggtatagcacattcatagatattattaaactgactgttagggagatgatcactttgtagattcagggtaattgcagtcaaaatcccaacatatttatggaactttacaagctaatttataatttatatagaaaagcaaagggcccaaaataggcatcttcagaagaaaaagaaagatgtggataaacttgccctaacagaaatcaagacatattatgaagccatggtaattaatgtgttttgggactaggaatagaaaaataaaccaatggaatagtatagagagcctggaaacaaggccacatatgtatatagcacttgttatgtgatacatgatgtgggggtgattggtgggcgaaaatggtctgttcaataagtgttgctaggatattaagaacaacatggttattcatgtggaaaaattgggcttgggttccctacctcacaccatagacaaacaccaattacagatgcattaaagtagaaaatagattatgacttttgagtgggaaaggatttttttatgacagagtacttaagcatttaaaaaaacctccaggtttaattacattataattatgaacttaaattcatcaaataataccataaagaaaatgaaatgatatccagcacatatatctgacaaaggattagtatctggaatatacagacaactcctacaatggaagaaaaagataaaccaacagaaaaatggacacacttagaaaggaatcatgaaataactcattaaatgataatgtgttcaaactttttgaaaatcaaggaaatacaaagtaaaatttcaatgagataccattttatactcattagattggtgaaaaaactaaaataaagtctattaccaaatgttggggagaaggtatggaatgatgagaacactgtcagttataggtgtaaatagttataaccatgtagataaatggccgtttttgagtaaagttgaagacgttcccattcctatatgccagcaatataaactagtaaaaacctttaagatgtgtccactgatttatacattaaaataagagtagataaataaaactgtgttatatattcacagggtagaatattatacatgttaaaatgaaataaagctctataacaatatgtatggatctcaacgttgactaaaacattgcagaatacattgtgattctgtgtgtgtgtgtgtgtgtgtgtgtgtgtgtgtgtgtaatggataactgtgcagtatgattagagatgccaacatacggtgaaaccatgaagtataaagaaaagggagtgataaacctaaaattaagtggggagaggatgagatgaggtaggatgggactgtggaggggcctgcagggggcttcataggaaatgatcttttttcccttagagtatgtggtctgtaggcattctcattgtgttgtcatttttgatgcctttgctaacacacacccttttttgtttttttttgagacagagttttgctctgtctcccaggctagagtgcagtggtgtgatttcggctcactgcaacctccacttcctgggttcaagtgattctactgcctcagtctcccaagtagctgggactacaggcacgtgccaccacgcctggctaatttttgcatttttagtagagatggggtttcgccatgttggccaggctgatctcgaactcctgacctcaagttatctgcccacctcagcctcccaaactgctgggattacaggtgtaagccaccacacccggcccacacatgtatttttatctactcagtatttaattaaaaattaccactcaagcacttaggagttgataaagaaaaaaaattaaatatatataaaaaattgctagctgcatcagcctgtttatggtggctgatttttttttcaagagttggtgattttggaggaaatagttaacaacatcaggggcagcctttgaaactgactgctgtctttcaaaatgccgtcttcctcaatatttgagaagattccagtgtggcctttaaggcaactgggtaattccccttctctagctaattggggttactctaggagccctttcacttggaatgtgcaagattgtagaagcacaactctttggttatattggactagttataatagtgagtagatttcttttgtattcctatttttcttccttattaatgtatcttgttctccattttttcttttagacagaagatatgttgtgggatcatctataaaggccgttttggggaagtcctcattgacacacatctcttcaagccttgctgcagcaataagaaagcagctgctgagaagccagaggagcaggggccagagcctctgcccatctccactcaggagtggtgactgaggtttttatgtagaaggggaacaaaaaaaaaaatatctgaattttgaaaaaccacaaagctacaaactgaccctcttttttttttgagacggagttttgctcttgttacccaggctggagtgcagtggcgtgatcttggctcactgcaacttccgtctcccgggttcaagtgattctcctgcctcagcctcccaagtagctgggtttataggtgcccgccaccagacccggctaattttttagttttagtagagacggggtttcaccacgttggccaggctggtcttaaatgaccctcttatttttaacttggatacctgctattctgccaaaagacaatttctagagtagttttgaatgggttgatttcccccactcccacaaactctgaagccagtgtctagcttactaaaaaaagagttgtatataatatttaagatgctgagtatttcataggaaagctgaatgctgctgtaaagtgctctttaagtcttttttttttttaatccccttctaatgaatgaaactaggggaatttcaggggacagagatgggatttgttgtatgataaactgtatgtagtttttagtctttctgttttgagaagcagtggttggggcatttttaagatggctggctactcttgttttccctcatgataataaatttgtcataactcagtaacatgaacttgcccctagaggtagttgttaataattttgaaatattaaggtcttgccaagcttctgatgattcacacctgtactactgattattaagcaggacagactgagctttctgttgcaaataccttggaggagaaagtaatttctaaatatacagagaggtaacttgactatatatgttgcatcctgtgcctcccttcatattaatatttgataaagattttaatttatgtaaaacttctaaagcagaatcaaagctcctcttggggaaatggcaagtctttaggataggcaagaccctgtatgaatagtaccaaagcattaccgcatggtagagaacrcactcgattaaaaatgttaagctatctgaaaaataaaatgtgcaagtcttcaggatggcacaaaacaaaggttaatgcttcttggggcacatttcttagagggcttgctgagtgtgtaaatataatcgacttttgtttgtgttacatgacttctgtgacttcattgaaaatctgcacaattcagtttcagctctggattacttcagttgacctttgtgaaggtttttatctgtgtagaatgggtgtttgacttgttttagcctattaaatttttattttctttcactctgtattaaaagtaaaacttactaaaagaaaagaggtttgtgttcacattaaatggttttggtttggcttcttttagtcaggctttctgaacattgagatatcctgaacttagagctcttcaatcctaagattttcatgaaaagcctctcacttgaacccaaaccagagtactcttactgcctcttttctaaatgttcaggaaaagcattgccagttcagtcttttcaaaatgagggagaaacatttgcctgccttgtaataacaagactcagtgcttattttttaaactgcattttaaaaattggatagtataataacaataaggagtaagccaccttttataggcaccctgtagttttatagttcttaatctaaacattttatatttccttcttttggaaaaaacctacatgctacaagccaccatatgcacagactatacagtgagttgagttggctctcccacagtctttgaggtgaattacaaaagtccagccattatcatcctcctgagttatttgaaatgattttttttgtacattttggctgcagtattggtggtagaatatactataatatggatcatctctacttctgtatttatttatttattactagacctcaaccacagtcttctttttccccttccacctctctttgcctgtaggatgtactgtatgtagtcatgcactttgtattaatatattagaaatctacagatctgttttgtactttttatactgttggatacttataatcaaaacttttactagggtattgaataaatctagtcttactagaaaataaaaggagctgttttgtggctttgtttgacaggtcttcagtaagaataatgtttttggctttcacatatactcagtttaagtgcttagtattaataacaagccatgaagggaataaattcctcttcactgagacatagactttggaataaaagacattttaactgatgtgcacaattattaatctagtggataagatggatttaaaaggaagaacaaaatgttcccagtactttttactgtctgtggttttattactatctatgggcatagtgggaagcatcattgagactttagggaaactataaaagttggaagggtggtggcatcaggggttggatgctggttctcaagttcctagctctgccccttgttagtcatttgagttaaataattaatgggaatatctacttcacaggattatgaggaatcctaagaggtgtaatccatatcaaacttttagaaaccagttgttttattacctgggaaaggtaataaagggccagactttttatactactgttagtatttaaatttgggatagtctggatgccacctaatacagttactatgaaattaacaaggtaactaaggaagttgatagtaccagtattatctattgctatgtcctaaattaccatagatttagtggcttaaaacaaatgcgtctcagtttctgtctgagcatggtttagataggtcctttagaaagctcatggtctcatctgcattctcacctggtgatttgggaagaactcatttcagcctcactcggctggcagaattcagttcttgccactgcaggactgagtgtccagacctctcactggttgtcagctggaggcccccgcttagttccttgccagctgggtgctccctgcatggcctggctgctgactggaccactgacatgattactgtcactaccagcaagtgtcgagagccaagctgccagcaagaggggtcttttcaggtcctgcccatatccaaggggagaggctcatacgaaggattggataccaagaggtgcgggtggggctaatgggaaggcacctagagtttgtcacagctttttttttttttaactgaatctctttaaattggtcgtctcgccctacaatgcaaatgctttgtgtagcaagtaaaaagaaaaatggctctcacaatatgaaaaaccctggctgggcactgtggcttatataaacctgtaatcccagcactttgggaggcccaggcgggtggatcccttgaggtcaggagttcaagtccaaccaggccaacatggtgaaacaccgtctctactaaaaataaaaaaattagccaggcatggtggcatgcgcctgtggtcccagccactcgagagattgaggcaggagaattgcttgaacctgggaggtagaggttgcagtgagctgagttgggccactgcactccagtctgggtgacagagtaagactccacctccaaagaaaaaaaagaaaagacctactgttgggccagacacttttaaacattgtttaagtaaccctgcaaagtaaaaaaaaatctatttaccggtaagaggaggtgccaggaggtcatgtaacttgaatgaaagaatctgcttttcttatttgaaagcctttgttctctaaactgtctcctgtctgctgcagtaatgctgtcctaaccctcattggaaactattccctgggtctcttcttgcctcccttctttctgaaggctgaaatgaggggcaagtttaacttttgcagatacgttgatctttaacttaaatcaaattctgttttttaattttgataatgttcaaagtacctattatctgtctttttgtggagaaaactgctggaggtttagtgaaacgatatcttaaaacaattcatcaaggtggctgctctgcagtgaacaatagaaggtaccctgggagctcttctattcagcgtccctagaacagtttcctagtgccccagatttagcattgtagtggccaggcaatcatttttgtgtgatgttcagtgaactcggaagggaggagaaagccaaattagatcaaagatagataatttcacaggctcatgttctcaaagaaagggatctgcgggttctgtctaacaatttctcaagctgtggagtttggttactcattgtagtcatgagaatgctttaggtatcaaataccttacaccctggttagaaactgcttgttattgtatgttgactagggggtcttagacaaacttagttgcaagctttagcatgaaagaacttagtcattcagtttagagagagacaaaagatttttttgcgaaagcctgctctttatctgaaaggggaaaatgatttattctgttttacagcatttattctctaaacttctatggcttatattagcttaactgtgtctccaggtattggcttttttttttttttttttttcagacagagtcttgctcttgttacccaggctggagtgcaatggcgtgatctcggctcactgcaacctccgcctcctgggttcaagcgatcctcctgcctcagcctcccgagtagctgggattacaggcgcctgccaccacgcccagccaattttatatttttagtagagatagggtttcaccatgttggccaggctggtcttgaacttctaacctcaggtgacccacttgcctcagcctcccaaagtgctgggattatagacgtgagccaccacgcccagccagtattggctttttgcaaataaaagagaaggattgtttttgcttacatttatatttaaatctcaaaataattaaaactaaaaaatctcaaattatttagtaagttcctggtagagttaaaatagaaacctgaaaaattatactttttttttttttcctttccttttcttttttttttttttttttttgagacagagtctcactgtgtagcccaggctagagagcagtggctcaatctcagctcactgcaacctctgcctcctgggttcaagggattgtcccacctcagcctcccgagtagctgggattacaggcatgtgccaccatgcctggctaatttttgtattttttggtagagacagggtttcgccatgtttgccaggctggtctcgaactcctgacctcaagtgatctgctcgcctcagcctcccaaagtgctgggattactggtgtgacccaccatgcctggccatactgtttttttttttttttttcccctcaagtaagtgtatacttggcctccaattaactttacaaatctcttcaatgttgatctgtcactgatggcttcttcatgagacattccaaagcctttatcttatttacccagcctctccacagtacttaatacgattgacagtttctttcttgaaatactcttggttgaaaacacactttctaggttttccttggacctcagatgctcactggcccaggcttcatcttcagccttcttcctagattatctccattccatggtcccagataccatatgaaatatgcagacatctcccatatctgtctctagagatttttatcagtcctgctggcaggaaatagatggcttactgaaattggataatttgaggaaagtttaataaaaggacctttacaaagttgtatgtagggtatagggaaacctcagggtgagtttagttcttgggactagtaacattggagtcctgttactactactcctgggtctgaagattgaatagagggagttggttaatggaaccaggagaccaacaggctatctaaaaagagtgggggcctggaggaagcagtaggagtaaatattctcactctccagattggccaactccatcattagtgccttcacacctgtttgttttctctgacccgtttccctaccatcctataactaggcaacacctacttatttatccttcaggtttaagctgaggcattacttggggaagcattccagaataattcctctttcttccaacacacacacgtacaaaataacatgctacatgggttccaagagagcatgaagcactgtttagtcaccactacagctcccagaggggttgattaggatatattaatagcagggtcacaataaatatttatattgattgattgcttacaacctggtattttcagaaatcatattcttagaagagttgaatttatcccaactgtcttgaattttattcaagaatgttaaaaaatactttgaagaaattttaagtacacagaaaagttgaaagaatagtataatagtataactttcacctagatccacaaatgcaacattttaccatatgtgctttatctaatttcttttgctgaatcatttgaaagtaaattgtaacaccatgatacttcacccctaaatacacattcatctaggaataagaatattctcctccctagccataatgtcattgccatatctgagctgattaagaataactcaatatccaatatgatagatctgtatggaataaattgtccctatcatcccaaagtgtcttttaaaacattttctcctcatccggggtctagtccaaggttcaggcatacttttggttatatctttcctcttttaatctagaatagtcctctgctttttctgcccatggcaatgaacattttgaagtgtctaagccaattgtcttgtaaaatatcccctatcctggatttttctggctatgttttattattattattttttattttgagacagaatatccctcttttcccaggctggagtgcagtggcatgattatagcttactgtaaccctgaatgcctgggctcaagcaattctcttgcctcagcctcctgagtatctgggactacaggcctgtgccaccatgcctggctaacttcttttttggtagggatggggtctcactatgttgtccaggtttggttgttttcttagtagatgtggattttacttttggcaaggatatagcatagattgtgtggtgcctctgttactgcatcatgtcaagaagcacacaatgtcaggttgtcccactgttggtgatgctaagattaatcgctgggttaagatcgccagatctttttccattttaaagtatatatcttttcttttgtaaatgaacaaaataatctgtggggtaatactgtgagacttttaaaacaacctttcattgagcacctacgtacaaggccctactaagtgttctaagtagtcccttgatgcttgagaaatcgtgtggctagaatcgtgaagtcctttttgagaatcgtagcatactaagattgtggggcttttttcttgtcatttaattgtgtgtgacttttattttctattcagaaataagtatgtagtggatgggggtaagggttatgtttggcacgtgagcttattagttaatatcaccagggcatagatgaataaacaatggaattagagtcaggagacttgaatttaaatcctggttttgctacttactggctttatgatctttgataatttttctctgagctcatttcctttgtaagtggaggaaataataccaaacacagctgtagtaagagcaaaatgaggatcatagagggcctggcctataataggtgcacagtgataagcacctaatgataaacttgttccctcatttgttctttaatctttaggaatgaagtctaattggatatgctaagaatgaaaacttttttgatctgtagttatgatgaacacaggaaaggtcttaaacagttcacatcaacaaccacccctctgcccccataaaaaagctcaaagctttcttaggtttcagtgcttaaaggagaatatgtattcactacaagattattatgctttggcagcacatgaatcccaggattgggaaattgtagagagggcatgaagctatgccagatataattaagctgcacaaaaagtatgttgaaatccagagggtggccaagataggctctcaggatgattttttgaaggaatgattatattagattcagggagtacatgtgcaggtttgttactgggctctattgcgtgatgctgaggtttggggtgtgaatgtcactcagatagtaagcacagtacctaacagtttttcaacccttgtcaccttcccccttccagtagtccccactgtctgttgttgccatctttttatgtccatgagtacccatggtttagcttcca

SEQ ID NO: 6962 - DNA, 14427 bp, Homo sapiens
ttctctccatgttgcaggtctataacttgctaccagtaaagagtccatttacctttagagctggaggtcctgcggatgaatatgatgaagagtgcaacaacgcaaaagacacaactcacagcggaatcacttccacaccgaagcaagtcctggagggggatgacatttacagtatcttcacggtaattttttttccccaaaaacataacaaaaactgatttctacgtgtctgtttagatggagaaacaatggacttctaagctctaggatcttttctcccctccctctaacaaaatgataactaacagaaaaatattgaaatctcagagacagataactctgtggacacacagatgttcacacatgaacttctctaccaccttaaatagaaagtggtttacttttaggctgcaaaccttaaccaaatggatcccaaagctgcttaccaccatcgtattcccctctcagtgactcttggggattccaatatgtaagaaaaccaaaacaaaatattttccataatgtgtctgacactcttggaaaggtgagcaccttgttggaggccatcatctcagtcatttgcaccataaacacttgttgaatgaggcggggcgcggtggctcacgcctgtaatcccagcactttgggaggctgaggtgggtggatcacgagatcaggagatcgagaccattctggctaacaaggtgaaaccccgtctctactaaaaatataaaaaaaattagccgggtgtggtggcaggcgcctgtagtcccagctactcgggaggctgaggcaggagaatggcgtgaaccccggaggcggagcttgcagtgagccgagattgcgccactgctctccagcctgggtgacagagcgagactctgtctcaaagaaaaacaacaaaacaaaacaaaacaaacaaacaaacaaagaaaacacttgttgaatgaatacaggattgaatacataaaatgcaaaacttcagtcctcacagggcagtaaaattccaggaaaatttgaagttgtctttcattaagaaaagattaacaaaacttgtattagaaatgttaagatgtcttaaaaatgtaattctttagtattaactataactgagcagaattatccaggtcgtgaaattaaatcttatcactatcaaaaagcactaaaaactttcatcataccttcaggaaaatatgtcgttcatctgctagaggtctacagcttagctgaaagcaatttaaatctctctcttctggaccttctggaatcacaaatcagatggtagaaggatgaaaagaatacttcttggtttattaaccagctgtttaatctctaaatatttatttctggtttatttctttctgttgcgtacacaaccctcactgacaactgtgttcaagagtcccacagtttcccaaatactctgagataaaatagcaaataatatttatctgtgactaacattgaagaagggggaagctggaaacaggtggactgtagacaaccgtgggcatctgaatgtgggttttagatgcagacatttgagacgactaaaagaaactgagaaaaaagaggaaaggaccacaggaacgagttaagcatagatattcaggaaaagccatatcttctggtaaaacataaacaaaacagagtttactaagattgtaaagaacaacctccgatatgcaaaccttcaatttaaaatgacaagaaacaagcaaaaaaatgctctttgtaataaagccataaggagagctgtttatatgcatacacagacatagatatttgtttcatggggaaaaagaagagaagaaaacatctaagtctaaaatattcagttttatggatgcaaaaaagagttaaggagcattagattataccagacaatatttagaaataagaatcagaaacgggtttgaattcccactcctattcactcaatagcttaatgaacttgaccgtctatgactctgttttcatatttataaatagctctcctcattttgtgtaattttcatgatgagcgtatgaactatatgtaacataatagtgaaagtacaatacaaattcaagaaactacttacagtctcaagattggattgccgctatgctttaacaacttttttcagtccataggattagatatttttaccaactcaaaaatccataagccaactttgtgtctaccacgaggattgcgtatcagcataataggaggtaaaggtgtgatttatttgtctgacagaatagaagaaaaatggtgctttattgggttggtttaagatgaaaacctgtttttctaagtattggatcttgagactgcagcaacttcttggtaagttagccccaaataatactttttcctcaaatagaggatttttaagcaattattattttctctttgacatcaaaatcaactacctttttgtttttgcttttaatagtcttgccattttagatcttccttgtccatgatggagtcaatacctgaattagtcagaattagattcaatggcagtaacaaacaaactcccacatctcagcgggtaagcacctaatggtttggtttttgctcacacaaaatctacttgtgagttcagacactctccagaacagccccgtgccaaacagtgagtcagagagaaccagtctgctttcctctggtgactctgccatcgccaacgtggctttcaaggtcatacccatggggaaggaggttgcactagactcttaaagccaggagtgggaatggtatacatcacttccgcccatgttcctgccctgaatgcaaaggaggctgagaaatgggaaggctcatgtggatattaactgtctctgtcatatcttcttatggaaagagaagggatttatgtaatattgagcaaaagagagtaacgcaacttttggcagatacgctacctctgcatagtctctttgtgtgtttcaagtatacctggaaatcaggaaatgttgcaaaaggcctaactcaaaattcttttctactgccatcaggcctagagaaatttttctctgcatgcttgaatgtctaccaaatttactttttaataaaaaatgaggatggcagtaaaaagtgttaaaaaaaaaaaaaaagaataaacacattttaatacagcagattcactgcctgggaaggcaaggagtaatgttctaattgaaaacaaaggagtcattaaggatatttcctcaccagaaaaaaaaaaaatcctgtatagtgaaaaaagaacactgtgttaagaacaaagggacaatttttcatcacactcctatctgctatgactatgtgactttggaaatttgcagactcacttaaccttttagaggctcaatttctttaaatctgaagtcagaatgacaacaccaaactcattgaggtattgtgaccataaaatgaaaaaaaaaaaatcatgattcctttaatggcatgtttgtttaaaaaaaagaaactgaaaagcatgattaattgactttcatttcaccaagtgtgtattttctttccaacctaagagaaaacagatcaatggaaacaaaggtatgattcagaaaacctgaaaactcagagtacatcgttacactttgaccccaaatgttctgtaatattctatgcaaatttttcttttggtatttgttgcttatccttttcttccttctcattttcagttacagcactttaatctgtctgtcattatttcataactagattactgaaaaaccattctaatttaacttccttgcctccagcttttctttacctctatctgtcctgcatactcttaaacactgcttttctcatgtcacttgtttctcaaacatagtcaatacttccagaattcataagattattgcatttaaggttttgaaagagcacatctaactctattatcttatatatatatcatatatgtatttataattacacacgtatataattatctttaaaaagtgatgccccagagatcagaagatatattatagaataatattataataaagatatttaagataatgttaacaatatgtaaagattatatatatcttatatatatgtatatcttctgatttctggaatatcaatttcttttttatcaagctaactaactcccacttaacagaccttattcatttgtcctagccttatgttttattatatattataccttctgtttacctaattatgggaaacacaccctgaaaatagccattctactctagagggtaaatttttactatccctgtgaagcacccttccacctttgtatatatatttgcacagtcctttcctgggaataactccccattctcctccacctcccatccatgaatgatcatcttaggttccgctttggtaaagtcttttccggcctaactaaagttgattgtcttttcattcctgactccccattgtctatactacatactttactgaatcctgttgcttattgtttatgtctccatattaattcaatgtcgaaacaaacaaacaaacaaaaaatcattcccgaaatcatcttgcttagctaatatccattcctcttgtttgattctcgctgcaaacagaagacatgtgaacacaatttcagtgtaaaagcaatatttggtgtattaaattactctttatccttcccttcaccagttgagtaatcatcttagagagagctacatttgtttttttttaatcaacttttattttagattcaggaggtacatgtacaggtcatttgtttttatttataaagaaaaatatatttagctctagattctatttgaagaaaaaataggattagcctttttataggaaagtgaacaaaataacaagctggtaggttaaattgttccaataataaacattccctgagcgtatgaccttattccatttgagaaataaggcagcaataagaaattgatgataaaaatgaggttcacactgaggcctgtgtgttgtcttccaggaccaggtctgcgaggtgtacccccaggagccgtagaaataatgtacccaatgatcgaagaagaacctcagatattgcaagtgaaagagatagtccggaagtacttccctgagacctggatctgggatttggtggtagttgagtaagttgtgtgttgcctggaatttagtttaggagagggtttgaatcctgctgtatgactgatgttatcctggattcctgatccttttagttctgctctgctcttttctggtaaatatttaggtttatagttcatttatctcataattaaacaatgctaattttttttctaatttagtctattgataactaaaatagtagaaagtaggatgctaccagccctcttaaataaaggaaagggaaggggaggggagggagattgaaagaaagaacaaaaggaaggaaagaatgaaagaaaagaggaagaaataaagggagggagggaaggagggagtaagggaggtagggagaaaaaaaactttaaacctcaccaggagcaccaacccttagatcaagtttagcatttaccacactaggttactgagttatcatgttctaggatcagccatgctttgtgttaaaaaaaaaaaaaaaaaagatttgcttatactcctcttctctgctccttcactagctcattaggtataagtgagctggtgaccaggtccctgaaaccatcacagagtggaaggccagcgcattctgcttgtctggaaccacagggtttggcctctctcctatcgtgtctcttcaagccttccagcctttcttcctagaactcacccttccttattctgtggtgcgaggagaagccttcacactcaaagccactgtgtttaactgcttgtccacctgcattcgggtaaggacacttctctggaagtgaatgagaatagaagatagtcaccattcattaccaggtctcctaggtaacccaggaaatcagaactgcatatgatatatcctaattttggagcagacctggtactaagagaaaaggtacctgacaggcccaaggtggtaaggttatattcattcaggctcctatatctgtgtattcctaaattcagacattatgtccacctgattgtttcatgtttttcactaaacacctctttcttctgttggcacaaggctaaatcctaaacacttatcctaattcctgtcagtttttcaattttcttgtttcaaacacctaaactacaaagtgtctgatagagctgaccatatttgcacagcttctcagcgcctctggactcatggacattgtccctcwgtccatttacctgatgcacagagcatcttttgcagtattcatgctgttctgcatcccttcataaacttgtggttgggtgtgggggacaggtcgttgtgcagctggaggtctcttccgctttcctggctgttccaacagagaagaatgaagaatctcactgtgtctgtagaaatgggcggaaaaccgtgtcctgggttgtgactccgaagtcactgggtgagtagtaatgctattagcaaattccacttcgtgtgcttggatgatttgttttctgcacygaccccaatacacactttttctcctcctttaataytaatcaagaggaagacaaccactggatacactggggaaactggaaaagaagaaactgttcaatatagaatcaccgtttaactcttaagaactttattccccaggaaaggtgaatttcacagccactgcrgaagccatgcattctcaggaagtgtgtgacratgagttgactgacgtcccrccacttgcgcagaaggacactgtagtcaaggccttactagttgaggtacgtaagtctactctctgtgagtctcagagcccttattatttcatacagtattatctaacatgcatctcacagtgacatttaattcccaagaatgtggatagatctacaatccaatttttcaccaccattttctcctttgctttcaagtgtttaatttttcttttatacattcagtatcgctttacttttttttttttttttgtcaatataaagcctgaaggaatagcaaaggaggaaactttcaacacgctgccctgtgcatcaggtaagtgtaatatatagagaaaaatttcatgttaagtgacttgccagagtatgcagttgtggaatgtcttttgggggcatgcttttctctgagagagagagagaaaaaaaaaacaactcttaccctcctccaaatctaaggacatttgatgaaaaacattgtcctgccccactggctgctctgaaaagccgtctttgcattgtgcstcgtcagcctccttgctcgccgcagccgcctccgccgccgcggactccggcagctttatcgccagagtccctgaactstcgctttcttttttatcccctgcatcgcgtcaccggcgtgccccaccatgtcagacgcagccgtagacaccagctccgaaatcaccaccgaggacttaaaggagaagaaggaagttgtggaagaggcggaaaatggaagagacgcccctgctmacrggaatgctaatgaggaaaatggggagccggaggctgacaacgaggtagatgaagaagaggaagaaggtggggaggaagaaggtgatggtgaggaagaggayggagatgaagatgagggagctgagtcagctacgggcaagcgggcagctgaagatgatgaggatracgatgtcgatacccagaagcagaagaccgacgaggatgaccagacrgcaaaaaaggaaaagttaaactaaaaaaaaaaggccgccgtgacctattcrccctccacttcccgtctcagaatctaaacgtggtcaccttcgagtagagaggcccgcccgcccaccgtgggcagtgccacccgcagatgacacgcgctctccaccacccaacccaaaccatgagaatttgcaacaggggagggaaaaagaaccaaaacttccaaggccctgctttttttttttcttaaaagtastttaaaaaggaaacttgtattttttatttacattttatatttttgtacatattgttagggtcggccatttttaatgatctcggatgaccaaaccagccttcggagcgttctctgtcctacttctcactttacttgtggtgtggccatgttcattatratctcaaaggagaaaaaaaaaacttgtaaaaaatgcaaaaatgacaacagaaaaaccatcttattccgagcattccagtaacttttttgtgtatgtacttagctgtactataagtagttggtttgtatgagatggttaaaaaggccaaagataaaaggtttcttttttttccttttttgtctatgaagttgctgtttatttttattttttggcctgtttgatgtatgtgtgaaacaatgttgtccaacaataaacaggaattttattttgctgagttgttctagcaaaaaaaaaaagaaaaaaaaaagaaaaacattgttctgatgaaaatcacttggaatgagcctcttagggaaataaatagaaagtactttttaggataaattattattattgtattttaagaataaagaaatgggcatagagaaataaaagacttgcttaaaagcttaaaagctcttgcctaataataaggtctaaggctgttgacctcaggacaggattctttctgatacctctgtgtttctcaaatgtcttcctaaaccatgttcaaaatattgaaatatctgtgtgacactagtatgatttactgttcaattgacagtttaaatgcactcatgtttttacttaaacaagttattttaagaggaactccaggttactaacttgtatagaaaaccagtattttaccaatatcattaatatagcaatacaaaaattaccactatattgaaagagaaggggaaaagctaacacttttttaagtttatttaaattatcattaaaaacccaactctgtgccacctataatcatcttgacgataatgctcagtctgcagatctctcttctctatacgaggatcccttgataaaatcatctagtcaatggctttaataacaactatgtacttgtgtccaaaactgtacaactttgatccacacctttttcctgaactcaaactcatgtattcaactgcccactctccacttacaggcttgtaggtctcataggcatatcaaaatcagcaagtttaagactgagtatctgctcgtcctcacaaacctgctcctccctcaatttccttcatctcagatgatgaaaaatccattcttctatttgctagggagaaacactttggagttctttactacattctttcccctatcttccctacccaatccatgcacaaatctagtcgattccaccttcaaattgcatccagaatctacccacttctctccatctctactattctagtcctttctcttgcaggctctcaatagctttctaactggtctcctgatcatctcttcttgttccccttcagcgagagggatcctttaaaacatgtgtcagatcgtgtccctcctcttctctaaccctttcaggaatctcccatatcccccctaagttaaagcgtaagtttttaatgccacttagaaacccttgctaccccatgacttcacgtcttcctaatctctccttcgcttaacccgttccggccacactgacctctttcttcctattggaatacacccagcatgcttcagtctctggagtccttttactttttgttcctttttcctggaagtatcttcccccaggtttggataaatctggctccttgacttacttaaagtctctgctcacacaggactttttatcaatgagcttttccatagggagccccctccccacttcctgacctgccttgttttactagctcaccatagaaacacttgccctgctttaattttctctatagcacttatcaacatctagtatactaaatatactcttgcttttttatcgtagtcttcccctaaaaatgaaatctccaggaggccaggaaatttgttttgaaactttcggtatcattgcacttagaacctggtacatagtatacactgaatacaaatgaatggaatgaatgtaattcttgaaaagcactaacagtagcaggaattaatataaaccatgaagagaaggaaataagcataccataagtatatgcccataggaaaagccatagaaatttagcacaaatgtatatgatgaatatgaatttcactgagagatgaatcatggctttaagggaaacttggattgtatcaaagaaattatgtaataactgagccaggcatggtgactcacacctgtaatctcagcagttggggagatggaggcaggcaaatcgcttgagatcagaagttcaagaccagcctggccaactctgtctctataaaaaatacagaaattagccaggtgtggtggtgcatgcctgtaatcccagatacttaggtggctgaggcacaagaatcatttgaacctgggaagcagaggttgcagtgagatcacgccactgttcttcagcctgggtgacagagggagactctatcacaaaaaaaaaaaaaaaaaaaaagttatataatgacgaaggaaaataaaaggttggatctagatgatgtagagaaacatgattcataacaaaaatagaacatttctctcactttcccctcctttatatgtgtgtttttcttctttcattagatactggagtacctgaaaaggtgtcactgaatgttccttcaaatgtggttgaaggatctccaagggcaacatattcagttttaggtgattctttcagcccaagggaagcagctgtctggctgtataattctagtgcatgggcctcaccatccacgattaatgaagtttctgacaacaggcaatggattgagagaaagcactaagggttacactatgttacagttggaaaggggcttgaatagatgttgtgctacatattatgccttgatatattctaaaaagaaagggtcacctctcagtgccctcatcttcaagcaatttactaggtggtaatgcttcctagtcagtttgaaaatggttgtggttgagttttaccagacatgtggcccatgagaaaagatagatcacctaccattcagtttcttcccccctttctccatccttaaaccgtctattttctcaccttttgttttcctccctatttcttgttttttcaccttttttagtcttcttgtccttttctctataggttatttggcctctcagttagctaataatctattttcctagcctaatacaaaccatatctgatttctttacaacttttattccacaggtgatatactaggctctgtagtgcaaaaccttcagaaccttcttcagatgccctatggttgtggagagcagaatatggtcctttttgtccctaacatttatgttctaaactatctaaatgagacacgacagctgacagagaagatcaaggccaaagccactagctacctcatcagtggtgagagattacctcaaaaagaagagccataatctcttaaatattttttggtgaacgaaaatcaacatctgtttcattaagattcgatagtcattgtcgtgattttcaataaaatgtcccaatatacaagtagaaaattcaatagtatcatcaagcctgtgattgggggttgcgggaaattttaactaaatattagttaccctatgattcctaatagcactgagaaaaaagctcaataatcctccaatgtctttgccatttcaataaatctatgaacacttcctcttcagggtaccaaaggcaattgaattataagcacagagatggttcctacagcacctttggggacaatgatggtagcagtcagggaaacaagattattttttccctatgctctctgtagatccatgacatttcaggattctagaaacagctactctctaatatctggagttttttgtggaaaattgttagtctttaaataacgcatatgctgtatgtatcattcctgttgggtaatctcaccgtttcatctctgaaagcttacctgctgtgataacacagctgaaaatggtgaaataaggatcttctaaatggaaatataaagcagaaaatgtcattctataaaatgacaggggaagaagctcccacactgtgcattaaagaaggaggggagggcgaggacagaaggagaccgtgatgcagtaaagtcaggacaagtcattctggaaatgcagttttcatggtggggaggcttggaggctccaacaaatgtttcacaacaaaaaaattaaaaagcatcaactcagagaaaccaataaagttgagatataataaaagatattgaggtgtttgttggactagagtatattcagctcttaaatactatttccccatcaatacctcccagtaatctcctccactgaattgtgaagagcaatgtctggaggcagtgcacaaagtgagctatgaaagtgaggtggtcctcatgtgtgtgtttctgttttgctcgacgggctcactgcatttgtgctcaagtcctttgctcaagcccaatcgtacatctttgtggagagctcacacatcagggatgccctcacctggctttcacagggacaaaaggcagatggttttttcgaaggctctggatcactgctgaacaatgccattaaggtgatgccttctctgtttttcttctggtccctgaagatagtgatatgtgggaggaaatgatgtttgaattgagtccttcagtcttagcgacatagatttcaggaagaatggtggactctaaatctcctgaaatctagcaataccttagtagttttttattgaatgaaaatagtgttcaaaaaaacctcaaagccgaacatactataaaaagtgagggaaggtgatctgggacagactcaagaattttagggtagaggaggaaggggagaaaatcaacaatctagcacaagacaagaaacaatctagcacaagacaagaaacactctagtgaagatgtcaaaaagaaaagaagtgttagcagatgctgtctcatgactgttgaagtgtttgagtctctctgcctctgatccttacacggtggggtgaacgatgaggtgacattctctgcctacatcaccattgctttgctggagatgcctctgcctgccactgtatgttcaagcacatcctctgtacctccttcacacacgtaaagaataaaattataatatggtgaatccctgagggaaattaattgtgatttttatggtatttaattttggtacatttcactggaatgtaaaggaccagatccttttggaagcagcagaggaaactcctctctggtcagaactgtgaggttatacaggcacattaaggtttttaatctgcagttagcccgggaatagctcatttgcctggttctgctgttttacaatagcctttcgtcttcttcatagcacgcagtggtctgcagtgccctatcctgccttgaaacggcctggagctccacctcagaggcccaaggaagtgttgtctataccaaagcattattggcctatgcctttgccctagcaggaaacaaagtcaagcgaagagagttgcttgaatcattaaacagagaggctatgaaagaaggtaagagctgctactgcaaagtttacttctgacaaccaccagtgaccaaaagaagggacaatacctctaccgagctcatgcttaccatgctatcttaatttaatgacagaataattatcattgatctaagacccgaattctctggataacatggatcattttattaatccacacagtatagactctatacagtcccaccttctaatatcacacacacacatgtagtagacacaaaggctcaatgttattccctggaactttactttcttgataaagatttgtttgatagtgactatttaatgctttcactttgtttaatgctttcacttcattaaaatgaaatgtcaatttattaggtaaactgtaattataattatcacttatggattagattttgaaatcatcctttaagctaaaaattctacccttttctatgtcaaagaggattcgatccactggcaacgtcctgggaaacttcacgaagctaagaccctctattctcaaccctgggctccctctgtggaagtagagatgacatcttatgtgctccttgcctatcttactgtccagcctgccccatcttcagaggacctgtctgtggcatcacgtattgtgaagtggattaccaagcagcaaaatccccaagggggcttctcctccactcaggtctgtgggaagactctagaaggaaacataaatatattcacatatatgaagacacaaccatctgggagttgaataatggaatggttagtatttccaattcacactttctccatccctccatcagcagacaagttccagccttactatcttatgtatggattac

SEQ ID NO: 6963 - DNA, 38998 bp, Homo sapiens
ttcccaatgtgctgggattacagacatgacccactgtgcccggccttaatctattttatcatgattctggttcactgcaaccgccgcacctcttgggttctcagcctccctagtagctgggattagctaatttgtcagtttaattcttaaaccagctgcagaacctaagagagtagaaggaagttttcctctcctacactaggttgtatgttagttttctgttgccactggtaatgatttgggacacaacaataagccacaaatttagtggcttaaaacaacacaaatgtattatttcacagttctgtaggtcagaagtctgacatgtggcggtggctaacgcctcccaaatcccaacactttgggaggcagaggagggcagatcacctgaggtcaggattttgagaccagtctgaccaacatggagaaaccccgtttctactaaaaatacaaaattagctggggctggtggtgcatgcctgtaatcccagctactcgggcgactgaggcaggagaatcgcttgaacccgggaggcggaggttgcggtgagccgagatcgtgccattgcactccagcctgggcaacaagagggaaactctgtctcaaaaaaaaaaaaaaaaagaaaagaaagaaaaagaaaaagaaaaaaggccaggcgtggtggctcaggcctgcaattgtaacactttgggaggccaaggcgggcggattgtctgagctctggaggctgaggcaggagaatctcttgaacctgggaggtggaggttgcagtgagccgagatcgtgccactgcactccagcctgggcaacagagtgagactccgtctcaaaaaaaaaaacaaaaaaacaaaaaaacaaaaaccctgtctctactaaaaatacaaaaataggctgggcggggcatggtggcaggcgcctgtaatcccagctacttgggaaactgaggcatgagaattgcttgaacctgggaggtcaaggctgcagtgagctaaggtcacgccactgcactccagcctgggtgacagagtgagactcaaaaagagtctcaaaaagaacataataaaaattaaaataaataaataaataacataagaaaaaaagaaagaagtctgacatgcgtctcactgggtgaaaatcaaggtgtcagcagggctgtctgtgttcttttctggaagctctggggaggatccatttccttgctttttctggcttctgaaggcttcccaccttacgtggcttgtggcccccttccagtgtcaaagacagaaatgacaggttaaatacttctcatgtcacatcactgaacctgtctttcctgcctccctcgtccacttttaaggacgcttgtgattacactgggttgccaaggtaatccatgataatctccctattttaaggtcaactgattaacaaccttaattccaattgcaactttaatttctttttgccatggagcataacgtattcacagatttcacagatggggacatccttggtgggggggcattgttctgcttaccacagtttatcagtagacaagagagaaaacagccaatttagggaaataatatatatatctctattttctgctgagacatctccacagtgtctttacagactgataactagagctatttctctagttaacaaaggcagagtggccttccattgcaggtatttaccatggcaaatgccaagcttctttgtgcaaatgtttatgtgtgtgctaagcattttaaatagatcttttgcatcactctattttcacactgtgaaggatataatgtagttatgagctttgaagatggacagacctgaatttaaattctgactccattacttattacacctatgaaccttgagcaatttacctaatcttccagagctttaatttcctcatctataaattaaggattaaaaacagctagcagaaaaggttattgagttgaatgcaataatgcatgtgaggccatgagcagaggctctaagtatattttgaattgtttttccctttagatgttttcccaggtacctggctctctgggcctaggacacataatcccagagggtataaatctagtgcttggtcccaacatggttttgctccctaaatactgaaatagtagacaagacgacacacctgaagcccgaaagaggtaaatttagtatacaaggaagggaatactctttgtcatataaaataatagtaagttcactaaactaattaatgcataaactcaactaaattgtgagttaataaggttgtgatgtaaactgaataaaacataaagaatggtttagttctatttggtgatcacaaaaatatattagttactaaggaaaattaataatagcctgtgctatgtgtcaggtcccaatgtgaagtgctttacaaacatctcacttatttccaccaactaccaggtgttacccctgttttactgaaagcaaaccaaagttaaggaaaggtgcataacttgccatcattataactgtcaatactgatgaagagtatgttatcgtcagtcttatgctccttaaggatgtaggggtacttctatatcttttgcgggcaatgatggatggaatattgggctgaaccaattagtatgttaattttaaacttctgcttgaagaaaggatctatggtaggtattagtagcgagagatgagaggtatccttatatcttttaatttcatattcttttcctatgagagaagggcaagaatctaggaaattaattcagttaactaatatttattggacattttctattttccagggattacgaaatatccctcttctacatttatcatttagacttcaattgtcttcactgaaaactgaggggcttagttttaaagttctttttttttcctttaaatatctaagagcctataaatccactcaatcttcattttctcccaactagaccttaaagtggcatgcagaattatagtgagacacaggtgggctgtgtatggtggttcacagccacagttggtggtggggagagtaaaggttatgatttccttttttctctacttcttcctatccatatttgcataaaaacatggtcacacattcttacttgattacttgtagaaagacacattccaaagatactaacacctttagggtaaaggacatctcttccttcacaatttattgcagaatgctaggtttacaggagaagcttgaggaatgcttaagcaatgttcagttgatatgaaaagttctattagcttaacttctagtctatttgcttcagttgctgccaaacatcgacagcctttcaaaccaggatccttccttatttagagaagtttgcaggagggcttccatttccatacaccggattaaatgcttttccttctcacctgtttaggctaatggccttcagtgttatgcagagtaaagacattctgtagcctccattcagaagaaccattttgtttgaaaaagaaaagtctaattcaagcagagtcattaaatgaaaatgagaaactttagaaaaattaagaaaaaaaagttgagtattctctagggaacacagattgttttgctgtttagaccgagataagttcttcaatgcctgctctcaagctgatttagtctatgaaaatgattttcttatggatggaggctttcctataactttactttgctgttgatatatttcttttttatactaaatcttttttggtgggaactgtttagacctatgaccttagaacactggcctgacttggagaaaaatgaacttgaaaagaatcctgtgatatatggagcacacacctttacatataaaaattaaactactggcccataatcagtatagctcgcctcatgatagattattctcaggctaaatttataacaggcactcaacaaaagtattcatcgcttatcccctaacattatctagtagctataggagccggtgacctagtaaataataaaaaaaaatctttaggggtggaatgtaactatatgcagtagcggtaattctgctccatttgtaaggagggtgaaatgcgatatggtcatgtaccctcttggtacacaagttccataggctatagaaaaacaagtccataccctctgatatctgcattccttattcttgttatagcttacaaatcttctttagacacttaacagtgataattctcccagggaaactaaggaagcacatgagtcatgtttcttaactttaatgttgtataatctgaaaattatctatagatgctttttttttccattggtgctagaaaattccgcctaggctcaatcgatatccatttctaaacttctgcaagaaagctttaactgctttgacatgccaaaaatccaggtgtgaattaaacaacgaatgctttacctcgttttcaccactagttctaccagtcagaatcttttcaaatcatcctcagccagtgcctgtcatccacggcctggtaacacaccctttcacctcctcataccccgtgtcttcgcttttccagtcctttggctgccctccggtttcttccctcacatacctgtctgactagttcctagaagcctggcagaaattgttctccgattttaatctggctgccacaaatgaaagaccttggagtccaaatactcctctctcaaagcaaaatctaaatggatataatttataagcaaagataacacttctgtttttttctctataaacaaaccatgcatgggcttttaaaggagaaaaggaagagtggattgacagagaaaataactgtttaggatagaggttaggaaaagactgagagcaagagaaaaggcatcaatcccagttgttaatccacgaggcatcccccagacccttctgtaaaggttaatgaaggcagtaaggcagttatctctgtttcgtgcactgatgcaatccaagcttccacggtttagcacatagtagacgctctataaatatttattgaatgttgaacgatgagagagtaattaaaaaccggtaagttgatatcataaatacaacgacaacggctcccctatcaaatgtttagtgttcccagagacagccccattgttctacatctcgttatactctggccttttcccgtttttgtcattcgaactcatatacatattgaaatcgaagcacacacaaatccctgaaatgacaaacttaaatgctatccaaaggaagttacattaggttgctgctttgaaaatgaagtcaactcctaatgggttagctgtttctgcagcattctttcccgccttcttggagttgaggtgagggattaaacaatcaaccttctctctcctttctctcattctcaaagtttttctcgccttttctttcctttcctttgcttcatttcttttcccagtctatcgtttctctaggggtcgttgctttgctctttctccctctctgtctgttggtccctttgatcctttctttctaccccttattcccagcagctccagaaaataccttctttctccccgtctcacgtcacttccctcccttctcccatctccctctcctctccgagaggtgcgttccccactagaggccagcactttcttagtttcgtccttccaaccggcgagcagaactcggagagaaagaagggggtaaaaaagaggagaaagagagcaagagaggaaaaaacccctgggcctggagcgcagaggcccgggagctgcgtcgccatggcaacgggcgccggcaggaaacgagggacgcgcgggagggagggggcggagggcgccgaggggaggcggagggacggcggggggggggtccggctgccccggaagcacctccccgcagccccctcctccagcccggcccgcagcccctggcctgcggcccccaccttctcggccgggcaggaagtgacaggcccggagcgagccccggaggcctggctgagccgcggccgggcccgcacccggagcggcgggaggggcggggagccgcggtcgcgccgggcgcctcccaccccgccctcggcgcccccgcccctccaggaaggggaggaggcgaggggagcccgccgcggaggccgagcgagcccccagcccagcctggcgactggggaccccggcacatgaggtggacgcccccggggaagacttgggtgcacagccaggcgagaaggtaaccgggcgaccgagggccggggaggggcaggacctctgggggcttggctgcgcggggatgtatcctcagccacctccatctgtgtaacgccccaggtacctcccccagttgctttccctgcctacctccggcgctgagctctgcggtccttcggctctgcctgtccgagtcttctggctattcattctgctgcgcttcatgctgtctgtccgtcaccytagctgcctctgactgctcattttcttattcatttttccttctctgactttggtccttccagccgagcatgctgtctagttatctccctgctttcgtggtccgctgggttcctcagcctccagttccttgacttctgcctctgctctctgtatgcacatgtcccagctcacttgggtcagttcattcccggcgcaccactggatcyacccccttcccccagtgtatttgatttctctttgaaacatcattttcatcaaggttctatatagaacgaggacccttgggcgtctactccctgttctcttgattattaccgtgtctttggcacagtcttccctgaaccacccccttctcccgtcccccttcctatgtcccatcctttctgcatgataagagtttcgtgcttagggatattgactttctccaactctcggcccaatgctaagtccacctcaatgtcccattctaactcccttcggtaggtctgtgcgcctacccaaccccatgtatgcccacatgctaccttttaagatgaccatggcttagctactctgggggcatctgtggatcagcttctcactgtcttccagtttaatttggaaaattttgatacctggtgctgcccaaactgtttgttgtctccatttttttatatttaatcttgtagtcataatgttgatcacaaatgaatacatttatgtgcccgggatccaggaatcctggttttggtggcagtttcccttgattttattgagacttttaagttggtccctttacatttttatttctagttsacaatccaaaaaaaattattaatcagaattcagktttgggaagacgaggggtcatacggtttgtattttcacatgtgaatgtaggaattatgttctctatacctagcaaaggggtctcgtgtctctgagtccagtgaactaaatccagtaatctataaaactgtgccgtgctgcctctaatccttacccactttttttcttcacatgctgataatgaggattcatgggtctgtatctgtttagtgctttgatattttggcaaaagatgtggggagaaggtagactagttgaagctgatatgatttttcctatgtactttttgggtratatacatgtttgcagtgacatttgctagtcctaaatgaaactaaagaytggggggggataatagtgtgattggatgatactgggaatgagataataagaaatatcctcagctttattgccaaggccaagcagtttgatactttgcttgtttgtttgttttggatgcaatccctaagaccagtccattcaccctaatgaaactgttgacaacacttagcagaaattctggtttgatgtttatattcttaagccagataatattttggtgacctgatatttctagtggcccagtgcctcagaagtagagaaaatagtgtgtagcttaacaaaagagaaaaacaaaaaaaaagaatgagtaaaaaccttattgtcatttagtgctgctttggaagaatatttcttcttctcatctcctgcctctttgcttggttcttagcaatgttttcatatgtgtctttttgcaaatgtaagtgtagtccccagtgggtaaattctgacatgttagtagattataaagttgcatcttactttcttgaagattttcattgtgtgtatttctatgtttcatacyccggagtcatttcttaaaatgatatattacattcagtatgaagcctyctttgcagtgaggaaacaggtataaggaaggaaagcaacatgcctgaggtgttattagtagcctgagctggaaccaggcagctatttgggctatgtgggctgtaggtgagctcttctgcttcctagttttatgaccttccatgacccactgaatgtgtctgtatcttaaggtcctcctccataaaatgaggataactactcactatcatagtgaatgacactgccttaattacagtttggtttgaagaagcatgtgttagtccaaagacttgatacttactagggcaacttctttaacctcagaaaaccttatgtctcaaattgtagaatgaggataacagtgttgactttacagcactactatgagagagatacagcataggtgaagtgcctagcccagtgaaaggaggcaactagtggctctccagtatatggtgactcatttggatgataacgatgcagatggagacaaaaatgagataaccaaaacttttaagtggaaagattttaaactgttaaaaaatgctatgggaatgtaaggtaactttggtattgtaaggtgccatctcacattctggccgttttatttaatgacagccatgagggaatacgtaaaggttgtttcttttgagactgcatagcttcaaaagatggtagtattgggaagacatggttgcaagagtgtattgaagatttgggagttttaagatgagaaatcatggcttatggaagaggaggaagattcttagatacttatggatttcctgtgtttttgaataataacatgagataacagcttgggatcaagatataaattttaaccttttactgcttccctctaggtcttgagtcagacagagcaccagccttggggaccctggaccactatcatggagactgagagcgagcagaactccaattccaccaatgggagttctagctcagggggcagctctcggccccagatagctcaaatgtcactwtatgaacgacaagcagtgcaggtgagactcagctctgaggggccatggtctgtgagtcttggcttgtggtaggcagtgatgctggaaaataattgtactcagttctttttcaacaaactggggagagttgggttagatgatgactaagctgtcttccagctctgagaatcttaggagtttacaaatgtttaggcaagcaaacagtgaaatcyggtctttcaaataaggatttaaaaaacacattcagtccatctagctagattctaactaaccctttctcatactggattgccaggtttttaatctttggccattcttgtaaatccccttgagtaatagaagtatcatggaactctttagagatttatttttaaacaaacagcaaattccatgtttttattaattctgttaggaaatgaggtcttttagcaaatattttggttactagaataactatacatatcataaaaatagttctaattattaaagaataagaatacagtaaagtccagttagcactaaaaccaaactactattttcatttcataaatctgtattagcatactgatatgtaaaaatgccaattagttgaattcgttgaaaattttacgtgaaggaatctttagaagccactatttattttttcattatttccaacccattagggctgtattacctttactgtatacctaaaatatacttttacattttctccttttttttttgagacaaggtctagctctgttgccctggctggagtgcagtggtgcgatcagtgctcactgcagcctcagactcccagttctcctatcttatcctcctgactagctgggactataggcacactccaccatgcccagctttttttcttattttctttacattaatcggcattttgtttattttcacccgatctagtctttgctatggcatgtatttccagctcccaattggagaaacaagtttgtataaattgcactgctttacttttcttaacatcctatggagaataaaccatagaattacattcacgcgtcacttaatgacaggaacgcgttttgagaaatgtattgttggacgattttgtaattgcgtgactgtcatagagcgcacttacacacacccagattatgtagcctactccgtacctaggttatacagtataggctgttactctgaccactcctgtgtatgtagtctgccattgaccaaacagtggatatgtggtgcatggctgtaattgtttcttccggtttttaaaggactatatagacttactgaggcagaaggatctctctgtttttttgagatggagtttcgctcctgttgcccaggctgcagtgcaatggcgcaatctcatctcactgcaacctctgcctcccaggttcaagcaattctcctacctcagcctccctagtagttgggattacaggcgcccaccaccacgcccagctaattttttgtatttttagtagaggcggagtttcaccatgttggccaggctggtcttgaactcccgacctcaggtgatctgccctcctaggcctcccaaagtgctgggattacaggcaggagccaccacgcctggctcagaaagatctcttgaggccaggagttcaagaccagcctgggtaacatagcaagaccccatctctaaaaataaaaaaaattagctggacatggtggtgcatacctatagtcctagctacttgggaggttgaggcagtcaggaggattatttgagcctaggagtttgaggttacagtaaactatgatcacgccactgtgctccagcctggtgatagagcaggttgactttgctctaaaaaaatgaaggaaaatcagccgttgacgatttagcccaaactcccatctcctctggtttctgtccttcccatggccccctttcacacaaatacagtgatttacatagaataggagctaggagtggtccattctaaatrttttatcctctcttttcctaggctctgcaagcactgcagcggcagcccaatgcagctcagtatttccaccagttcatgctccagcagcagctcagtaatgcccagctgcatagcctggctgccgtccagcaggtgagaggtcagcagccagctggcccgagagggaggggacaggcactacaggtgggtaggggagattttttgggcatatagcatcctatactaagccaggctgcagacagcctcctccgcctcctgtccttctgtgggaggatggatgcatcttagcttctggggttgcagtaagaaccgtaaaatcactttttaggtatagagtggctgtgttatagacctgcattgtctaataacgtagtcactagccacatatcgctattgagtgcttgaaatgtggctagtctaaatggagacgtcctataagattttagagttagactacttagtacaaaaaaaggtaaaatatcagtaatttaaaaatattaattacatgtgaagtgatattttatattgggctaaataaaataaattatgaaagttaacttttcctgttttactttttaaaactttgcatagtagaaaattataaatgtggttcatattatatttatattggatacctctggactagacttttactgactcatgatatgacytgaccaaaagatctttttctagctgggcgtggtggcttacgcctgtaatgccagcactttgggaggctgaggcaggtggatcacttgaggtcaggagttcaagaccagcctggcctatatggtgaaactcattctttactaaaaatacaaaaattagctgggcgtggtggtgtgcacctgtgatcctagctactctggaggctgaggcaggagaatcgctcaaacctgggaggcggaggttgcagtgagcggagatcatgccactgcactccagcctgggtgaaagagcgagactccttctcaaaaaaaataccatctttttccacctaaaagagagtgggagctggaggacaagttgcctctctgccccaggagggttatgtggggctaattggttagcatatgtggtaatgtgaggatcactggactagtgaatatacttttctttaccctaaagtggaatctccctgtttataatgtgaaatctctatgttttgtgcttgtgatttattactagaagactgagagctttttccttcactgtctttgctatttcttgtttcccttcccctttaataggccacaattgctgccagtcggcaggccagctccccaaacaccagcactacacagcagcagactaccaccacccaggcctcggtgagtacgccctctcccactgagaggcttctctacctgggtctttgtctctgggttaaattactttgtgccgctgatctgagagtgtttattgagccgtcagtggatagttactgcttttaagtagagaatagtagtacaaggggaaagtaaccaacattaatctatattggagtctctaaagaggaagtctaaggaagagaggaaagaaaatcctggggaagaagaggagataacaaagaaggggactaatccctggactcttcaatgagaagtaaaatctgttctgtttcaatcttttgtcttctcaactgttaacactagtggttagagactgttggttttttttcactttggtaataccctaaagtagccaggatgacagttttggatatgaagacattatttatttcccccggctccatgaaagtgaaatactctgttcttgactgtgtgactctgaatttgtcagtcacgtacctttccttttacttctcccaaatccttagtcctggttcctttctgtaccacacagatcaatctggccaccacatcggccgcccagctcatcagccgatcccagagtgtgagctctccyagtgctacyaccttgacccaatctgtgctactggggaacaccacctccccacccctcaaccagtctcaggcccagatgtatctacgggtaagccacagatgcagtcaccattgccccagaggcataattgtctggccctggcaaagacttgagtgaaagcttttttttgagacagaatctcgctatgtcacccaggctggagtgcagtggcacaataatggctcactgcagcctctgcctcccaggttccagcgattctcctgcctcagcctcccaggtagctgggattacaggcatgcaccactatacctggctaatttttgtatttttagtagagacggggtttcaccatgttggccaggctggtctggaactcctgacctcaggtgatccacccgcctcggcctcccaaagtgctaggattacaggcgtgaaccaccgcrcccggccaaaagccatttttttaaaccatggtaaccctgatgttttgagagaagctgggacctacttcccatactttacttaacctggaagtgatgttctgtgttcacaggtagcctatagattaaattgagatattatgctagaaaatactggcttaacatttgactaaattagtgttagatatagtcgacctttaaacctgtggctcaagtatacaaattctgtgttatcgctcagcctacctactttctatatataagtacttgttctaaaatcctaattttctctatttctttgacgtgtgactcttkgacatcaatctgtagttttctatgcwttctaggttttcttctggatggttcattacatgtggagaatatgaggctcctgggttggtgtggaagaggcagggctcagctgtttaatatcttctgtttattttgtcttgtggtccttcctttccatctcttctgtctcttctttccctcttgkcctctttgctcttcctcttcctctccttgccagccacagctgggaaacctattgcaggtaaaccgaaccctgggtcggaatgtgcctctagcctcccaactcatcctgatgcctaatggggcggtggctgcagtccagcaggaggtgccatctgctcagtctcctggagttcatgcagatgcagatcaggttagtggcgatgactttacctgtgggtgggcactgggcaggatgaagggaatgaccacggacctgggtccacccttctgccccattacacttttcagaattcttactttttgtgttttgtttttccttcccttaatcaccatagaacttgaatcccatataacctttgagttaatctgagttagaaagacaaggagatttgcctgaaaatagtcttgtggatctgggaagtcttattttcaagatagggtaaatttcctcaccatccttctagtcctctgtgggtttgttttattcggagagtcttaattctctcatagtactgtcagaagagaagagattgttgagagaattcttctgttagttagatgtaaagctgacctggctgagttactggaggaatgtttggttgcttctgtttgtgagttactctagttctcaactttcagtcttctcttcctgttcactgttttttcccagtaaaggtcttcctcaccattacttctcatgacttattcccaaaatacatgtatttttgagcctggaattttagcttcttatagatgggacacaacctaggatcttacgataattatttcatccttttagtttatttatcagtaagctggtaaatgttgagttcttccttcatgtacttttggccctccctgtttatgggtttcatacctgtaggttctgcatctctggcttccacatccgcagatacaaccaactgcagattgaaaatatttgggaaaggccgggcgcggtggctcacgcctgtaatcccagcactttgggaggccgaggcgggtggatcacgaggtcaggagatcgagaccatcctggctaacatggtgaaaccccgtctctactaaaaaaatacaaaaaattagccgggcgtggtggtgggtgcttgtagtcccaactacccgggaggctgaggcccgagaatggcatgaacccgggaggcggagcttgcagtaagccgagatcatgccactgtgccccagcctgggcgacagagcgagacgccgtctcaaaaaaaaaaaaaaaaaagaaaatatttgggcaaaaaaacaattaaaaataacaatacaagaacaaaaaataatacaaaaatacagcatcgtgtaaccatttacatagtacttacattgtattagatattataagtaatagaggtgatttaaagtgtatgggaagatgtgctatgtgcacagatgatgtgcaaacactgctctgttttataaaagggacttgagtgtctgcagactttgatgtccatgagcctggaactaatcccctgtggataccaaggaacaattgtattagaaattttgcaggattaaaaaagaaatgtgagtcaggtcttcaaagagcttagacaatgaaagtgctaaattaggctgggcatggtggctcactcttgtaatctcagcactttgggaggctgaggagggtggatcacctgaggtcaggagttcaagaccagcctgaccaatatggtgaaaccctgtctctactaaaaatacaaaaattagccgggcatggtggtgtgtgcctgtagttccacctacagggaggttgagacagaagaattgcttgaatctgggaggtggaggttgcagtgagctgagatcgtgccactacactccagcctgggcgacagagtgagactccgtctccaaaacaaaaagaaagtgctaaactaaatggtgctaactttgagtgacacatgagtttggaaaagaattggttacattactttgcaatgccttattgggatacttgagcagagtcttggacgagtggatttgatttggagtgagaagaaaactagagagagaacagcaagcgtaagagtatagtcatatatttaaatrcgagtatgtgtggtaggcgttggagatgaggggataaataaaatagaatcaacaggcatgrtgatagaagaggtcattgctggggtagagcatataaaggaggttgtagttaacttcataggtcacagggatcattgctagctattgaacagcagattaacaagatgaggaaagtacttaggaagaactatagggagaataactgttctaacagttcctggagaagagaagttagggaacttgctaagaaactcttgtggtcatctagctgtaaggcaagtctttgttttagactctggtgatagcaatgggagccacgagtgaggttggttccatttccatatccagttctttgatttatccgctcattcattcatcagatatttgagtgtcaatatgtggaggaacagagggcagtagttaaaaatacgcatctgatgggtcagattccagctccactacttactgtgtgaccctgtgcaaatgatctgacatctttctgttatcgtttttttcatctgtaaaataggtattgtaatatacctacctcaggatgtgttgtgaggactaagtgagttgctgcgtttgactgcttgaagaatgcctggacgtagtgagtgtttaggagaaactactgctattaatatatcaaacattccttagcgttggatgcccaagaaagtcacgatcactgcatttgtggagctcacagaccattgaaacaccagacattaaactgatagtcacctgaatggggaaataattgagaaagtaccgagtgttctgagaatttagaaagggacctaacttagctttggcatggggtgtaaaagtcaaggaggtgacatttaacttggggtgtgtagaagttagccagataagaatgtggaaggagagtgttggaggcaggagaacagtgtgtccaaaggtcctgaggagggcaggaacttgatttgttagaggaattaaaagtcttgtattcttggagtttggcatagtggggctagacgggtaggaggaaccttatctttcagggctttgggggctgtgtttaggattttgggctttttataaaaagcaattggaagctatagaaggattttaaatatggaagtgtcatagagagatttggatgtatttttgttttgttttgctttttaaataccatgttgatttcctctttggagactaaacggatatggtgtgagtgtgactgtagggagaataactgttctaacagtttaagggacagacgatgttcatactgggggtagcaatggagatggacagaaatgcatagatttgaggataacttagaagaatcattgaagagggtgaactaatttagtagatgggggaattaaaggagatgccagataggaaatctgtggggtggctggtggtgctgtttatgagacgaagaatgtaggagtgtatttagagtgacgttcagttttggacatgcagacctaattagaagtgtttgtgagccatccatgaggagatactgagactgcagttttattatgtggttcttgagctcagaggagaggtctgggttggagataaacatttgagagtagtaggcatatagatgataattgaagtcccccatctactaaattagtttactctcctcagtctttaaaattgcctggggaggccgggcacagtggctcatgcctataatcccagcactttgggaggccgaggcgggcggatcacctgagatcaggagtttgagaccaacctgggcagcgtagtcaaactctgtctctactaaacatasaaaaaaaattagccgggtgtggtggtgcatgcccatagccccagttaacttgggaggctgaggaaggagaatcacttgaacctgggaggtggaggttgcagtgagccaagatcgtgccactgcactccagcctggtcaacagaggagactccatcttaaaaaaaaaggccagcgctgtggctcatgcctgtaatcccagcactttgggaggctgaggcgggtggatcacccgaggtcaggagttcgagaccatccagcctgatcaacatggtgaaaccccgtctctactaaaaataacaaacattagctgggcgtggtggcacatccctgtaatcccagttacttgggaggctgaggcaggagaatcacttgaacctgggaggcggaggttgcagtgagccgagatcgcgccgttgtactccagcctgggcaacgagggcgaaactccatcttaaaaaaaaaaatgtttggggagatagtacaggttgaggagaggaacgtttaatatggggccctgaggtaggatgaacccccactttggaaaagcagttcaaggtcgacagaggatcgtgggctgacagaggcgaatgggaaagagcagcagataggaaaatctggactgtagtgtcacgaaggcaagggaaccaaatgttacaagatgtgcatgtgtgcatgcgcgcatgcgtgggcagggggcatctctttctaatgtagagagagaaagaaagatggttttattaacagggagggagagttgtttcagttgtttggggggtggtgaatccaaagtagtatgagtttgaggggtgtgaatggctggtgggaatgaatacagtgactgtaaacagctattaagagtttagcagcaccaggaaaggaaggtggaactggggaggggaatgtgcagttcctacatggtgatgagggagccagtggagaagaagtggaagaggaggcagtggatattatatgctgcttgagatggcaggaggaggtggaatatagagtgcagagaaggactgattgccttttgataggaagaggagagaagggggaaatgatgggtgtgtatgcagataaatgtatagattcggtggtggaactgatgaagcaatgctcatataatggtttttgttttctctgaagaggtgaagagtaggaggagaaagagaaggtagtctgaggtatagggagagagtgggaaagtttgaaatagccattatggaaatgaagctgattggaaaaactgtatattaataattgccagataatattatgtgctctagcacccaatcctgatgattcttgtcaatatctctcaaaagccatcaactctttactgctcctgcctgaattcaggtttttattattttaacctgtactgtactagttttctttctttctttctttctttctttctttctttctttctttctttctttctttctttctttttttttttttttgagacagagtctctgttgctcaggctggagtgctgtggtgtgatctcggctcactgcaacttctgccttctgggttcaagcgattcttgtacctcagcctcctgagtagcttgattacaggcgcgtgccactatgcccagctaatgttttgtatttttagtagaagacggggtttctccatgttgctcctgctggtctggaactcctgagctcaggcagtctgcccaccttggtctcccaaagtgctaggattataggcgtgagccactgcaccggcctattgtactagatttctacatggtcttcttcacttcagtcttaacctacttgtagttcttttccacattactatcaggaaacttttactatgtttttttaaataagaaaatatatgttgttactactaattttttaatcgtacttctggtacacagaatttgataaaattgtaatccttggatcatgacactctctcactgttggtctcgtcataactgttaaaatttatttactctgtaatttttaataatgtaataagcagtgtgcagttccgtctactgccttccattacccacagtaacgagccttctgatttctaagtccattcttccctcgggtccttttttatatggttttattgcatctctctatgtttctaaaatgccctttttattatagaaaattttaaaggtacacaaaaacagaaaaagtatgaattcctgtgtacttaccatccagcttcaacaattatcgacacatgaccaatgcattcaggcccttctctgcctgtggaatattttgaagcaaaccccagacaccatgtatatattttaattgtattgaaatgtgtaaggtactcgtgctgtatgtacacttttggagagtgctttcttaataacattgtcacgatccatttgttttgttgcagtcattggagtttattaattgtagtttctatatactattccattgtatgaatatactatagtttattcatcttctcttctgtagatggccctttgagttgattccaggtcgtggttgctaatgaataatgccaccatgaacattcctacacatgcctcctgtggtacatggcaagagtttgtcttgtggaattcctgggttagagggtgtgtgaatgttcaactttaggatatgataacaaatattttctaaaataggaagtgtattgatttatacttcaatcagaaatgtataaatgtataagtgaatgtttattttgattaataagctttattggcttcctataatcagttaagcagacatcattctttccctttatccatattttggagtactgactatgtgccggaactgtgaaggtgctaggaatataacaatgaataagacagataaacttgctgttcccaaactaaagttcagattccttgtttcaatacaccaggcccttactggcccagcaccttcctacctccttatccacagcctgccttccttgctttatttctttccattccttgtaactctccccaaacataatgaaatatttataatttctaaaaatacagtctttttagaaattatacattttttttaataatattttaaaataatgtctttttttttttttctggacagggtctcactctgttacccaggctggagtgcagtggcgtgatctcagctcactgcagtctctgcctcccaggctcaagtgatcctttcaccttggcctcctgagtagctgggactacaggtgtttgccaccatacctggctaattttctgtatttttttgtagaggcagtgttgcccaggctgttctcgaactcctgaactcaagcagtctgtccgtcttggcctcccaaagtgttgggattacaggcatgagtcatagcgcccagcctaaataataatccttttttggttctggccttgcaaatgctgttatcaatatctttaaacccccaccttcaccattacctactgagtgtcacatcagtatcacttgttttaggaagcccttccttgatctccctagtcttagttgatattccttctctgtactcctrtggtactgggtgcatatctatacatcttattatgtcataagtgataattttcttgtcttctgtagtagaaagtaatcattaagagcagagactgtgtctttcctctgcatttccagtatccagtgtagtacctgaagcatagtaggtttttgggaggtgctgaatgattgaatggcgaggaaagggataattgaagagatattttgaaggaataaaagaccacacttgatgataaacttgctagtgagtgaagatggctgaagaatcagatacrgagccagagttcctccttaggaggtaggaaggccttaaagtatatggtaaaggcagagatacgagctgaggtattctgtggaatacgacacaatagcagtcctggctgcttttgaatctttaaccttaatgcctccagtcctccttttctcaatctgttttttcgtatctttcaggttcagaacttggcagtaaggaatcaacaggcctcagctcaaggacctcagatgcaaggctccactcagaaggccattcctccaggagcctcccctgtctctagcctctcccaggcctctagccaggccctagcggtggcacaggcttcctctggggccacaaaccagtccctcaaccttagtcaagctggyggaggcagtgggaatagcatcccagggtccatgggtccaggtggaggtgggcaggcacatggtggtttgggtcagttgccttcctcaggaatgggtggtgggagctgtcccagraagggtacaggagtggtgcagcccttgcctgcagcccaaacagtgactgtgagccagggcagccagacagaggcagaaagtgcagmwgccaagaaggcagaagcagatgggagtggccagcagaatgtgggcatgaacctgacacggacagccacacctgcgcccagccagacacttattagctcaggtaaattgtcattcctcatgtcattattctctcagaattcatgtgaaattttcctttttttctttttttgcctttttttctttgcctttttgttttttccccgcttctgttggtccttgaatagtggaaggaatgggaataatatcagccttgaacatattagttcagggtcaggaggacaagtgacagatacagattttatctgtttctaccaggcagtagtcagcttacaagttcccctgtccgctttcttaggctgtgagttcttcagttttatcactctgtctattcattcatcacatcttactgaattgcttactgttttctaggaattactggggatacatttttgaaaagtagattccctgtcttcatgtaacttagcatttactataagggatgaattctcacctcactgtttaatgtggttacttgatccagtgtatagcagatacagtacaatgccttagagcacttaagactaatggagaggcggggtgcggtggctcagtcctgtaatcccagcactttggaaggccaaggcaggtggatcacttgaggtcagagtttgagactagcctggccatcatggtgaaaccccgtctctactaaaaatacaaaaattagccgggcgtagtggtttacacctgtagtcccagctgctcgggaggctgaagcaggagagtagcttgaacccggttggcagaggttgcagtgagctgggatcacaccactgcactccagcctgggtgacagggcaagactctgatagtttatacttgctttcagactgcgggtaagatgtagttagatgtgtgtatcttatttggtcatgttgatttttgccttttyttgtttctagtaccttagttgttgatgtatttagataatttactcacaaaaaaattaagagttagttattactatacttggtatttatatactctagcagttctatttctaaattgctttatcatcacatgctttgatctctggacaatctggtacaayatggagaagtagagtttgtcactcccagtttacagtggaggaaactgagttaggtcagagctgacaggtgctgactctcaagactcagatggtggtctaagctgatgatttgtaaaatccaagtcatttgtgggawgacgttgrcatctttaactctgtgggtatctcttctttcagtgaatattaagtgcttctgcagtgtcaggccctgggctgtgttttagggatgtgaaaatgaataaaacatggattcagcctttgagaaactccaagtctaatggaggaggggctaaccattcttctttgctgagtacagagtaaaagaatacaatatttaagtatggcaaagataagagacacaagaaattactcaggatctgaaatgactgagcaaggragttctttctctgagatctttaagactagtagtagttggtaatgtctgattgagtgggaagagtatggacgaagtgatgtccaagtttcatactgactagatttcttttcaccgcataattccaaaactaggttataccttggaaaaatgaatttacttttaatttaraatgattattattctctgctcttttttctctctgttgtattctgggattgttcctatagccacctacacacagatccagccccattcactgattcagcaacagcaacagatccacctccagcagaaacaggtggtgatccagcagcagattgccatccaccaccagcagcagttccagcaccggcagtcccagctccttcacacagctacacacctccagttggcgcagcagcagcagcagcaacaacagcaacagcagcaacagcagcagccgcaagccaccaccctcactgcccctcagccaccacaggtcccacctactcagcaggtcccaccttcccagtcccagcagmaagcccaaaccctggtcgttcagcccatgcttcagtcttcacccttgtctcttccacctgatgcagcccctaagccaccaattcccatccaatccaaaccacctgtagcacctatcaagccgcctcagttaggggcygctaagatgtcagctgcccagcaaccaccaccccatatccctgtgcaagttgtaggcactcgacagccaggtacagcccaggcacaggctttggggttggcacagctggcagctgctgtacctacttcccgggggatgccaggtacagtgcagtctggtcaggcccatttggcctcctcgccaccttcatcccaggctcctggtgcactgcaggagtgccctcccacattggcccctgggatgacccttgctcctgtgcaggggacagcacatgtggtaaagggtggggctaccacctcctcacctgttgtagcccaggtccctgctgccttctatatgcagtctgtgcacttgccggtgagtgatgtctgatggttttgagggcactattatgcatgagagtggacctgggctaagtggaaatagagcttaattgaataggggaataaagagttaagagggttaatattggtatttatctgcttcttctgtaagagagtgacacattatataatatctgaactttataytcctaaatttgttgctgatactattctgggtttttgggtatgtaataagttagatcaagatagccttaaccaaatcagtctttgaaaaaacaacagttcttggttggtctacgtgaatacagggtctcaagacctaggtcaggactaaatcatgttacattttcttttgtcctgatggaaagttactaggaatgaccaggaattttagtgtaccatgggaagtagataaattgggaaatctggaactaagaaaattttctttgaacatatggtaataattgtggttccttattatccttcatttgtacatctttgtttctttcctattctttacggtatagggtaaaccccagacattggctgtcaaacgcaaggctgactctgaggaggagagagatgatgtctccacattgggttcaatgcttcctgccaargcatctccagtagcagaaagcccaaaagtcatggacgagaagagcagtcttggaggtgagtaactgacttctaatgctgttggagagcacacagagtagaggaatgttctgagtgagctaaaagataaawctggttgagtagaaaatgggccagaagttggtggacaaatgaatagatccaaaaacagggaatccaggtgaattgtcaagggtggacatagattattatggaagatcatgctggctcaactaatagatggatcaatatgtcatctcatgtctgttgcttaatctgtgtttgttttccagaaaaagctgaatcagtggctaatgtgaatgctaatrctccaagcagtgaactagtagccttgacccccgccccttcagtaccgcctcctacactagccatggtgtctagacaaatgggtgactcaaaacccccacaggccatcgtgaagccccagattctcacccacatcattgaaggctttgttatccaggaaggagcagaacctttcccggtgaggrcagggccataaggtgggactttgaagtggggacttggtctgattgttgtcttttcaaactccagtaaaagtaaaaggcacagaactatttaatgaaagaatggttcaattacgctatttatttaattataaagaaggaaagggaaaagagtgtgtggaccataaaatgaaaatgttaggaagaggagaaaaaaaggaagaaagtaacctttaaaactgtaatgtttagttagataaactagtttgttttataatgaataaaattatagtaatgaagttaaggagctttcctagggtttgcagaaccaggactagaactgaggtgtcttgactcctagtgcattctcagcaccataggaaggaagaggacaaaatagggagccagcgtaggaacctgttctccaatggcttatctggaaaaaaagccagttactattttttttttctcatttccaaacattgtatagagaccagttactactcttgattaccgtattgaaagtgattctctctgaaccagacttggtcattaactcagagatccaagcagagrcataattgatggggaaatgttggggaaagctatagagaagcagaaggggatcaggctaacttaactctcaatgttttctgggacaggtgggttgttctcagttactgaaggagtctgagaagccactacagactggccttccgacagggctgactgagaatcagtcaggtggccctttgggagtggacagcccatctgctggtgagcatttatttagagactcatttgggggaaggagactcgtggagatgtgtttgaggactcggtgtaaaatagtagttacctatttatttaaagtagaaatgaggcctggcacagtggctcatgcctgtaatcccagcactttgggaggccaaggcaggcatatcacctgaggtcaggagtttgagaccagtctggccaacatagtgaaaccctgtctctactacaaatacaaaaattagcctggtgtggcagcatgcgtctatagtcccagctactcgggaggctgaggcgggagaaccacttgaacctgggaggcggaggttgcagtgaagtgagctgcacgccaccgcactccagcctgggcgacagagcgagactctgtctcaaaaaaaagtaggaataaaatgaagtctgtctacatatagaaaccatattatatatcagagtatgtagaatcacggaaaaggaattacataaggtgaggggaatttatccagctaaagtaatcttttgaattattattattatttttttttgagacggagtttcgctcttgttgcccaggctggagtgcaatggtgggatcttggctcaccgcaaccagtgcctcctgggttcaagcgattctcctgcctcagcctcccgagtaactgggattacaggcatgcgccaccacgcctggctaatttttgtatttttagtagagacggggtttctgcatgttggtcaggctagtagtcgccaactcccgacctcaggtgatccgcccgccttggcctcccaaagtgctgggattacaggcgtgagccaccacgcctggcccttgaattattctttactctatagatgtattttttggccgagtgtgatgactctcacctataattccagtactttgggaggccaaggccggtggatttcttgagctcaggagtttgagaccagcctgagcaacatagtgaaaccttgtctctacaaaaaaatataaaaattaactgggcattgtggcacatgcctgtagtcccagctacttgggaggccaaagtgggaggatcgcttgagcccgggaggtggaggttgcagcgatccaagatagcaccacggcactccagcccgggtgacagagtgagactgtctcaaaaaaatttttttttccaaaagatgatctaaaataggacatttrtatctttaatttccagttctccttattctagattttataatctatcttaaggactcttactgattttcccactgcttttggaaatctttgtggtagaaggatcttatatctttctaggcattagtagttcctctctcctcagaaattgaatcatatctgaaatctaagagtatgaattaggataaaattagtaagacatctaaaatggagagagttcggcttaaggttaggaagacgtcataaagttctcamgggacaagtcttcgtgattttaggttttgaactttgcgttttagggattctcaactaggttgtgtaggtttttgggggtgaaccctgagaataattttagaatccagctctgagcctaatgattgcctgaggggcagcagaaacccatggtgactgtccagcaataccttgttttttagagttagataagaaggcgaatctcctgaagtgcgagtactgtgggaagtacgcccccgcagagcagtttcgtggctctaagaggttctgctccatgacttgcgctaagaggtactctgggcaccctcctccttgccctcagcactggtatctccatctaatgttacaccccttccccaggatcgtctcmtagctgatattttatgtctccctccttgcttttattcccttccccaaatcagctcataagcagaaattcacatttagagcagggtggtcytctgtggcrctattgacatcctatatatgccctgtcctgtaggtacaatgtgagctgtagccatcagttccggctgaagaggaaaaaaatgaaagagtttcaagaagccaactatgctcgcgttcgcaggcgtggaccccgccgcagctcctctgacattgcccgtgccaagattcagggcaagtgccaccgggtgagctgcttgttgtagagccagatgcctttaaactgggtctttttttctttccctgcagggcaattcatttgcccaggtaagagggtgtgagatgagaactctggtttcacattgattgcattactacaaattccaagagatcctgaccccctttgtctccrgacctcttacccaactactggttcatgtttccattaatccttacactgtacttgagtacaattgttaattgtactcaattgtactcaatttctctcaattgtacttgagagaaaatctagatcaattgttaggtcatggggagaatcaaggaagtgatacagtttctatttgaaagactttgagagtagattttgggaatttgcaaataaartgctgcttatttcacatatgataagatgagtttttcttctacgcccaacccagggtggtttgggaagaaagagagaggaataaacctttgacactgacctcattggtttgctcttttcccctatagggtcaagaagactctagccggggttcagataattccagttatgatgaagcactctctccaacatctcctgggcctttatcagtaagagctgggcatggagaacrtgacctggggaatcccaatacagctccacctacaccggaattacatggcatcaaccctgtgttcctgtccagtaatcccagccgttggagtgtagaggaggtgtacgagtttattgcttctctccaaggtactgaccctytcttcaacagaacccaggttgttttccttaacatcatcccacaggggccttgataagagggaaagtaattgacttttaagcagtaggagcttgaatgctaatatagaggctctactcctaatattcaagttgacttcctaatttttttctgggttgacattatcttctgtaatgtcagcaattttacagtrtttgattctcatcttatgatgtagctgcatttytcactaaatttttggataaaatgtttttgtgtaattaactatgatacctcccatggggaaaaaattttttttttcagtggagcagggtattagaaactaagtggccattgttgccccactcttcaaagagggcttgtttgctagtcttcttttttttttttttttaaacagagacagggattccctatgttgcccaggctggtcttggagtcctgggctcaagatatccttctgccttggcttcccaaagtgctgggattataggtgtgagccactgcactcagcctatatgcaattttgacagagtttttttcggaaatgaaaatcaccctacccttcttgctatttgtctgaattctgggcccttaaacaaaaatatcacaaagaatctttttgccagtataaaagaaaacatgcttttatttctgttctctccctttcccctgtctctaagctatttgaatgaagttatttctgtggttgaacaatttagttgcttttcctttcttggtcttggactttggttttgttgttgttgttgttttgagacagagtcttactctgttgcccaggctggagtgctgtggcatgaattttggcacactgcaacctccgcatcctgggctcaaatgatcctcctgcctcagcttcccgagtagctgggactataggcatgcatcaccatgcccagctgatttttgtatgttttgtagagtcaaggttttgccatgttgcccaggatggtcttgaactcctgagctcaagtgatctgcctgccctggtctcctaaaatgctgggattataggcgtgagcctctgcacctggccattttttaaataccagttgctttctaatttcattttgcttttaaagcttgccatctgacttcatattactgaatttaggacaggtactttggaattaatcattgctagacctcagtttcatttagcttcccttctcctatcatctggcattacctacatgttctcaccatttcttctaggctgccaagagattgcagaggaatttcgctcacaggagattgatggacaggcccttttattacttaaagaagaacatcttatgagtgccatgaacatcaagctgggccctgccctcaagatctgcgccaagataaatgtcctcaaggagacctaaggtggccctcttgcacaaaccagcctaaggcagacactctccactgtccaggttataacctggtaccagcagactttgcagggaagaaagagttgttccaatcatgtaaccttctgtaggggattactgagacagggaagagaagtgcaagaattggttgctggtgctacatggcggcagctttgacattttctctgggttctactttattttttaaaatctttacagttctcaccatttcacgtaccttaatccaatctttataaaagaggcagtctagagaactaggactgctcagccttatccyggagtggagcatttagcccaggtcttaattctccaagaggaggaatacatagtatggtaaggcaaggaactgggtggaatgtcaggttgcctgcccaatgggagaggtagggtttttctagcttgtgtgacagaagtagcaaaatctggtcctyccccctcccagtgtagctgtggctcagagttttttytttttgttgtcacttactcccttgtgattgaattttttctcctgcatccatggcaggatccccagccartatagagacttggttggcatcttctgctgcagggactaaaagtatttgactggggcacatgtggctgttgtcattctttctgcatcccactgttcccctccaatttatgttattttctaccctgtttttcagttccatctctgctctgtcctrtagctttataaaaccagagtgtgtggggctgaggtcaggagtataagtacctgccttaggcactattccttatataacaaaaatattaaatatttttttcctcagtaaaaggatgaaaattggtttcagttgtcttactctattccagtctttgcccactttcacacaaatgacaaggccaatatgttttgtttgttktttaatcattaagagtttttgtacaaaargtgatggttttttttcttcattttaaaacaccagggtgtgggggrgggatgcaaacaaataacaaaaaagatgcttttgtaacattattttccctgtttagaaagaaaaaaaatcactccaatagtattgaaaagtccaaagatgaaatagtttcattttcttttcctaaggcttataaaaggscccctgcctrttgattccatccctcttttgtgtccagtggagycatgttactcttcagtggcccaggggttcactattaaagaaagatcagtccaggtttctgggcacatggcctaaacaggaagatggaagcatcagaggattaaaaacctttccccacagaaatgtgggcaagaagacacttccctgagccagcagaagggacaggtgcagcagcattccacacccagcgcagaggacagcagagccctcgatgtcccacttctgcttccgttccctttctagaagattgaaaaaaaggtcaaaaccacatgcctgtggagaaagtgcgacatgtttagaaatactggtagggaaccaggartaagaaaagctttaccagcttttactacaaatggatgaaagacatcaggatcccaccaccgcaaggtaaagtgacttcccttttctggaacccctgtggcacaggagtaccaattttcctttccaacgaactggatttctggataggcattttggctgtatgtggacagataagaccacagtccttagcccaatcccagctatacagtcaccccaatttccacaaatgatgtgatggtaccgtataatcctgtaattgggaaatttcacatttttcctgtcctaatctcagaggtgggagaagcaagtctagaacatctccaggctcagactaaacgagagtacttggactgcaaccaagtaatcmctgcaaagtagttccaagcagcaaraaataccagattctcatggaggctactatagggtacagaataacaacatgaaarcaatcaaccctgtataaataatgtttcttggcattttttttttaattaaagaaatccagtgtctcaaaaacttgtgaaaatgtgtttaaaaaacaaacggccagtgagcctgctacaccattttgcccatatgcctattgtaacttctgatgtcaagagacaatgcaaaagcctctgttttcacaggccctattatattaactctgacttacaactgtacctctctagagaaaaaacagaaaataaggaacaaagggaaggcagttttactagtgagaagatgcaaatcaaaagcaaactggaaagcaagagcaatagtaagggtgagatgagggactggagttgagactgcttgagaaatctggctgtgtagctttggtttgggggactgaggaagaggctggacatataaagtgcaatctacattggtaataaatggtcatccctttcttctgactcctcccccagctggtcatcccccacaccacgatatgctgcaggcacatttcgaggtttagaacggcagacaaagtcacagccatcctgtagggggagaaaaaagaaggaaataattcgcagcatctaactttaggatatgagaaagtgtacttatggtctaggaatgtggcaagaattggttttctatagggataatgagaaaacctaaaagatctgacaatcagcctaaattcaatttggggcaacaggagaaaaagtttcttcttattaggcctcaccttcttcccacccaggccctcttaaaagctaaatcagatttagaagagcccatctggtcaacagtgttgctctttcagcaatgtcttaccaaggccagaaatggatgctgtgccacttactactctgtactagggcaactgtcttgtttgctgggacttttgtggttttagcactcaatgtcctgtgtcccaggaaccccctcagtgtgaacaaacgaggatggttggtcacccaaccttgtttgcaggctacaaattcaaccagctgccctgttacttactgctaccaggttgccaagatcctgccagaaggctaagtggggaaactgctccattcctttggctcccactaccagtcgctggtataggaaccccccaacaacataaacagcaaccagtgatgcaaacctgtagagagagaaagacatctatacttaagaactgggaaatagtaaaaactcagataggataacctctgcatttattgtcagctgtttcctaagatacattccctgaaaaggaaaaatgagtagtgatactaaatgaaaaagggggctggtaactcttagaaaaccagttagagtgctgtcagtccaagagaagcaaaggcccagacaaaatgtgacagcgtgtgattctatggccaagaataatcaccattaagtatatgattccatttctctagaagttctcataatctaatgaaataatataaaaattgcctagtcctgcagtaggggaaaaaagcacctccaaatgcaaatctataccggcaactaaacattaaatctcatttttcaaaaacttgcagtcagaatttttttttttttttttagacggagttttgcccttgttgcccaggctggagtgcaatggtgcgacctcagctcactgcaacctccacctcccaggttcaagtgattctactgcctcagcctcccaagtagctgggattacaggcatgtgccactgtgctggctaattttgtatttttagtagagacggagtttcatcacgttggtcaggttggtctcaaactcctgaccttaggtgatccatctgccttggcttcccaaagtgctgggattacaggcgtgagccctgtgtcctggcagaattattttatagccagaggatttaaaaagttatccccatcaattacagcataatgtacacatacaatttgtgcttatgtaccaccatatagttactgaccttaaaaacaaaaggaaggaaggtctgttctgataaaggaaggcatactcacgtgacaagtaagatggaacccacactgaggtgggagatctctggtgaacaggccaggctgctatccatctcaaagaggtagaaacaatcttggactttgccacgctcctcagacacagggttaaaattgtcctgatgatgagatggcataacacattcaggtggttaagtgttttgactcctgtccaacaaaataaaaaacccaaaaaacatctgctccttcctggttcagcagcctattttccatggaagatgcgtgtctgacacagagagaaactgagctcctagttttctaatgtccatcccaacgtatcgtgtcccctctggatattctccccaacctcaggtcagtcctttcagtctcctccctcggcttatacaacacagggtgcctcaccgctagggtgtgtcgattgcaggagatcatcaccactgcacgacgctgctccttgccacagtggttgtcatattcatcaccccctttatagatcagcatgatccaattacctgaggagggacaaggaaaatggagctatggggtgggggaaaagcagaggcagatctgggtggtatggcagagtggaattgcgtaattcattgcaattggttataactaaacaaccctcatcagtacgaacttggtataccagaaatgccaagctaaacttgtttgcttacaaagacttgtgttcccttaagacaagaatcagatattcatttaagaataatcttaatttttaacattaaaggtaggcaactgacaatgcaaaaccaattatgatccataccttaacactgattcattttctgaataccttctaaaagcaaaaaaagaggttccatacaattgctgagcagcaggggtaagcccatctaagatttcaacttagccccagataaattcagagtggatatctaagattggaatgcatatctcttctttagtatttactgtgttcagttcttttgcaaaatatcatttgattcagtaattgtgaggtgaataaggtaaagattctgctcctagttttgcatatgagaaaacaaggtcaaaaggtgatacgactttccagtcacaggattaggaaacaggaggagaacctggtcacatgatccccagccccaaacccttttgttacttttttattgtattatttaccaggagtaaatagctaccttgtataacttatttatctgtatgggagggaattggaccataggtgcttacatggtcctctccagcaatatgacttttaagaaatatcaccaccatagcacaaaaatcagtgggtaaagttttgcagactgagtagtttgcaaaaaaaagtttgagctcttaaaatttaactggtaaactttgattaatttgatgaaaagtggtggtggtggttggtatttttaagtctagtgtgaaactcattaaaagtatttgggtgaataaaaggactctaggctacagaattctggctagagttggctgggcgcggtggttcatgcctgtaatcccagcaccttgggaggccaaggtgggcagatcacgaggtcaaagatcaagaccatcatggccaacattgtgaaaccctgtctctgctaaaaatacaaaaattagctgggcatgatggcacacacctgtagtcccagctactcaggaggctgaggctggagaatcgcttgaacccaagaggctgaggttgcagtgagccgagattgtgccactgcactccaggctgggtgacagagagagactccgtctcaaaacaaaacaaaacaattctggctagagtcttcattttgcataagtttttcactgattttaatgcacaactgtcctgagctgtggcttacagaggagctgtggaattaggcatcctgtggtatattacagtctcaggtgtgccgaaccacacgtatgatatgctgaagacactagaaacggccaagacatacaggattgtcagagggattgacttgggatcagttagtcaatcgatggtaggaaggggagttttcttacttccgttgaagatgtgagtctcgttgagtctccctaccactgtctccttcccattacttttgttgatttgcaccaggcctgccccagaagtgtggttgccagcttcccggcacaccctgaagatgtagatgtatgtgtctgaaccctggcccacagtgctctcaaagctgtaaagagaagtgggaagaaagaagaggagagttactagctatcagcctcaggaataacagcatccctttccttaattaaaacaaaacaaacaacatgctcgatttatttatttgaggtcatggctgagtgaatatttgtttaattttaagatattcataaccttgacagaccatccttattgctgatgatgaattattaaaacacacttgagctatcttgatagctcaatattctagttatttttagaatgcctgttagtaaccatgttccaatgaataagggcccatgttcatcggatagtctcgtttcttagggaccaacttcagatttatatatctgaaggttcctgacacttataatgacatgtgtcggcctaaatatgtttatctgatatttctaaagtcctattatatgtaggtgtcaaataatccttaaatttctacaagctggtctcttggatccagtcttggaaatagctacacttctgtgaaagatgagaaaactgcacacagcaactaaaaactgggctgagaatttgctctatgtcataaaagagagcacattatgaaataaaatcagtaagaagaaaagactttaacataaatattttctcaagctctttaaggttcttctcatttaccttttattaaacagtggtttcagcctcttcactagagccaactctttctctgactctttacccttttctcctaccaagtcgcaagttttttcttctgtctgccaggattctctcactgccacagccaggagtagtagtagcagtccagtcctccagcagctgtagaaagggaacatcctttgggagagagtgtgtgttggggagggcaggtaggatcaggagagagaggaaagagataaagcgtatgaatgtgtaataaatcgatggtattttaattatccagaaagtacaagattctctggcatatgcaacacatagtacattttaatatctctgtaacaagagcatctgcagcagaaaattcatttatatgtaacttgtagtctaatgtataggtgagtctttcagaacaaactacaaagttgggaagagggaaatgaaagaacttaaaaaagaatgatgacagcttgggtggagccatccttgcctctttactgtttgatggcttgatgtagtcttctgaaacctctttggcctctacaggtcacaaatctcaagggtttctagacttcccataagtacagttgtcttttacactacaaatcaatgacaacaaattggggatcaccaagccactttacaattgagtaaattcaatgcacctgctgcttgtactgctctaggaatgaaaacacacagacagctctctttcccaaacttactagactggtgcaaaggtcattgtggttttggcaaaaaaaccccaccaaaacctaacattttcttttctcttatccatcttcatacccaggacagactgacttacccttgcaaaacactttactctggtatctgttaatgatccctcaggccattgctacttgtttattccaagagtatcacggacaatttcctgatttaactcttctaaacttttctcacttacaaaaaacgctgcaagtctggactttggtttgaatattctttaaagttctctagttctttttcatgcgggtccacttactccacctcatttttaaaatataaaacttgaaacaggcagaattttcatgggtactaatgagtttgaagatgggaaaatggaagctccaaccttggccgtgaatgcactttccccattcccctaaacaacctaacatctgaccttccacttcccacaccccactaaagcaaaaaatcccgggaaattgtctacctgacttcctgtaccccaaacatcaattctctactgtaatattatggtagtttccatagaataatcatagctaaccaagaggtccaaggccctcataacacatttaatgcactgaaaccacacaacagcaggaaacaacagactactgccttgggccaggtgctgttcaaagcacttaacatatattaattaactaattaatcctcacaaccttatgagtaaat

SEQ ID NO: 6964 - DNA, 42479 bp, Homo sapiens
  misc_feature (1)...(42479): n = A,T,C or G, or insertion/deletion polymorphism (see Tables 1-2)
atgaaaacacaaaacaaattacatggtttgatgaaataaaccaatattcttgcagttttaaaaagaggtattaatgtaaatccatatcccaaatatgttttggtagtctagggagcacaacatacattcttcacccaagattcatcctaactggctcttcagtgaaacaaggaagtgaaatctgtcatagaattttaaataagacaagtttgggagcaacctctccattgcttgaaagattcacttttgatctgtataagtattcttatatttactattttaaaaagggcagttcattgggtataacaacatatgtaatatataattactgtttcttaattcattcaacatctagaatataaattcagttaatttattttattctctaagaaaatgatctctctctgatgaacattcttatttaattttatcctgagtgatagaaaatattttatcaacagtgatgcatcatcctatttgctttccaaaggggattcagatgttagaatttatttttatggaacactgaaaataagaaaggtcccattgttaaattaataaaactagggccttataaaattgaagtctggatattttgaataaagaactgatttcaactataaaataagatgtgaagagaaataggcacttctgagaacggggaatattttactgtgttcctttctaaattggggctaggcagatcttgacatacacttttctatatgacctgaaagagtgatggagaagtaaagatgatgtatgtgacaacccttggtggactgcaaaactgtagatatgtaagctattaaaattccaatgatgataaactatggctaaaaaaaatgccaagtcaaatggaataaactgtagtaatacattgtgttggcccttgtagtcgacaaatgcttgcttgggtaattgtaaaactcttctgctttattttggctccatttgtatgctctcttacttccactcatcttcccagctcttcccacatcccaccctcacccctagattaccataaacgtgcttattctctatcagtttaatatgggataaattaacctataataagcagtaaatgacttttaagaggtctctatatcactttttccaggcatgatcatactttttagatacgtaccaaacctgtatttgaccaaatgctgaatgactaaacataaaatccttttttgtacgtatgaagcaaaaattgtcatcacagtttgaacttctggaatagaagaataaatctcaagaattatcagaattttatcattttaatttttaattaaaatattttagttgatacatttgaaacatttgacattatagggtaaacacaatactttctcagcactgtcagctaaggcttctatactcttgggatcttcaaacattttccttgtattccttaaaagaattttattaaacatgtaatatcttacatacacttgacatctaaagtgtctacactaaaataagtgtagtataatactgatgtttaaaaaataaaatgtaataccactttttaaatgtatccgatgaaatgtagacactgcagtgattttttttggccaccaccgttcctgtaaaacacacatgaacacttttttcaccagcaggaaattttatatcactcttgtttctttttggtcttatattttcattctacttcctcaggtaattttatcctggagttgcatacttcaatatattttattgatcgccctattatatgtttctgcaactaaagatcatcaaagattattataaaaatattcttgagcctgtaaagttctaattagtaataaatgttttctaggttgcattatcattaaaattattatcaatatactatttataaaattatatatctgctataatcttaatagatattaaaaatgagaacattttgttcaaaaataattttttagtgaaataaatcatgtattccagctggctccctaagattgtgtattcttggatgaatattgcttattgctggattaaaacaagtttcatctattctctatttgttctaccctgctctatttcaattctagaatattgctattctgttttctattgtatagatgtaagcactaaggaaacctgttcacataaagagagaaatagaaataggggacgttctattataacaatgttatctaattatttaggcttccatgttaaaagccaaaggtcacattataaccattaaaaattacttttaattatctatcagctgataagtcctctgtaattttattgaaagcaaagtgctaaaccaggtcaattgcaacaggatttggaaatcagccattatgatcattcttattctcggttcctagaaagtattcaataaaggcttaaaaggacttataaacggccaccaatcattactttcttacttaaaaacacaacttttaccaaatatactcagaaagtttggaaattttgaaatatcatttattttaatatactttgtcaatataaagcctcataaaaggcttttatctgatcagaaccataacctgcacatttagctcatttcatttaaaggaagtctccaccagtaacctgatttgcaaagccagtccttattgtcaaaataaccagtcaaactggacttatttctaacagaaaaaaatgttgcattatttttaatttcaataaactcactaatatatattcccgggatgactctcccactttgcaattctaagatgaagagttgtgctgaatatttgttacctagatgaagtaagacaaccctactttggtatttctttccatgctttctgctttattcttatggaactctcagggggaatacaacattgacaagagttggaaaagggaagaggggaattttaaatgtgaattgtaatcatttctgtcacctctacaatatgtatgagtactgaaaatttcagaacaggccaaaagaatcaatttctaacatcatgtttttcttataccagaaattgttttaagacagatgggtatatgatacctacaatgggcttatgatgccttgattaagagagtttgtgcaaaagagaatttgtgcaaatattaatattttgatttatctttttgtaagagacaagcaaggcgtttttcactccaagatacatctaaaatacatattataactgaaagagaaaatgtatattaaaatcaactcataagttatgccttgattatattacagcaagatgacagtggttttataacattgcttacaacaatcgtaagattattgatcattcacaatttcaaggatcccagaaatgacactgacataaactgagggcaaagctgactgtaactaaaagattttagccaaatgtcaaagtcaaagataaatgtcatagcgccctaacaaatagtatgtgtttatcaaaagcgataaacctggagatgtcatcacaacaacaaaaactttcatgaaaaagacaagacaaaggtaagttacgactgtaattgtagcattaaatatagggactagaagagaagagatatatgtgaaaaaagttgactttgtaattgagaatagttttgatacattaattgtataacagatttttcaaatgatccaaaataaagctacttttcaaaggaactctacaaaagacattattacctttggacatatttctaaaccaactttattttcaaagagaaatgtgtttacgaagcattgagcaactttgggtgggttgagaccgaaagtatccttgccacttgagtatacattgggggaggcagagctggaatcattggcatatgtggaatgaaattaatgcatgtattagcacataagggatgtgaatagcaatacttttcataaacaaaaaaagcaggattattggttgtaaaatttatctaccatgttaatatgctgaataatcctgtacgttttctatccttgtgaatacttgggctggcagagaacaggctggaaaaatcaggagattacagactacgtttccatccttcaagtatttccctgcatggatactgagacgtagaacaaatgataaaaagaacatgatgaatgtgctttttgtcttattagaaagactcacacttaatatgacactatattaatattcagagatcaggccagtgggcttgtcaactgagctgtaattccaccagcctgctttagtcaatactgcaatggcgcttccttctatacatattattagaaactgccctagtggaaaataatcttctaccagcccagtcttgctttttatattagaattaaaatttttattcattaaaaacattattaggagagtgaaaggaaaagtcacagaaaagaaaaagatattttctgtatatataattgacaagtgcttatacccagaatatattgaagacttccagaaataaattagaaaaagacctagcaccttacacaaaacatccaaatagctaataaatatatgaaaaggtacttggtctccagagaaatgcaaattaataccacaatgaaatctctacatatcctccaaaatggttaaagttaagattcataatgccaagttttagtgaggatgtggagcaaccgaatctctcatccaattgtgaaaatgaatcatcattatctactagaattcatcatccacagagcctctgtcccagcaatttttaccgctacataaatacccaggagagtgacagcaaatgtgcaaaaagtcacgtataagaacatttgcggttgcattatttgtaatagctctaaattgaaaacaactcaaatgtcccacaacaggatatgtaaattgtggcatattcatacaattaaaactttatagtgtttttcaatgaaatagaataatgttaactgcatcagtgtcaatgaatcccatgaatatagaactgagcaaaagattccacatacacacacacaaacacgtatacacaaacacattacaaatcatataattctatttacagaaacactggtgtgttcattctaagtcatccagactagtcttctttcttgctcttagtgaatcaccaatggaagttttgctcaggagaatgaaatgtcccatacttgtacatgcaaacactgggatccccagttaccacaaccccaacctgatgggtctcctaccttcacctcctcagccatactaaactccttgcttttctttggcagttgagaatctttctacttgacttgaagccttcacaccttttattatcttctgttgtattgttcttctgtatatgttctgatagctaacttccttactgccttaaacctttgctcatctatcagcttctcaatgaggtctaccctgatcacagcatttaaaactgcaaagtctaaccccaatcttatgatactcttgatctcccttgctgtgcctttttaaaaataacatttgtcattttatgacatgttataaaatgaacttacttatatttcttgtttattgcctgtctctcctctctggaatataaggcagagatgtcttgtttttcactgtttcttattattcagaagtatatccactaataacaagcattcaataattatttgttgaataaataaatgaaaagaattatgtgcccatgagaaacaacacttgctttttctttcttaaaagtatataaaaagatgaatggataaattgaattgtatgcatatatttaatatagaatgaagcaataatatttcaaggagaatgacttaagaataacttcagatgatgtgaagtcagtctttgtacaagcaatcacataacagagtcaattatatagttttatcagcagatcacagggccttctttctcttttgttagtgacatagatgaatacacacacacacacacacacacacacacacacatatattctgtataatcattaaaaatgtcacttaatgtaagaaagaatgcggttctcatttacattcttctagtttattattatttcttgagaaaatattgctgggttcattataaaatagattctggctgttgcgtgttagcgcgcgtcccggagtgcgcatgcgcaacggcgggggttgttccggcagcctttcactgaggccacccgccagtttcaaattcagtggcgtttgccctgattcccggggcctggctttcagcgtagcaattctgccggcgaagaaggtgagcgcagtgctgtgtggcagcagaggtccttaggacgaggagcagcgggacgaggaagggcagactggtgaaatcgcaaactgggcgtctgttccggcgccggacccctgtttgcaaaggtgggtggcccgtccggagcggaaaaacattccggaagtggagggcygggccagcgtgattgacaagcgggaacccctgtgtggggacggggcmggcctaggaaggttgtgcctgcggtggaacggsgcggtgcgcaggagtsggcattaacagcagccgcgtgtctgggtcttagatttggcctagctgtgttgagcttttcatggattatgttacgtagataagacactgcaacagtgagtgagcgcttgtaacccacctgtctcttacagaaactgagccccagcgatactaactttagcaaggatacagctgggatcctaaacttggcgatcagagcccagagccgataaagttagctgcgtgagtctagcttcccccrgggcgggaatcgaggcggagcagggtacagtacggaggccagggatgagtgcagttgaccagattgttgacggaagtgtcataaaagtggacttaaatgttgataagcagctggttgggttccacacaggktgcgagctcaggatgcacgttggaggggacacagggycagagcaaggtgggaatgcgggtattatgggccaggccatcctccagctggtggagcaccgcagcactgcagtrtgtggccctggcttaacagcagtgcggaaaagcttttctcttggggctgtggtgctttccaggtgtgtgaagttaaaacattttagggccatacggtaggtagyacctgccacatagttgtcttggtcagccccggctgccrtgacaaaataccataaactgggtggcttagacacagaaatgtgttttctcacagtcccagaggcttgggatgtccaggatcaatgtggggaggacacaactgagcccacaacaatagtctgtactcggtaatgagtgataattggggactgaagaaaatgaacacgttaagaactaatatgttcctgaagtgctttcacaactctaacctcgttttatgagcgtgagctttgctgtcctggtgtgtgccttggcactgggaggtgatggttgtcctccacacagccaacctgaagagggctgaacaagtcgctgcaaatgtttttaatagggcttagtgaatccgttatactcagatttatctaaacctctatgatttagcctgtgctgcttctggaataatgagatccataattaccactgatggggaagtgaaataatacttaacgtttcttctgtattgtttagtgttgtcattctagagtttggtcaccaaatctgtcttttttatcccacttaccctggtgggaggaaaagtgaggagatagaaagtttcaggtggcttgggggtctggcagatgtggttcaaatcctgagttcaagcacttgctgagtgaccttgggcaagtcatataagtttactgagtctcagtttctttctctataaaatagagcttataaaaataccacacagggtttttgtggggttatctgaaaacggtttgaaaccattaaagaactggccatttaactaataggtattcaagtcatgggacctccgttacccagcctcggaagagaaacctttacttacagccccgatgtctggctggctcctcattcattcatcagatttttgttgaatgcctatgaggtgttgaagcacctagttctgagtcctggagccagagaagagcaagacagacaaggttcctctatttatggaatgtatattccagtgaggaagaataaataggttcagatggtgctaagagctatgaataaattaaatacagagtaatgtgatttttwaaaagtgacttagagcaagctagggggtgaggagtgggggtggtgtttgaccactgtccagcggccagacagccggagaggcttctctgaggaggtgagccaaagcctggatattgaggaggactccttctccaggccaaggggagcagcaagtgcaaggcccgagctgagtagatgaggctgggagccagaccagtctcaggctgaccagtgctctgtcttgagaggagctgctggtcagctttttgtcttgggattcagaacgaggagacatgaagactttttacttggcagtgggagctgaagctgaaaggtccaggggctgatgaggccacgtgtaagcgaaagtttgggataagcagaaaccgagtgcgctgagggagtgagattgtggctgtatccggcrcctggctgagcaggagagtgaaccccgtgggtgtgtgtttgctggtgacgttcctggagctgtcttgaagtccgagctgccttgcagctctagtctgcttctgtttttggctttcccagatagtttcaattcttactctcagtttgtgaacctcccttcagtgaacctcccttyacttatgctggatatctcttgcgactggatgagcttcactaaagcacagtcatttggayctggattcgaatccctggttttccactttttagctgtgagtttgagcaattatttaatttctgtaagcatcagtatccagtagctgtatccttatagtgttgtacagattaaatgagataataaaagcaaaagaccactgtagagtgtttaacacataggaggtactcaaaaatttgttaggtacctttcctcccctttccttcatgtgttaaagctttttcagtacatacccctctctcaggattgaattgtaagtcatattttttaattacccttcttgtaataattcctctacctctgtagtcatgtttttcttttttcattttgtcttgtccccagaatgtctaacaaaacagccaaatatacctctgtraagacagagggtaaaataatgctagttctgtgagttctcttcttgtgcaaatccataaactgccaccaatctgtagtcattttaattgcycctaaaccgaagagcatcrtggcaactacctttcccctcgtagagtgacactatcactagtcttaytgaggccaaagttataaagatgggctctcgatctactaatattagtaaaatgggtttgggacttactaacatttgtgcttagaagagacagacctggcaaagagcttggagaagtgagttccaaagagagaggtgtgggaaccaggatggaagagtcaggcctccagatagcgtttacttctcctttcttccttgaatcactgtctcasagataattaggttcagragaggaggaaaaaaaagatgacgtcaacatggagcagagtttttcttagaccttagcctagcaaggaaagagaaatgcctggtctcagtgctgggaagctgttycagccagagccccgtggctgtgaagagagctctcctgtctggagccaaacagaaagctcataggtcttgaggccagaaaagttagtaggtggcggctctggtcggtgctggaaatggaggccaggatgaactaagaagcaaactaaagatacttgtaakataaggacgtgtaggctgggtgcggtggctcacgcctgtaatcccagcacttcgggaggccaaggcgggcggatcacgaggtcaggagatcgagaccatcctggctaacacggtgaaaccccgtctctaccaaaaaaaaaaaaaaaaaaaaattagccggccgtggtggcgggcgcctgtagtcccagctactygggaggctgaggcaggagaatggtgtgaacccgggaggcgagcttgcagtgagccgagatcgcgccactgcactccagcctgggtgacagagtgagactctgtctgggaaaaaaaaaaaaaaaaagataaggacgtgtatgttaacttgcgctatccaaacaagctgtgcttatggtcctctgcctgtgcgtcatgattttccaggacttcacaacgggataaagtgaagtagcttcggcttgtgaatgtgcattgcagagacgtgggagaagaaagctgcaaaagtcattatragcaacacccttgatcttaggggtgctggtctktgagaagagagctctaagccttttgtagaggyattagaaaggtatcggmgccacggtgaaatgcaggggagattgggtttaggggctttcctggtctgcattctgctacagccgttaaatgccgctagatggagtgcgtgattctggtatggcctcaygtggacctgcgaaggatggagagaacatggtctctgcttcccagaawaaaaggagaaatttggtaayaagtgtggagactgctcttaaataatgctccagatttcaagccacttcttcctggaccatgagagagctccctaatgttgtatttatttttcctaggtccatggctaatgaaacacagaaggttggtgccatccattttccttttcccttcacaccctattccatccaggaagacttcatggcagagctgtaccgggttttggaggctggcaagattgggatatttgagagtccaactggcactgtgagtatgaacagtgagagatactgaaaaggacaacttwacggcagctgtgctagcttttcctgtttgcccatccagagattttcatagtatgaagttgggcagaatagttgctctcagtttatctttctgagtaatagtcacttcctctattaaagtcttttttttttttttttttttttgagacggagtctcgctgtgtcgcccaggccggagtgcagtgggacgatctcggctcactgcaagctccgcctcccgggttcacgtcattctcctgcctcagcctcctgagttgctgggactacaggtgcccgccgccacgcccggctaattttttgtagttttaatagagacagggtttcaccgtgttagccaggatgatctcagtctcctgacctcgtgatccgcccatttcggcctcccaaagtgctaggattacaggcatgagccaccgtgccggcctaaagtcttaaacatagctctgtggtctgagaaaaattaggctgaagtcattggtgcctacctattacggtagatgagatggctttcttaccaactcttttccctccggttccccatccttcaaatataattctaagttttagtctctgctgagtgaaccagtgcgttatgattatgttttgaacataattttgtcttgaacaatatgtcttaatattctgttttytctagttaataattgcccttttaaagttagtttagtttttaatatacctatgccagttcctcccacatcatccagtggcctctcaatatgattttccgtacagataactcctgtcttagtcggccaggactgccatagtaaaataccatagactgggtgacttaacaggaatttattttctcaccattctggaggctggaaagttgaagatccagattctggcagggttctggttctggggagggggtctcttcctggcttgcagatggctgcgttcttactgtggagcaagaaaagasgaggaggagaaaaacaaatctttggtgtctctttctcttttatgaggacaagggctgctcccttatggctgctcckttatgacctcctttacccttgaaggccagatctgtagtacagtcacatggcagggttaggatttcaacatatgtttgtttgttaagatgggcagtctcactrtgtggcccaggctggtctcaaactcaagcgatcytcccctctcagcctcccaagtacctggtggctggcaagatccaagattactggtgcacaccaccatacacagcttcttttgtttkgtttttgttctttaaaaacttttttttaacatgcattttggtggggatacaattcagtccacagcagtgaccaattccatttttaccttggagccctcctggaatcctccatcctttccgtgtcatttgaattagttgctcctcagactgacttgacagatttcagcatgagtgttartggggacagacggccgcacccacaccacgtcagggtataygtccgtttggaggctttcctcaaacgtctggcagccctggactgcctgtgtatgctgaagaasagggcacagaaaggctgagtctgcagggcaggctggctgtggctgccaggctgggctcctttgttgggggcctccagttgccagcacatctgtgggattttccctagagtcttcggtctctccagagcaggtgcctctgagctctggcccagcaggtacagacgctgaagcccaatagccggtcttccgggaggtggtctggggaaggggatccaggtggagagtccccctcagtgcctgctttcagcctgaccctcctctccctccctcttgcctcctcaatctgccagttgcctccagggytctcctagctcagcttccacttagagcccacttcctgtsttctgcaaggagcaggagcagggattgcaacctgggaatctaattgttcttaaacagaatttcaacccgtccctttgttttcagtggcctgctgtgttcctaccacttcctgagtctttctgagaatgagtgggggagatctctggggacacttgggcttgagtgtctctgcsgaatcacttccatgtctctgccttctttccctctctcctaaaacatattactccttccactttctttgtttttgtgggtgtaagcctccatattactttggttaattttagtgtgctttggaacacagatgagtgcatgttcattctgccttgtttaattttagagacagggtgtcgctctgttgcccagggccgagtgcagtgttaagatcatrgttcactgcagcctcgaccttctggcatcaagtgatcttcccacgtcagcctcctgagcagctgggactacaggtgtgcgccatcacacctarctaattttttaatttgtagaaatgagatctcactatgctgctcaggcyggtggtcttaracccctaggctcaagcaatcctccctccttggcctcccatagtgctgagatgacaggcgtgagccactgtacctgaccccttttaccttgtttagcctgacaacccatcttctscctctcaggtctttccatctcagtcttctgcactccaggcttctgcatcttcctcctatgctcagcctttaattgtcgatgtttctggttctatagcttcatcttcttgtgtgcactctctgtgaatgtaccctgtggctttattacctttgacattcttctgtcttctaaatcatctcctgaatagagtgttttctcctgtcctgggtgtcccccagcccataggagcagccatgctgtgggacaccctgagtggggtctgtgttacctgttgtgcctaccatgcccttccccgccttggatgcacaggtgccccaccttagctgcccgagatgctgtttatccttgatagtcaccttttaagccttmtacaggtctatcaagttgagtcaccattaccacttggtgtgtgctgtgccttgtgtaayactgcagttccgggagtcntccaacctggaatgcatgctttgcggggatctatgatgccctcgaattgtatgttacatgtgaacytgtgagcattttctaggggctctgcacctttgtgtyctcagctctgagccccatgcttgctgcaaccagcaggtgttcagagtgaatgaatttgcttatcttggcataaatcatgtaactgttgatgataccccaggaaggtgagcctttggttataaatccttttaacattttccagtctaaaagttttgtggtcttattacasgatgtagaaaacagkgggcctcagttattcttttgctgttgtgccggartataccacggttgtttttgaaagataactttgaccatacccttaggaacttcctcagctcactttcaaatggagggcactggctttctaaccattgtgtctcccagcccagtgacagctgaagctgwctgcttccgatrtcacagrcagcacagaagagccgccctccaggtgctgctgggaaatgctgcctggaacyctttgccatttactttctatcaaaagctgagggaaatggtacatatggggctttcctaaaaatatgggatccatccatttgtcagcaatgtcattctatcctatcccagggcctttcaagattttggtgaaaactaatagatcccatattccagaataatgctattaataattttattattattacttaatgatagcaaaaagttagctaactccaaccgctcacttgttatttgccaggtaatcctctaatccagaggatttggccttttgtgtgtgttaatgtcctgcttgcaccagctctatgaggaaggtgctrctgttgtcatttccatttctgcactcgtggaaacaagcgtagtgaggccagcctgagccacagagctgcaggtaggggaggcagctggaaccctggcrcctggctgtggagtttgagrctctgactcctgcgccgcgctgctgccccaaccstagtcatacgaggtgtttcaccccgccctggatactctgagatcccctctgggttcagcaggctcagagagctgactgcctggagcagaaggcatggggtcctccagagactcccctgagctgagttcccctgtggacaccagggccgcctccttgtggcgctccctgaagggtcctctctggaagaactgtattggttccctggggctgctagaggaaagcttcacaaactggggcttaaacaacagaaactgacatcccacagcgctggaggctggagtccgagatcaaggtgtcagcatgcttggtcccttctgagggtcgygagggaaagatctcttcaggcccctttccttggcttataggggcgtgttctccttgggtatcatsacatcgcctgccttctgtgcatgtytgcatccacgtgtcccctttccaataaggatattagccctttaggctgggtcccgtcctagtagtctcatcttaactaattacatttgygacagtcctatttccagatmaggccacattctgagatgctgggggttaggatttcaacacaggaatttggaggaatacaaytcaatcaggcttatggacaattctggtcttaagtcaagagtagtsttctccagtctgtatgtggaggcgcacacctatggtcccagccacttgggaggctgaggccagagaattgtgtgagcccaggaggagttccataccagcctgggcaacatagcaagacctcctctcaaaaacagacaaaaaaagtggtgttccagagtgattagtttgctttaaaaaaaaaaaaacaaaaaaacaaaaaaaaaaaaacacaaaccgtaaacactggcactcgtgactgatcatcctgtatccacgcacgagctgcacgaaggccgcgcggtcactgtggctcccygttggcgagtacctgggatttcttgctcagcaktttggggccttaattcttttaggggactttttgtctaatgtctccccttcttctaattatgtgcgatatttacatagaatctgataaactgcttcaaatttgttttcagaacagtgagctggataattaaagaagctttttcctgcttcttgggcccagtttccatttcttycttttttctgtttttcctggctattctagtgctartttccttcctttcctttcctaggctggycttagagcatcctctcctatgtacagccagaccttctttcaagcttttattaaaatggggaaaggtcatttgggaggctttgttgttttcctgtttctaaagatcatttttcttcctgcaggggaagtccttaagtcttatttgtggggccctctcctggctccgtgactttgaacagaagaagcgtgaagaagaggcacgactccttgaaactggaactggccccttacatgatgagaaagatgaatccctgtgtctgtcttcctcctgcgaaggggctgcaggcaccccgaggcctgctggagaaccggcctgggttactcagtttgtgcagaagaaagaagagagggacctggtgaaccgactraaggtgagacctggggtatccggaagtgggagtrctggaggaaacagggcttcagcgattgttstggggcgattccgagactcaggcagtgcatgctcccctgccgttgctgtgcctctcagctcttccctcagctccttgggtcgatggtgctgccgctgtgctgtctcttttgagctggaggtcagcagggccttctccacacaaggaactgttggtgcccatttattactcacctgggaaaggacctgatcgttgccattggcagcatrgttcartggctgcaaatggatctgatggagagcgtgtggctttgggaggagygtgccgccttccacagtgagcagcgaggctgggacctgcagggatgaggtcccgggaggggatgcggcagcccttgagtgctggtbggrgaaggagagctgcccscagtgaggaggcgccgrgctgagtggcccagactccttaggagasgcctggttttgggcttcctggtgattttccttcatgtctgcctcctgtaggyggagcaggccaggaggaagcagcgagaagaacgcctgcagcagctgcagcacagggtgcagctcaagtatgcagccaagcgcctggtgagcctcatttcttggggggcaggattatgtccaggcagggtcgcyctgcttggaggctcatgggtgcgtggccagggycttggtctcccctccatgaccctcactggctatgtgctcccgtacagaagctgggctgtgagtggttgaggcgtggatcctaggagtcgacctctctccagccaggcagccaggcctatgtgaatgggcgtggtgtgctttgtctctggcaygtggggaggtgggtactggtgctgagacttcttcctccctccccacctccactgcccctgtccagaggcaggaagaagaagaaasagagaatctcctccgcctcagcagggagatgctagagacaggcccggaggctgagcggctggagcagctggagtctggggaggaggagctggtcctcgccgaatacgagagtgatgaggagaaaaaggtggcgagcgggtgagacagaggcggtagcactaccctgccccaggccaggggacacccttgaagacagctctttccctcatgccacagatgccatgaagcacctggcaagaggcatggtggcctctgccctctgctctaagccgggtccctcctagggtccatgagtgccagtggcagtgaggacagtcaccggcctggcctgtgtcctctcagctgtcctcacagcagctcaggcagggcaggaacatttgygtctgcaccttatacacaaggaggctgcagccccacaaggagagactccttggctgaggccacaagcctcggcagtggagagctgggctagaactcagcyggcctggctctasatctcaggctctgaggcagctgactgcactgggtaacctttgaggtgccaaccgtcaaggcgtccttagcctgagctttccttctcccataaagcctctgttggtccagactcaaggtttccacttgatgagccatgagctgctgggtgacttagccctgagcaggccacccaggccatttcgggcccacaggatccctggtgacagccccgttcccattcacactggaacctcaccaccatccctgagtgtctgctctgagtatggcactgtccagatgctgtggacrtagaagggaagaagacatggaggggacagttaatagacatgaaaacaaatagcacctatgtgaagtcagcatgtttgcctacaaggaaaacaaaatggtgatgtggatggggtggggggctgcacctgatgatgagtcccgtgtgtcctgtgacatcctggccaccacatctgtgggagggtaactgcaagaccagagaccctccgtggatattcctgaaggttcatccccggccttcacggtctgtctgcagggcgccttctgacgccacctccagccgccatccaccagacgccagcttccccgctgccctgaacttcctccagcgcaccaggccttcctctgtcctgtctgaggatttgctcatgcaacgtgctgtggccaaacaccctgccctcctcccttcgcagatgtcttcctctcctttaaggcctggctcaggtgtcgtcttggtggcttcgggtgtcagctgctctgttttgctcacgcacctgcttgtgcttctgttgttgcctcctctccctggctgggctcgagctgcttcagggcaggaaccacgtctttacagtttgatgttcccagagctgacccagtgtttggcatagrggtgtgctcaatamaatcgagttgacatgaatgagcagatgctgcctcgttgcagtctggtagtgtaattccaggctgcscatgtggacytcgacttctgsccctgcccagggcagagaccaccrtgytgctttatgcctcgctggtgagagggggtcataaacagtttgtgctccatgaaccsttcctgcccacctccraggtcrtgtttctgctccctctcttctcccttagagcccatggggacaaggcagagaacttgagtggagatgaaggtggtgaatattagaggaacaaagtgctccttcaggtctgggcaagagccgtggatcctgtaggtcagcttccggggcttcccatgccctcacgtttcaggagataacgtgagcctcrgaggacctgagttctgaatagaaaatttttgckcttcatttcttcacacacccagcctctcagtgagctcctgctggctttgtccagcatgcgacataagattgaatccaagccttttaagatagagccgcctgctctttagtgaccatgaagccaagcctgtaataattactcttctgatagcccaagacaattgtattctgctttgttagaaaggaatttcgaggtgaacaaaaatgttttctttttatgtgatgttgccataggtggcgtgtgcctgtcagatggttttgtgttttctgaggagcatagactagtagagctagctcagcttcaggccatgggatgcagggctggcttccctgccaacgcctggcgctgatggattcttcccgcattgctggraagggcagactgaggcgctgacamaagaagagttgyagctggtcataagtgacagcatcctctgttcactcgattggtcagttgtagcttcatccaggagatggtcatggggttcctgctgcataccaagctctaggtgaggccayggggactcagcagaaacaaggccgacctgggtcctcccttgtggacatgacagtctggggagatagaccgagaggaagcrattttgaatgagatgggtgtgaaggggccatgaatctgtgtcagagcagccagrcctaccagggaaggtcaaagaaggcttcctggaggaggtgatgtttctgctgctatctcagagttgactgggagctggtgaggggagacaacattccaggcacagaacatccgaaggccygagatgatgaagagcaaatatccsccctggggcctcagaggggtccagcttgctggagggagggcagagaggagagcagcctgccatgagtcccgaggcttccractcaagacttgggtttggggtgctgagctcatgtctcctttttacatttccctacccacagacctgagcggccaygggaggttggggttggcatttgcctgggggagtttctgagcragcagcacctgctaccttggtggaacccattgctgggaatggccagggctcagcaccagcgctcagcagatgctcagtgcgttttgctgagtttgctgagggaagactgttttctrttctctctcacacacacagagtggatgaggatgaggatgacctggaggaagaacacataactaaggtaacacgagtgtcctcagctggtgctgtgctgggggctrtgggctgggctgtgyacccttggggaagaggctggagtcactcggctacttctcaccctcctctccacaaaggaggagcttccagcacttggactctgttgcttcttgcacgcaaccctggtcctgagttgctcccttggccagctgcagtggaccctggagtcctctcctggggtcagggcctggggagtcctctcctggggagacctttcctgggagcagggccatgcttgccaccccagggcatagaggaacagctgttctgggctgaagtctgggtgttttctgtccctgctgggtggtgctggatatgactcgtggaaggagctgcctgtggggcattcccttgaacttctggagctgtgggtgacttgggaatccctgggtccctcgatagatgcctgacatgggacattgctgtcctgcctcggctttgtgcattgggagccactccctttccctcagcctctcaggccctggcgtgccttgatgttagagaatgctgtgggatgttttggttccctctttgaagtgcctttctttctctctgctagatttattactgtagtcggacacactcccagctggcccagtttgtgcatgaggtgaagaagagcccctttggcaaggatgttcggctggtctccctcggctcccrgcaggtaaacagtagccagtatttccaccaggggccatcctgctcctttcsccacaactttgtcctgctcgtccaggcctgggagacgctgggtctgtgacaggctgaaccrtgtgaggagcagccccctccctgrcctggccggcccakcactggaaggcaaaggagaggtggcgggggcaggtccacgtgtgttggtaggatgtcatttagctggcaccatctctttgccyctttctttctcctttgytgcagaacctttgtgtaaatgaagacrtgagaagcctaggttctgtgcagcttatcaacraccgctgcgtggacatgcagagaagcaggcacggtagccaccrggaccrtggtgtagccgcaggtggtctggagagagtgaggcaggggtggcagtgactgaagaccattmagtgtctttcatagaaagaatggcagaggagaccccagttcctycctgagtcccctctccttgggaaaaagtgttcctactctctgggtgagcgtctggtccgaatcgttggcttggagatgattttacgggctctttctggagaacaraagtaaaacsttacagtgttccgatgagacacagtaggcagtacttgggagggtcttatagacccyaccctryggaagtgggtctcaacattacacaaccccctctygggcccgtggacagttgctgtcytctctgttttctctctttgtgcctgtgccmccctcagagaagaagaaaggagctgaggaggagaagccaaagaggaggmggcaggaraagcaggcagcctgccccttctacaaccacgagcagatgggccttctccgggatgaggccctggcagaggtgaaggacatggagcagctgctggcccttgggaaggaggccmgggcctgtccctattacrggagccgccttgccatccctgcagccmaggtgagggccctgcagggccagaaagccgctcttggctctcactgtrgtctaggccatgaggggsgtcctcatcacactgtagtttgggggatgccccccaccrtggtcaggttgatggcaccttaacccattctctcctgaggcgtgagttggaggaggcgcgtgggatcccttggggtctccaggcagcagggccagttggcattactggggatggtatttaggagccaggaaagccggtgcattcctagtgaaaccacagggagaggggggatgccaggagctgagaagagtgtgctgcatacatctatttacaaatggctttccaagtgatgctcccaacttccatgcctatgatgtgatggaggatgtcagtgatagaaccattcagttttccagtttttcctttttgtaatatcagtactcttaactggaaagctttccctaacttacacctacctgcagcacgtgagaatactgtcttctctgccwcaacttctcttgatttttaaacagaaggaagaactgctaatgtagcagatgaaaagtagtatctcactgttacttggtgggtgcagtttcactatttccttgctacttctttaacttgagtgactttggaaatgggatatcactagtggaaaattctgtataatccagaaaaaaatgtaaggttttaaaagattcagggaactaagtaaccgtttgcacagcagctaaatgctcaccagcatacctgctgagctgtgtgggcgctggcagagaaactgaggaaagctgccaggccccatggtgtcccaggccttccctccggtctgtttgcctttagagcaaaattagtgctataggcatttatacacaaataccataatatggcccaaaatctttacgatttttgaatttgtaaagtactttgaccatattttgcttttatgttaatagtattccagtgaaattccgtgcatggggacgctggagcccagaaaagttaagtgactcatattttctcaccaagcgtgggtgatggagccattcagttttccgayattttatttyttatatgagtattcctttaactggaaactttcctaacaacaaacacctaaagacctgcagagttgcttttatttttgttaccccagctccacgccttaaccctcactttgaaataggatgtrtcaaccctattttgcagatgaggaaagcaagggtcagagaggttagacaactcttccagagtcacacagctgggragtagcagctccaggagcagaagctggggccgcttcctggtgcaccgatggtcttcargtgttttgtggaaactcgggggcctccggggygaccttgaggacatggacaaggctaagcaggggttcccttcacccagccctgcccttggtttactcaggagtcagaccagccctagtttcctgtgtttcatgtattggcttttcatgtgaaactcgaggagagcttgtccgttgctacaagctgttttttgaaygtctctacacagtccaggcaggaartagaagcactcacatcaggagctcagtgtcaggcaggcaagcctcctgcaggggagcccygccctgctcaggtggcctcatctcccctcccagctggtggtgctgycctatcaratgctgctgcatgcgrccactcggcaggcygcvggcatccggctgcaggaccaggtggtgatcatcgacgaggcgcacaacctgatcgacaccaycacgrgcatgcacagmgtggaggtcagcggctcccaggtgcgtgggcctcccctccccrggccagggcctgccgtgaggtaaagggacttggatggttcctccagacaccygggccaagaattcctccggaggtggggcttgctacagggtgcacgagtcaaggyggtgacctcatcggaggctgaccatggctttccagtgcatcccagaactctggggaccccgctatgacagagtgcctcatttccctgcacctcacctgcccccatgctmctgagtccctccagccctggatgccagcagccagttctgcaagccagggagatggcatgtgtgaggcaraagtcccctcaggattggattttgtcattactgaagttgtctggaggggactgaattgaggaatgctcaagatcagygcaggctcctcctgctgccctatcatgcgccatgcatggcaccaggtgtctctggtcttcacgctgactctgccatgggkgtggtgttcctgttttacattggaaacktggagattcaragatggtcaagctctgtcctgaggtcatgcagctcatgagtgtggagctggggtgtgcccactggtttctgactgtgaaacccccacgacatcccaccrgctctactgacctgtgcctgggctgaattgaggctgggatgtgatggtgrccttgaaccatcactctttgtagactctaggtcttttcccaacccggtggaaactagcaggsagattccatacttgaggaattcagcctyttgctttttctctgacccacagtggacactggaggaaaccttcccttccttcccttttctcttagctcccacyagcctaagggctgtggaaaccmgtaccttttgtctgcacccagccccctctcctccctttggtggcttcctgtgtgtccagggcyagcrtcttctaggtgaatctaagatgtcagtaccttagccctcrgctgcttgctcagagcctggtttgtgttctttccccagctctgccaggcccattcccagctgctgcagtacatggagcgatacgggtgagatgtgactctctgaggtagtgggacagtcccttggtggccccctgcatgggcctctgagaggcagcactttggttcccacctctggcccgkgctgtggcggggtggagctgcatgccattcatgtcctaggcacatcatggtgtgtgctgcacacagacctggaaggctggggactgaccgctggctctgaggcctggggcygtggccagcctgctctctgggaaaggatttgtagcttgtgacccagtttgagaggcaccgggcagcaaggcttccactggggtgggcggggcgagtcgccatcaggrcaccaccacttaatgtccgttggcttcttctcaggaagcgtttgaaggccragaacctgatgtacctgaagcagatcctgtatttgctggagaaattcgtggctgtgctagggggtgagagcctcgccccccggctaacccccggcctgcaaaacccgccgggctgctttttccttggatgcccatcaggacgcctcagttctctgtgtttttaagaagggtcggccaggtgtggtggctcacgcctgtaatcccagcccttgggaggccgaggcaggtggttcacctgaggtcaggagttttgagaccagcctggtcaacatgatgaaatcccatctctactaaaaatacaaaaaaattagctgggagtgttgccgtggcctgtagtcccagctgctccagaagctgagacaagagaattgcttgctcaaacccgggaggcggaggttgcagtgagccgagattgtgccactgcagtccagtctgggcgacagagtgagagtcagtctcaaaaaaaaaaaaagaaccaaaaaaaaagaagggtcttggtcattgatttagaaaattcttgttctttgtagcttagttgagttgtctgacttgagctttttttagacccatgggttctttgcccatgttctgaggactttttatttcaggcgctgctctggggggatattaaggatacagcatcacatrgacacacggtgtttccgtgatgggcatagttctgtgggttgttcgaagcacttgcatatgcggttttgtgtgccctgtgagaacgcagtgctggtatttgaatccttgttgatagacgcataaactagagctcggagcaagggctgctcccagcacgggagcctgggatcttctgactccagctcccacgcctctttgcrtgaccctgtcacgtccccttcttttatgatggggcacccccttgctggaaggtgtctgtggaagtggaagctgcagaaagcctgtgggagctcctggcgggagctggtctcgtgttgctgctctgagccrccagctctgctttgcctcaggctcaccagtggcctgggtagctcctctgtgctccggtgccctgcataccttggtctggctgctgtgtcccggcctcctggagaaggggtgaaaaacatgaacttacagggctttgggttccacgtgcaagcacgtgagtcagacrtgggaggctcctggacccacctgccctctaagtgggtccgttgcatrctataaacagtgaaaagcaaaacaaagccgttcaaatacagatgctcttcttacttgatgtgcagtgtggagggagagaagatagggaagggttgggggkcctgagaaccaccattgtgacctatttccattctcttttttagggaacattaagcaaaatcccaatacacagagtctgtcacagacaggtaagagagttgccctcagagsgcccagagctgatctgagccacttccgagcttaaccctgggactgaaacctgaggcttagggtgaagctcccaaggcccttcatgtgtttgctctcagggacggagctgaagacyatcaacgactttctcttccagagccagatcgacaacatcaacctgttcaaggtagaggtttccaccttgccatgttccacatccaatttccttyctgtcaccacctgtgggtagagtactatgttaagactatagaaggaagaaaaagcaaaacagacgtgtaattacttaacccttaacgcaacacgcctgtgagacaaaagtcatcatcttttagagtgaaggccacagggatgagggatgggtgagaaagggacctttcttggtgccccatagaacakatagagactccaggtccttgctgtctcaccccatcttctggcacagtctccctcaggcttatggacaggaataggatgttgatttgttctgtgcaacccctgtcacgtcttcgcacttgggccttgggtgtggttgcagcctcagacctctgctcgctccaggtctgtgtacccagcgctccccagatgaaacacggccactgccgcctgaaccccaagctcgtaactcaaatcagcaacagtgactgcccctgggtacagggttctgcctctgttctaggcgccatgccacgtgctgtgctctgagctaggatatccttttgccccggcaaggaaagcaaacaggcccatggaggtgacttcaggagggtggcgagcacaggcttcccacaagtgagccaatagcaagtggcagagacagcgtccaaacctggctgcactgacttggggccccacattcttcccatcgtgcctgccttttttttcttaaaaccagcttttcccctgaattacacatttgggtcactgtcactgccaccatccctgccagacaggctggatccacgtcatccttgatgcctttctccccttgtctcccacatgcctgtgacagccgccaggcctgacagcctcagacagtcctgccgtccccgcgcttctcccacagctgggacatgggtgcaggcactccttctctcgccttccctttgccctccttgctttccttctcccctcttcttcccatgggtctcgggtctcatcacccaccattgagggaatcctcatcgaaggacgtcgctctttttagaaaccggtttaaagcctccaaactcctcatctctgcatcccaagctaagatgtggcaccaaaccacacacattggatgcaccgactgagtggcactgccccagcccctgagcaggtcccagccatcatctcctctgtggctttgctcatagaagttcctttgttttaactctctgtcacctggaaggaaagccaaggggacctagattttactgggcactcttagacttgggagagacatttggaaagagggtctcccccctgaggaggacactgcgttgtgggcaggggcagtagaggcgggggtggcctcggagaggrgatgacaaggttggtggcaaggaggctccaggtgcctcagaaggtagcactgcgttgtgctgcctgggtggtagaagtggtgttttttgttttgtgtttaagattacagcttgctcagtttgcacwcatgcctacagctgggcttggtttttgcaggtgcagcgatactgtgagaagagcatgatcagcagaaaggtaactgctcccatcttgtggtcctgaacaagacccagctgtgccccaaccccctgccgttgccatgctttcctcccctgccctcaggraactccagagtccccttcrtctccaccctccttggtgcagtgggccttgctggggtggtgggatgtgcgcttcaggtgtcttgagcctggcagagcctccgatccacccagcctctctctcatggctgttcctcgttccyctccactgctctctctcatcccacccagctctttggcttcactgaacggtacggagcagtgttctcatcccgggagcagcccaaactggctgggtttcagcaattcctgcagagcctgcagcccaggacgactgaaggtgaggcaggagggtgagcaggcagagccggctgcacgcatgggcaaggacttctgttcctcatgtgtggacctgacmagagggaggcctcctccccrttctgctctgtgcagcwcttgcagcccctgcagacgagagtcaggccagcgtcccgcaaccagcttccccrctratkcacatcsaaggcttcctggcagctctcactacggccaaccaggacggcagggtcatcctgagccgccaaggtaatcaggtggttcttggccaggttcagttcccaggaaggagccaagctgagcccgggagccgcagcatgaaaggattctttccttccatcctgggaactycctgggttaggaggaagcagtgcagtgggcactggcctgctgtgacctgggcaagcagtggaggtggacgggaggagatcgaggggctgggatggaggtcctctagggcaggggtcctagggaaacttgtattgtggggtaggtgggctttggtttgggtcatgattttgtcatctatgagccttgtgatttggactattttctttctcaacttcagtttcctcatatgaaaatggagaggataggccgggcgcggtggctcacgcctgtaatcccagcactttgggaggctgaggggggcggatcgtgaggtcaggagatcgagaaccatcctggctaacacagtgaaaccccgtctctactaaaaatacaaaaaattagcagggtgtggtggtgggtgcctgtagtcccagctactcgggaggctgaggcaggaaaattgcttgaacccaggaggcggaggttgcagggagccgagattgagccactgcactccagcctgggcaacagatcgagactccatctcaaaaaaaaaaaaaaaragagatggagaggacagtatggtccacctctgtgggctggttgtcctagagattaaatggtgtttaatttaaagagaaagcactagcacttgtgcctcagacctggactcacctgggggaccccctttgctgggacgayagaagtgtctgttgggcttgcactcacctcccaccgatctgtttttccaggcagcctcagtsagagcaccctgaagtttttgctcctgaatccagctgtgcactttscccaagtggtgaaggaatgccgggcagtggtcattgcsgggggkaccatgcagccggtaaggacacctttcccagcccctcgtgccccaggtgttgggatgagatggggrcttgggagagatgcrttatcagtcctgttctctcctggggccscaagccagaaagggtcagctcgagcaggcccagtggtgtccrctgggtgacactgctattctctcactgctgtgccttttaggctgcaggagcagtgcagactcctctgctgctccattctgtagccccaggatcacacttctcccagagaaagctgttctgtggtttcaaactcaaggaaaaaaatcatgattccacttttaaaaggttcattttgatgtatatgaatataatagtctttgtaggcataatttttacttatgtgcatagctattttaaaaacaaaagtgcggctccctccatgtgctgtcactggaacttgctcttttcactcagcagccagagggtcataaaccctgtctccttgtcagcaagcatgcacgtatttcagtatcccagctgtgctggattccagttacccagatatacagcatttcatgtacctccttctcttttgttaggtgtgcaagctatttgcagttttctgttttgagcatgactgtgatgaatataaccgcatttccgcacagtggtgactcctacctagcaaagggcctcctggacaaaaagctgctgggaatcctgaagcagtgcttcccagccccagatgccttagcttttgatttttatatttttgtatggatagattcatagttttattcattcggcatattaaaagttgtttacagtcattattgtttctgacgttcacatggtgaaagccccttcctgctagctcaggtcctccccgtggcccggtcagtctcgcctccagcacagcagaatgtcatgggatcaccatgggtgtccttgccgcacactggattgattcatttctccaagctgctctggtttcttgtaatggggaatgacatttagaagtcaagctgtgggtgctagggtgtttgtcgtgctcctggggcattttggtagacagatctaggaaatgttttcagagtgaatccatactggtatttctttctttctttctttytttttttttttttgagacacagtctcgctctgtctcccaggctggagcgcagtgacccgatcacggctctctgcaacctctgcctccggggttcaagcgattctcatgcctcaacctcctgagtagctgtgattacaggcatgtgccaccacacccagctaatttttgtattttagtagagatrgggttttaccatgttggccaggctggtcttgaattcagttgatccgccagccttggcatcccaaagagctgggattacaggcatgagccaccacgcctggcccatattggtgtttctaagtaaaaatcaaaggatttgtttacttgaccttttattgtacctctttttctcttaagcctgaacatgtgtgctacattaacwtacttatctgctctatcctataatatacttaaaagttttgaaatcatagtaccaatattacttctaacaatagatctgattgaaattgcctttcctctttgccyttagagtgtaacccactaaggatgcctggtcactaggctctaaagtcacgtggaaccaggcttctctccgtgtgcttctgttgtcagtttcatagatarctaggctgtttttgtttcattttcttttcaattttagaatttgctttyttcttttctgacttgtagtttttaaatatgtaaatatttgtatggctcaaaagtcaaagcaatataaaaagatctattcaggaaagcctcactctcatccctttccagcccattccccacccccatagggaatccgttttactagcttatcctttcagtctttctttttcccctaaataagcaaaaacgtgycttcwtttttccctttcctgttttatttacayrgaaggcatcttagtcagttgtctgrccatcgctcctctagtgggctgcgtggttctctgttggacagatgtaggragcttatccaaccagtaccctctggataggcaggcgcatgattacagggaaaggtccgggggcacatgctgtttggtatttgtgggctgtatcttctcactggactcctaaatatgggattcctgggttaaaaagtataaatatgtttaatttgttaactactgtgaaatttcatgagaattgtaccattctgtatcccaccagtactgtctaggaatgcctgtttctccagagtggttacttttggatttttgccagtctarcaggtgaaagcctggagattsttattcagtagtttgggctggggcctggccaygtgtatttttgaaaattttcgctggtgattttgctgcatggccagggttgataatgactgtgccagatttgctggatttcctttgctattcctgcacatagtttaaacgagactgccagcactgggtatcagtcaccatttttctttttgttagtttgccgtcagccttttctttgacctcttctttcagtttgtgtgtacttgctgtctcttaggccagacttctcgcttcctttctgctgggcctctgaggggtcatggggccatgacgccgtggccttggtctacaggtgtctgacttccggcagcagctgctggcctgtgctggggtggaagctgagcgcgtggtggagttttcctgtggtgagaagctgtgcccagggtggggcaggctagaggtcaggttctggcccccgttttctgtgggtaatacctcatacygtgaccaggcacagrggcggaggagaccccgggatgggagcctcacccttcgtgcgctcrcccaggctctcctgctttgctccctgctgcstgctgcccagtgtgactggcgatggtgggtgggtgagcgctgtcagtcgctgttcctgtgctggatgatggggcaggtaaatgccctctctgcagtgtcttacagcacacctgcatctccagttttcggcccctccctgatcttaccaggtcacgtgatccctccagacaacatctgcccctygtcatctgcagcgggatctccaaccagccgctggaattcacsttccagaaaagagacctgcctcagatggtcagtcccagccagctcgctgcaccacagcctggcctcaggcagcaaagggttttctggggcagggacgctctggcccaccctgagtgttttcaggtgttggggaaattgcacagggacacccacttagagccacacagaatgagcggcgtcgatctagatgcttatggaggaaggtctgagcttccccgcctctcacaccttaggctgcgaaatatgtattcataaaacctccaggcatcttctgaggacgcctcackcaggagaaagctgctagttccctttggctctcttgccctttggttatatctgcccctgctgggggcagggatgtggggcttgggggcatctcctgtggtgtgcctggggtgtgcagcccctgattgtcrttgtggtgcccatcaggaccctggacagaagaagggaggactcagtgccagggcaatagggaggcccccyagggacgctagtgctgtgacatgtgtcagaaaggcgcagtcagcagcagcggctgggtgtgtttggtgggaggtggcacctaccaccccgtggttcccacccaggggagccaagtcctcttccttggctgtagtcctgccragggtctctcctcagttttgagtctcaaggtgaagacgcggtttgtgggtggctgaggggttgctccatgggggctccctccctyccttccttccttagatggacgaggtgggtcgcatyctctgtaacctgtgcggtgtggttyctggaggggtggtctgtttcttcccctcctacgagtacctgcgccaggtccatgcccactgggagaagggtggcctgctgggccgtctggctgccaggaagaaggtgagtggcctgtcggcagccttgccacttgtgaggacagtgycactgagtcctcctgggagctcttgtgctcatcgggtcrggacaggcttytggctcctcatccccaccgctcccagtccctgactacagaggatttccccmaagtccctggctgtgaggttctccagtccgctggccagaaaacacaaggccacgagcagacccgagacctggcaccctaaacctgtctctgggaaatgtcctstgtctttctcagatattccaggaacctaagagcgcacaccaggtggagcaggtgctgctggcgtattccaggtgcatccaggtgcgggcgtcatgctgrgcttgggtctgagaccrtgtgggggtggcagctggaaacgtgggtgtcatccaagttttggctcagcaactcagcrtctgggtttctcctacaggcctgtggccaggagagaggccaggtgacagaggccctgctcctytctgtggttggaggaaagatgagtgaagggatcaacttctctgacaacctaggccggtaagtagtggttctgctcatctcctgggtcgtgatacatggccggccctcactcccagcagctgggcccctgcctgctstctgctgccattagagcccacagctgggctgcgactgctcagaccagccagctggagggaggggctcagcagctctgggtttggccctgagagagtagttggattttaggctggycattgctgtatcaggacccaatcaattggcctagacgggatctctcagccttacaagccctctccaggtggtaggtacagagtggagagaggctgagttttgatcacagtcggagagggctgacgraaggggtagaacggagcagctggtgacatgggtgatgacccgggagttcctgacgtccacccactgggctcttgtctccyccccacgtgtgtggtgatggtgggcatgcccttccccaacatcaggtctgcagagctgcaggagaagatggcctacttggatcaaaccctcgtgagtgaccccagtgtcacagagggtgacagagtaggcagtgggtgggagtggcatcacccccagggctgatacagccaggccttccccactgcgctggtgtctcctgccccctccggaagcttggatgcccctccacaccctcttgatcttccctgtgatgtcacctggacccctgctgctggcattggccacraagcctcctgktctggctccaaagcctggcagggtcttttccccgggggagctgcaggcagggaacrgtcctgatgggtcwtccccttcactcccagcccagagcccccggccaggcacmcccagggaaggctctggtggasaacctgtgcatgaaggccgtcaaccagtccataggtgagcctggctgcctccagctgggtggacagatgggrgctggagaaggggagaacaggaaagaggggttgcctgccctgtttcctatrtaagtctgaggaaggggagggggtcgccatgggaatgtgctgtagggggaggcaggtgttgctcggagcsccagcctctgttcctatgcaggcagggccatcaggcaccagaaggattttgccagcatagtgctcctggaccagcgataygcccggccccctgtcctggccaagctgccggcctggatccgagccmgcgtggaggtcaaagctacctttggccccgccattgctgctgtgcagaaggtcagtcctacctttttctttctgagagcctcccmaccccgagatcacatttctcactgccttctgtctgcccagtttcaccgggagaagtcggcctcttcctgatgggcaaccacaccaccgcccggcgccgtgcccttcctttgtcctgccctctggagacagtgtttgtcgtgggcgtggtctgcagggatcctgttacaaaggtgaaacccaggaggagagtgtggagtccagagcgctgccrggacccaggcacaggygttagctcccgtaggagaaaatgsgggaatcctgaatgaacagtgggtcctggctgtccttggggcgttccagggcagctcccctcctggaatagaatctttctttccatcctgcatggctgagagccaggcytcctkcttggwgtccrcaggaggctgtggcagcwgtggcatccactgtggcatctccgtcctgcccaccttaagaggygagatggagcaggyccatctgcctctgccctttctagccaaggttatagctgccctggactgctcactctctggtctcaatttaaaatgatcccrtggccacagggctcctgcccaggggcttgtyaccttcccctcctccttcctgagtcactccttcagtagaaggccctgctctctatcctgccccayagccctgcctggatttgtatccttggcttcgtgccagttcctccaagtctatggcacctccctccctctcaaccacttgagcaaactccaagacaccttctaccccgacaccagcaattatgccaagggccattaggctctcaacatgactatagagaccccgtatcatcatggagacctttgttcctgtgggaaaatawccctcccacctgcarcagctgcccctgctgactgcgcctgtcttctccctctgaccccagagaaaggggcygtggtcagctgggatcttctgccaccatcagggacaaaccgggggcaggaggaaagtcactgatgcccagctgtttgcatcctgcacagctacaggtccttaattaaaagtgtrctgttggtttctgctgagttttttattgatatgtgctgctgttttctctggaagcctctttagggaatcgaggagcgcactggtgcaggggctgggtggagccatcctccgatggagcacaggcagatggaagcccccaccccagctgcgtggcctgaagccagcctcccgctccccgaaggtggtctccacacagaactgggacagttccatccccgccccttcctccagggcagcagggctgaggatcccattctggctgtgtccacgtccgggccatggctggagtctgggtttaggggaggaaggcatggcggcgcccgctaggatttccagttgtcctcttcttcctctgcctgtggctgctgggggttagcagacacggtttgttgtctgacatacgggctctctcctcccggcccctcaccagccccagaggtgaaaaggctggagggcaaaggctgagtgagggaggtctgtggggagcactggtttccccaggccccagagacttaaacacaggaagaaaaaggcaagagagaattaacgatgccacagcccatggcagacagcggccctgcctcctacccttgcgtctcaggaccagcttgttgaagagatcccacatcagttccctgccttggcttacggctctcactgcaataggaaagccacggagtggggtgtggggttcagtcacattggacccccggctccgtgttcctgtcccctgtagtgtttttgttattagaccctttttcctccttggtttaggaatgggggccccagggccacccttgtccaggctccctctaccgtagaggtgagaattccagggcgctacagtttgaaaaccactattttatgagccaagtagaacaagaaatgacaactattaaaaaaaataagggatttctgaccagctaacaaccccacagaaaatctgccagggatccagaaatgagactgaggtggcctcagagagcggctccctcctgaaggggatgctgctgctgtcatcctgcccggcaccttggactgcagtgggcagggcctggggtggggatgagggtgcactgaccagcaccgcagcagcttggggaggttggggtgctgttaacatgccatcgtataggtcggaagtggaaatgggagaaagtgtggggtgcctagggaaggaggtgactgagtagggagcctggctgccatcctaacacccagctcactgggcttgagagacttgagcctggtgccagggcagagtgggtgatgctggggcccaggctggcaccatacttgaggtctgccaggcaggtcaggtaggatggcacatcgaccttggggacttggcccaggtctggcgtgtagaagtagttctccgggacacacgggattaggtagggacatgtgagaggtgacagggacctgcaggagcagctagcgagacctcatgtgcaccctgcacagctgtggtggcataaggggttcaatagagcctctcctagagaggagcctggcaaggcccccagcccctgcccctgcccctgcccctccccctccctgtccacctgctgctccagctgctctctcattgatggacaaggggcactgaacagtttcttctctgtctctgcccccagcatcacatggctctttgttacagcaccaaccagttggtccgggaagacagacttcttgtatctacaggggcaacgtggaggtcaggcaagccagcacctgctgtcctgggaccatgttcctgacctacctctcccatgtcatcagggacactgcactgaggggtcccaggccaccgagccaagccaccctggtcaccttctggctcccgcctctgtgctgcacctgagtgtgatgccctgggaccccattaagtcaggctgagtcttgcacccacaccctgcgactccattttctgctacaaaggatctctctgatgttgacgagcagcatggagacttggggagacccccccaagcgcctcctccatgtcatccttgggctccagcttggcgctcacacacacaggaaaggacttcagcttctcctgggagggctgggtggctgaggggtggtggatttcggagttggaccagcagctggcctagaggctactggggaggagggagcagggagcacccactgctgatccagattcactccttccctcgcctctgtcatgaccccaaagaagcagatcctgaacctgggctcttgtcttcacctttgttctcttccactctggggtaattaagaatgatttgctggccaggcgcggtggctcatgcctgtaatcccagcactttgggaggctgaggcaggtggatcacaaggtcaggagatcaaaaccatcctggctaacacggtgaaaccctgtctctactaaaaatacaaaaaaattagccggtcgtggtggcgcgcatctgtagtctcagctactcgggaggctgaggcaggaggatggcgtgaacctgggaggcggagtttgcagtgagtggagattgcgccactgcactccagcctgggcgacagagtgagactccgtctcaaaaaagaaaaaaagaatgatttgctaattatgcaggcagctgatccagtgctgtgtaaccttgggggccaccagatgccaatcagtagaatgggagagaaggaaggatggaggaagtgaggacaaggggcaaggaggaaggtctgtccacctgtctcttttgtgcaggaggtgtccaagcaggaggagcacgtcacatccccactgaaaaagcccacagaaaatgaaaagcccacatgcttgtccattgctgcaggatgggggcaagtggagagggagaggtgtcaatgctcccaccttactcccagtcatggctgactcctccctttccttcgttcttgttcctaatctgtcaccatgtcctgtcgttttctttgtctcacccaaccctctgtgcctgcaaatcccctgactgcagcctcatccctgtcacctcctgactgtagttggtgacagaagaggaggctgcaccagtgaaggagcagggactccaggtctggcaacaaccagggatggggccgggtgggggtgacttggaccaggagaggggcctgagtcaggcagtcacatgcttcatgctggggtcccccaagtgaggcacagcccggggtcccgggaagaagaccaagcctcatttcaggttgcttgtggccaaagacaggacctgtgtacccaacaacccctgggacttttgcaggaaacagcaaacaccattcgctcactcgagttagataaacactgagcgaaaagtcactggagcccaaggactgtgcggggtcagtgctgccgatacaagaaccgcagccctccagctcggctccctcaacggcctgcgctgcagccacactggcctcctttcaggtcctccacctcagggctatagctcatgtgcttccttctttctggaatgtttttcctgacctacccactcaccgtgagatttttaccacaaatgctatttcctcacatccgccttccctgacccctgagaccaagctaggtcccccatgatgggcctcgcagcacctcatctcccctccacagaggcggtgataacccacagaacccagggccacgatccctggctttgaaccctggctttgccactcggccagatctctttctgtgcctcagtttcctcatctataaaatggataacagcagcgcctgctcataaaatgtggcaaggattaaatgagttaacgcactcagatcaatggtggagcaagctccatgatacatgaagattagtgattacaaaatactataaataggccttatcacaactgtaattaaataactgatcattaattggttatttaggtctgtctctcctgccagagtgtatacaccagttggacaaggacgctgccttattcatcactggatctatagtgatttgctcagtgccttgcacacaggcactgttgggtaaatattttctggctgcaggaaagagtgaaggactaacctccccaacccccctcccacccccgccccttgctacctcgtgggaggaagagcatgagttgggagagcagagccaccacaggaaaccaggaggctaggtggggtggaagggagtgagctttccggctctcaggagcgaaagcttccaagttgggctctccccttggccccttccacccagggaagacagctgggtccgccaggaccaagaatccccaaaggggctgctcccagaggttgtgttgcagggactggagagaggacttcccagtacagggggtggccctctgatcaggtgggggtgggtggcagcagagcatttggtgggaggtcaggagctcacaggagatgggattctgccgatgcctgctgaatgaatgagggagggagacggcaggaccagggactggggaattggtactaaggtgctgggtacctgccgggcactctgtccatacatgatctcagttcagctctccaccttggaaacacaagaaaggagccgtggctgcagagaaaaacagaggctggaaacaggggtacatgggcagggtggtggtggtgagagaattgcctgaatcagctgccaaatggtgcccaggttggaaaagcaaatgtgcacacatgggttcttcccactctaaccctgaggaattagaggcctgcttctgacacagactgggcagtggctagtgactctaggtatagagtatccaggccctgctcacccaggctagagcttagggagccagaaggaaggaggtgcatgttggggtgcaggacaggagggaaaaatactcgaattgcaaggtgagggcacagtctatttatattgggttgaattaactcctccccctgatgccactaaagcaggaatcacactgcagatggcactgatttgattggcaagagacatgccaggaagaatattaagggaccggacccctataattaggcctaatcatagcctgttgtttgaaaagggcatgaaggacattcatcaggcctggcactgtgccctagacctgctctcctgggtagtgggaccctccgtggcaacagaggtgtgggtgggcctgggtgagtgtggcaagaaatgcctcggaggctctatttggccttaaagtgctgtgtgaccttggataaactgccctctctgaatctctggtcctttccatttcccattctccaggctgagaactgcactgtgatatatggttattcccataataataatgtgtgtatcatgcataatgcactgcacctcttcaccacgctggtgcccactcttctgctccccctgccggcttcctcagccccttctaccctgatggttctctcctttcctcctcaggccagcacttcccatgatctgagatgtccgtcctccttcctcttcaactttttctccagcagtgagttcctcctcctaactgaggcttccaggaaggatatcctctgcttctcagacctgaacctgccttgaatactcatgaggacccaggagctactcctcacctcccacttctcttccctcctgtcagataaccaaggcacggccaactgatctccaaccatctgaggaacccaaccgtgtgagaccacccacacctttcaagaatgttcctcccctccccttctttgtatttatactgatgcaaatttgctggccatcttaactcagtcctgtgcctcagttctcccacctgtaagatcaggaggaggataaagatgtaagactttctgcacacgttttaagatgaattccttgttaccacatctgagggtgtctgtgtttactgtactatccacgtgagaggattgtacagacacgaatctaaacaaggaagtagcaagtccattcaagcattaagaggctgattagtggtttattcattctgtctacaagcatctactgatcatctattcagtacagaccattatcacaacaaaggtgaataagacactatgc

SEQ ID NO: 6965 - DNA, 15351 bp, Homo sapiens
ctaagtttgcaaaatgtgagaaatcatgtggtactactttcattcttcacatagatagactcaaacacctttagttctcagaataatacacttcagacatctttgacctcttatattatttcctaaaataagcttaaatgtgtttctcatatcctctaatcatccagaaaactcctattcatcccacaaaatcctatttaggcatattctctttatgtattttttccttaaaaatatgtatatacatataaatgtaaatatataggcatatatctttttcctaaactagtggttgtcaaattttaatgtgcttcggaggacaagatttctaacttattcctatgttttttttttttttttttttttttttttttgagacagagtcttgctctgtcacccaggttggagtgcagtggcaccatcacggctcactgcaagctccgcctgctgggttcacaccattctcctgcctcagcctcctgagtagctgggactacaggcgcccgccaccatgccaggctgatttctttttgtatttttagtggagacgcggtttcaccgtgttagccaggatggtctggatctcctgacctcgtgatccgcccatctcggccccccaaagtgctgggattacaggcgtgagcccctgcgcctggccacttattcccagaatttctaaattattcctaggtgatgctgatactgctactctaggaaatatactctgataatcactgtcctaaactccagctagagttaatcattcatttttctgtaacacctcagtggccatacatgtttcgtttgtaacacttatgtaattctaatatatgttttgtccccagttatactttttctatttcttctattgttacaattgctaatacagcacctggaatatgaaaaacattcaataagtgttggctgattgaattaattcatgtttcattaattttatatcatcttcctaaatctcaatgaagtatcatgcacccatttagacagtgtaaaataatccataatagcaatatattaaaatcaaactaatacttaatatcttttgtgtgccagaagttgggcaaagggctttatatgtattattaaataattatcttgatgattagacaatatattacaaaaaactaagattctctagaggtttaagtggctttcaaaaagtaacacaaagctagtacatatcagaactctggtttgatcccagcaatgtccaaatagaaatgggtaactctgaagaaagggtctgagaatgacagagtgcatatgggttgtggtgtcatggccttttccctcctttcttaaaaatagataccagttatataagttttatcatttatgttaactttgagcttcctcgtggcatataggtacagggatttcattaggttcaaagaagttttaaagaaaagaagcaattttgattgtggaagaatattttcagctcataccaaataattgaagtctgctgtgtaggttttgtcttcaaagtcttccatattgagaatgcagtgcactagcaccctcttctgctggttgcatctcagttcttccatctcttggacaatctttaggaagctattcatcttggagtaaaatcgatatgcaaagtactcgggctgagggtattgaggcaacacccagccatgagcctggcaattttcattggccttgtaggctgcctagacaaaaaatcaaaattacgggtattttaggataaagagaaaggatgagtgaaagaatatttgataagatggtttatcatcatgctgctttatctctgcaagaaaattttatagccattctacattaaatctaacccaattccccattttctagttatactctagagcgaccactatggtttttacaatttagtctattcaagtcctacttcaataatattacattcaatattttactgtattctttactataattattacttttgctagcaagtagattgctatatctccctcactataatacgaagaacccatgagtgcaaacgtttaccttgctactgataacataatatgaagttttgctgaaagatgggaaagtttttatgaaatacagcaaggagtttactctgaccatagtaatttaccattatcaacacaaaaagtctgaggagtcctttaaaaatatctaggaaggattgatatttaattattacagatagtagtttacttctctcttgaatatatccagagaaattctttacattattccaaggtaatagattacagggtttctcaaatatttccttctataaaaacacaattctctttctatttccttaataaaagtgaagcgttgcttattttcagctaattctcctttatacaatttagtatgtatgctatccttctgtcttttcccgggactcttaaaataatttttaacctacttttcatagggcctatattcttaatatttaactatttttcagtactctagattcacaccaaggtgtatcttttcatttctgttccataaatataatttcgcacagacctaaaccttagcgagccagtgcagttttttgtttgcttgtttgtttttattttacttgcctttcgtttaacttactttcaaagtgatatttgggtatgtaaacgtatatgtgtccaagaaaaactgagcgatgccatttacatctgtggtgtagtttcccacgattttgtccttcagatgcaactggacaacttcatttgggattggagagttgtctggattaagcaatttaatctgtacaagaggaagaaaatacatttcggaagcatgtagtaaatttgggaatccattttgatggcatttgccaagcttctatcatggggacccccgctctccttcgtacgtatgcacttcctgcgtggtttcatctattcctgttgagtgtatgacatgtaccattaatatactaatgagcctaaactctgtttctcctgcccacgaagatctctgaaaactcaggcccatagaattaatcatcctgagtattttttataataaaaatgctacagaaaccctcaaattggaatgatttattactgtgcccaaccttccttttttttctctttctcttatttatctcagtgaatacctcaaccattcacttagtcactgaagtcaaatatctagagacatcttagactttttattttccttctcctataattttcaattgttgataaaatattttcaattgtatctttttaacattttctgtttccagcttatcacatttgttcctgttgctattccttgtatcaatagcttatcttttttccctcatacatcttctatttttttctatccagtctctctctcctgtattgcttttgcttgttctttctctatactggcatcaaagcaaattttctaaaatgcaaaatttagcattatcctccctaaaacattgtagtgactgctctgataggccatggttatttgctagaaatctctttctcattctcttactagtacaggcaatgattgctttaaaaagtcccttctgaaattgtatgatttgcagtagatacaatgcctgcatcagtatctatgccagtttgaagcctttaaaggcaccttcttaacaacatctaaggccacaacaaccagaagaagactgtctgagacatcctttttttagctcagtcagtttctgcaaaacaacttctgctttgagcctttcatcttatttctgccacttatcattttcctgctggtccaggcaaacacaatccttttttcttgctcagcatctgtagactgatgccttatttgcaccatctacgcagattttgaacttagtttcatctcaaggcttgatcttgtaagaaaaattcaacttgtctcagcagtccacaggccacagacacatgacaccatgcctttatgatcacacagaggtttgctctaattttagtacacctagactagaaagatcctttgagtcccttccagtcacagaaagatgaacaagccatgtgatttctgggcactttcctttctttctttgtccccaaacccaaatagtgccccaagtgatgacaccaggcccattatcaactgccggggccaggcatgcaacacttcattagcagatgtttcttgtggcaaaggtatttgtcgtatatcctacaattttaaacagtatcatttcagccatccacggatgctgctactgtcacttatgaagaaatacccttgttagcccaccgccttgcccagcttcctatgttcacatatgttactcttggagtcatagctctgaggtcttgaaatttgtaggggacactaaaaaagcagatagtatcttcattctggaaataaagcttactctttaaaagtgctccctagcaatactgagccacgtgtttgatggccttatgacacaacacatggccagataaaccatttttaatttccagtaatgcagctactgtagtgactcactatatcacagagaaaccagtcccttttccaaaagtagaacaggaatgacttgtttctcctggcacatctcccggaagtgatcagagcattcaccactgtgaaatggccaaaaacccaaaagataccactttatacaaccatgtttttgaactaaagcattttattgtttgagactcacatctgtttatagctgccactggtctccctaaaatgatcaaggaaataagagctcttatatatgagttttcaggaactaattctttcaaatgctaatgaagagggtgtgtccaggcaggaaactgtactgtattacaatatattaataacagactactttgtccacggatgcctgattcatgtaggtaccacctatcccctacctccctgataaactattaccaacctcagctagttttcccagctctcctctataggaaaaggtgtcttggagttcctgattataggataagataatactataccttaaagtgtcaagaagctttgagagggaatgggaaggagctgggccttaatgactaggctagggcttaagtacacacatacacatacacatacacatacacacacacacacacacacacacacacacacacacacacacacccctctcaaccatgtcttatgctagagaagacagaaataaaacccctgagttaatctggagcatgattgactggcagatttcagtggattattgctaattttttagaggggataataggatttaggtaatctttttaaaaatatctcaaatcacccttcattgagaatcactattctaagagtggcaaaattctaatttatcactttttaacttattagccaataaattttgccatttggcaatgtctgcaaacactttgggctatcacaaataggaaggggatggtgctacatcccaggtagagacctgggatgttgctaaactcttaccatgcacagggtagcccccacagcaaagtatcatctggcccaaaatttcagttgtgccaaggctaagaaagaatggtttagagaaacaatgcatctaagtaattattgtcaatgtctgctaacatctcagtaagagaggaagagtgctctctgtgaaaagtacatgacactacctacattatattcttgcctactgcacccaccaaaaatgaacttgaatctgatcaagcttctgaacctcactactggtttataggaaacacagtggactgaaagtagttgcttctggggaagtattcacgaaatgaacggattagaggggagaggtgctcattgttcttcatactttaatttacagtgttatttttcttgttaatatatgtgttgtccgcaatttaaaaattacttattttccttcccagtcatggtagctttgacagagcataatggcggtgaccacgtccacaggggtgctggcgaacttgtcagaaaagcaaagagttttatcagcttctgaagaacctgatcaatccaagctgtatggtgcggaggcaagcagaggaaatctgtgaaaatatcccaggatcctcatctaagggtaagggctccagcctgtactacacttggacagatggctacagattttgcacccaatttccaaaagacatttcatgaaacagtgattccagctctgttacgtaccatgcaaaatcaaggtaatcagcgtgtgcaatcacatgcagcttctgctcttactgtttttattgaagactgccccaaatcattcctagttctatatttggatagtatggtgaaaaatctacattctgtcttggtgattaagcttgaagagttgattcggaatggaactaagttggccctggaataacttgtggcaaccattgcatcggttgcagatacaatagaagaaaaatttgtcccatattatgatatattcatgccctcactaaagcacatcattgagcttgctgttcagaaggaactcaagcttctgagaggaaaaattattgcgtgcattagccatattggtcttgctgttgggaagaaaaaatttatgtaagatgcatcaaatgtgatgcagctcttgttgaagacacaatcagacttaaataatacggaagataatgacccccagacctcttacatggtttcagcatgggctagaaagtgtaaaattcttggaaaagattttcaacagtagctttccctggttatcgagcctcttattaagactgcttcagctaaacctsatgytgctctcttagacacacaggatgtggagaatatgaatgatgatgatggctggcaacatgtaaatcttggagaccaacagcgttttggaattaaaacttcaggacttgaagcaaaagtaactgcttgccagatgttggtttactatgctaaggagttaagggaagggtttgtgaactatacagaacaagttgtgaagctgatggttcctttactgaaattttatttccaagacaatgttcgagtggcagcagcagagtccatgccttttctcctggaatgtgcaagaatttgtggcccagagtatcttgcacagatgtggcaattcatacgtaaccccttaatcaaggctattggtactgaaccagatacagatgtgctctcagaaataatgaattcttttgcaaagttcactgaagttatgggagatgattgccttaatgatgaatacttggaagaactgggagggacactgagagcaaaacttgaagggcactttaaaaacgaagaattgtgacaggttaaaagtcaggaagaaaactatgatcaaaaggttgagatgtctctgcaagatgaggatgaatgtgatgtttatattctgaccaaagtatcagatattttgcacacattatttagtacttataaggaaaagattttaccatgatttgaacaactacttccattaattgtaaatctaatttgttcaagtaggccatggctaggcagacagtggggactgtgcatatttgatgacatcgcagagcactgcaatccaacttcatttaaatatgtagtccaacttcatttaaatatgtagactatttttggtggccaatgctactaaatgtgtgagataacaaccctgaagtcaggcaagctgctgcttatggcctgggtgtcatggcacagcttagtggagatgattatcattctttatgttcagaagctgtcccactgtggtaaaagttattaagtgtgcaaattccaaaacaaaaaaaaaatgtcattgctacagagaactgtatctcagcactagggaagattttgaagtttaagcctaactgtgtaaatgtagatgaagttctttcatactggctatcatggcttccactgcatgaagataaagaggaagctattcagactttgagttttctctgtgacctaactgaaagtaaccacccagttgtaattggtccaaataattccaattttcccaaaataatcagaataattgcagaagaaaaaattaatgggactattaactatgaagatccctgtgccaaacgcctagaagatgtcgtgcctcaagtacagactcctgaagatttatggttggaatgtgtatctcaacttgatgatgaacagcaggaagccttacaggagttgctaaattttgcttgaagcactttaatataacttgaatattatctaccataaaagtaactacaaataagtgttgtgaatggattttattaaaaatcagtgaactgttttctctctgctaagctgtttatagttcttcctatgtttctccagaattagtcaatgttagtcctctgtttatcttgtatgttttatctcccaaacacaaaccttggtgataacctgtgcttcaagctgtcttacaatatttgtcacctttcccctagttgatgtgaagtatataaattgttgctatttgtttgaactattatcaatgctagccaagcagtatacttgatgtgaagatgtcatgctatcatgatatgctaagagctcatgaaaataagacagaatttccaggacaaacatctttggaattgtgagtgaaggatatagtggcaggcttgtccctccttgattaatactcttgatatttgtggtgatgggaggatgctggaactaggagagagttttgagatactgcagaggatgtgggatgtatataaactttttcatggtgttctcctgggaactgggtgggacatatccatattctagttcccaaggtgtccagctgagagttagagaactttaaatttctttagccagactggtctctatttttttaagttatccaggactccaagaaccatagttactgaaaagggattcctgattcatctaacactggtagcatgtaacagtgttcgacaaatagtaagtcatcaatattcttgggagtcagtgttgtgtgtttcaggagagtattattttgtatatgtatgccatttcccccctgcaaagcagttcaacaagaagagaagctctgattatagggcttaaattgatttatatttcaaagaatttcctaatagattctatagtagcactgaagagtattctattgtaaaactcggaggaaagcaaatgtaattttctttggacatgaaaaagaaagcaactttgagagtagtcatttagcagtagatgtgcattattatgagaaaacagttctataaattcagggttaattmtattaattggaatgtcggtctctaatgtctagcttattatagggtagaaaagagctttctactcagctaatcattaatcattgatccaaaacttaaatacatctatcatttcctggggctattgtgagtactgtatatgtatttagcaaatatttaagacctagtaagtgctcaataaattgtagctgttactacaaaagaaaaaattactttttaaaaaaatatacaaccataatcacacatactagagaagaaaacttaaaactctaagtaattcttaggtaaaaataaaaataaaaataatgaaatcatcaaaaatgattttaattgaacttaaaaattgttaagatggtaaatttgatatgtgcattttttcataatttaaaaaataaaaatagtatagaaaaacacctgtgaggaggaaagaagtattcaggaaaaattgtataaatctgaaaacatggaagtttaacataagtatttataacaagatgctagaaaaaaaaaaccaaaagaggtagaagaaaaaatataataaaaataaatgatgtaatgaaaatcatttaaaataacattaaaaataaagataattaacaaatccaaaaactaatgggaaaaaaacacaaacacaactagtaataaaaaaggggaaataaattatgatagatttattttttcaaatcataagtgaacatattttatgccctctattttaaaacctaaatttaataagaaatatctagatacagaaactaacatattatagaaaattcttagtgaactaaaaaaggaaaattttttgactcgataaagtatgtctcacaaaatgctacagttacttagtaggtttacgcattacatttttaaaagcattccccaaaatatgcaaaatacaaccaggaagtccactatcatctctaatattcaaattggagatctttgccaatcgaataaaacaaactaataacaaaaacctcagaagattaagttcagaaaggaagctaaaatataacattttcacacaaaatgctctttacacagaaaacacttttaaattgcacagaaaagatacaagagacaaatgggaacccaagaaatcatcttgggtaacaacaacgtaagagggaggaaatggagaattctcaagtctagataaaattattttatattcagaaaaaattttatattctttgaagatatctctcagttttatatatttagtaacagaacatggaaatatataaagcaaaaatgtacaaagtgaagagaaaggttagaaaaaattatgttaacattatccaccactattcagtaagtgaagtgaacatatatcaaatttatctatctgccaaagctgtatttcaatctaaatttgttcattaaatgacttttactgaaatttgtttcagtaagtcctttaggtgatgctgatgccagtttgagaaactgctttgtaagatgtaagccaggctacccacttttgtatttcttttttagtgttcttgtgtcaacctaaatattacttcctcagggaaactttccatgatcatttagtccagattttagcaaacttcttttgtaaaacaccatggtctctctctcatatatttttttattttttaaataatcttttaaaaatgttaaaaccactcatagttcactggctgtatcaaggcaggcctctgtctgatttgcctatgggctgtggtttgtcagctcctgatgtagagtagttaaatggtcagtatttcactgacatagcacctatcacaactacaataattctttgtaaaattatctgtttaatgtttattatctctattacactataaactccataaaagcagtgataaaagtgcctctctacatcaccattttattcctaatactgatgtagactatataatttattgtccaaacttggacacttttagagtgaagtggttgtaactattaacagttacaacttgataaaacatatacaccaggacagatctatgaaaatcaacagtgtaggtcaccctacagtgcttagcacagagattcctacatagtaatttcttagggaatagctgttggaagattagtagataaatgaaagaacaaatgaatgaatgaataaggtatgtaaaaaatgattgctttcttacctggccaaaataagggagtccctgtttgtaggacatatccatattctcaaaactaatcttcaccactgatgagtctatgtatacgtacttggagcctgtaagctgcacacctgcagtcaattaagtattattgagaaaatgtcacttccaaaaacagacaaacagagcttctgaaaaaaaccacaaaagctcaccattccttctaatagtttcccttccctttcctaagcagttttaatatgtaggtacttcagatgtcttttataaagaaagttaatcaagatggcacaaaatgcttgtgccaactggtgttgctgctttttataaaatatccaattcacttaccatttcttcatgatggattagtaaacgttgatttctcattattcctaagtgattgtttaacaacatttcttttactctctgcttgcctaaaacatatgctttaatttattaatagtaagaattgtaatatatgtgtattattaaaaatggaaatgcttaaaaaagaaaatacaaattaccaaatatcagatatctccaagagaatcaaaattagcattttaggctttttcccacaagttctatttctttttatatttatcatttatattaatatgtttgagattgtgtgtgtatatgtgtacatgcacacatacactcaatatgtgcaaatgtgtatgtagttttacatgttttttatcattattttataaagtttttgtaaaaccttataaaaacttatttttaattgctacattatttctcatataaatatggacatatgttatcatgtagcaagcccttccctccttccttccttcctgccttccttcctttccttccttccttttctttcttcctttctttctttctctttctctctcttcctttctttctctctctttctctctctctttctttttcttttttttttcttgagatagggtctcattctgttgcccaggctggagtgcagtggtgcgatcatggctcactgcagccccaacctcctgggctcaagtgatcctcccaccttagcctcctgagtagctgggattacagctgcatgacacaacacccagctaattttgtattgtttgtagagacggggtctcactatgttgccaccgaggatggtctcaaactcctaggctcaaataattcttctgcctcagcctccccaggtgctggggttataggtgtgagccactgtgcctggctattcttttattatttatttagttcagtatgacaaatatacctaattatcaattaaatgtttgtttaatacttgaatttcctctggatgtgacagatacctctaaaactttgaagactgatataagtacattagtaatttaatatttcaggaacagaaattttgctgaaatatcagttacatatgcgtaagtttaaaagtactacagtaacacaaagtggtcagcacagaaaaaagcatttcaaggattaagacttaccattttgtgctttaggaagaaggggtattaggtccaggagatacaagaaattagtcattagaaatattattggccgggcgaggtggctcacgactgtaatccccgcactttgggaggccgaggcgggaggatcacctgaggttaggagtttgagactagcctggacaacatgatgaaaccccgtctctctactaaaaatgcaaaaacctagtcgggcctgatggcgggcgcctgtaatcccagctactcgggaggctgaggcggaagaatcgcttgaacctggcgggcggaggtcgcagtgagctaagattacgccaccgcactctagcctgggcaacaagagcgaaactccgaaaaagaaaaagaaggaagggaggaagggagggagggagggagggggagggagacagattttcctggatgagataaagatttttcactggatttattttcagaggcttagtaaaatattctccccaaactattttacttcccatgttctaattctatgctcaccaaaaaaattttataatcgacaactacatgtctcaattatatttatctgtggaatgattaaggaaaaggaatatgcttatatctaaaaccagatactcccattataaatcaataaattggcattcttacttctattgtagccttatttgaatgtaacacttgaccatccatcaacatgtgtgtgaaaattttggttgatatatgaaacattcagaatttgaatcagatgaacccaatgaaaagccctcagggaaaaaatgattgtattgacattgtatagttggcaatcaggtaacaattcgaatgagacagtgatatccattggggtctggcttcttagagagcattacctgttccgttctctgtaacaagagcatgcactttgaggaaactccagtatccttaccgatttaactcaaaagcacctgtgttaatgaacttggagacacagccatctttccccaactgaaaagaacaataaaaaaaagttatattttaaaggaagactgtaagaaatacctatataatataatagggaaaatgtgtgacctcactgaagcaactttaagaatattgtattacccaagttttagttttttaaaataatccattgtgtttctataattatattttcagttcatgtatttacctataactatttattttttaataaatattaactcttacaatattgtgttttaaaaaactcttcatggtgacattattttgttattatacaagataataaacacatccatcactagtcacgtattcacacatgatatttgcaattttggtaatttcagccatattcttttacagttttgaaactgagttttatattatttagttaccatgccttggacatttatgggactatttacacagcagttaggaacacaggctttacagtcaaacaccagaatttgaaccctggctttaccacttattacttcatacaaaatgaaatcttaataaagagcttgtagaactgtattacattagacaataactggaaagtgtttatttagcacagggcctggcacttagtaaacattcagtaggtagtagatttttaaattagattcctttacatttctctcagtgtctagtcaagtgacaatgtctcactaagtgaaatttttaaagtgtcacaattagtaaccaaaattaaacaggatgaattgtcaaatatttttaaaatgtgggataaattgtgctcataggttcctggactttaatattggggaaaaactgatttcttattctactccttcatcttatgatgatatgaggaaatctagtcctcaagatgtgggtgagatgtcaaaatcctgtgctacttcagggggtccttgaaactataagaaggtctagaaccatttccagaagcttaaagatctagaaaaatttccactatactaaaggtgaataatgagataaattatttagtccacactcctgctttacatgtgcatttgattattttaacttttattttaggttcaagggtgcctgtgcaggtttgttatataggtaaattgtgtgtcatgggggtttggtgtacagattatttcactatccaggtaataagcatagtatccaataggtagtttttttgatcctcaccccttcccaccctacatgtacattttaaatttccagagctctcaaatctcctgaagggcatcctataatatagccaccttcgataatgcattctgggatctacctaccctgtgcactcggcttatattggtttagtctcttctagagtgtgcatctttaaagattatgactgcttcataaagtgcaaaacccatgaggatagtacctgatctgtcttgctcaacaatgaagcttctaaataaaattattcttgcatattaaaagacctcaatatttatctgttgaatgaatttgtggagaaaatttttgtatccctgatatccctaaagatacagccccactagttatttaaatatttatatgacttggttggggtgcagtggctgacacctgtaaccccagcactttgggaga

SEQ ID NO: 6966 - DNA, 18878 bp, Homo sapiens
cacaaattccctgctttcaccaattaaccactgaattgctattttttcctttggtttttacttttggccacatagctaggtttctggttcccccacagtaggtgttttcacataagattagggtcctcttggaaagaatagttgccatgtttacagggtagttgtggtaagaatctagtttattttacatgtgactaattggtctgtgctgcatggttatatactcctggattatagattagaagtctccgaagtcacctctgtgaaaagcaagctatcattaaacatgtctgtttatcaatcaatcaataaataaaatattgtttatttggggatacatgctgaaaatcattttattgatggggtacaaaataaaaaaaaaaagcagagactactgaattagaaatatacattttttcaggcacagatggaacatttacaaccacatactaggccatagagcaaatctcaaacaaatgccagaggattcatatgtattcattttctacagctgctacaacaaattaccacaaacttagtggttgaaaacaacccaaatgtattatgttacagctctacaggtcagaagtctaaaacaggcctcaccaggctacaatcagtgatggcaggtacagctgcccctggaggctgaagggtcaaatccatctccttgccccttccagcttctagaagccgcccacatactgaggctcatggccttcttcttccaacttcaaagtcagcaacatcttgatccttctcatgcagctgcctctctggcgctgtctcctctgcctctttgccacttacaaggatgcttgtgattacactgggtctacctggataatgcagaataatcacccattgcaaggccaaccttgattccatctgcagccttaactcccctttgccatattaacatgcagttcaggggcgcagatgtcctcgggggaccaacgtgctgcctgccatgctacacagacagagtgctcgggccacaataaatttaaaattaaaataataaacaacaaaaagttaagccccacagatctggaaaatttgtaatgcatttataaatgaaatataggtaaaaataaataataacgggaaaagcaaatcaacaataatgaaaaaaacaatatagcaaagctgatgagatgtagctaaagtagatcttcaagggaagtttatagccttaaatgcatatattagaaaataagaaatttctaaattaattaagcatccaatacattagaaaaagaatggcaaagtatgccgggtgcagtggctcacatctgtaatcccagcactttgagaggccaaggtaggtggatcacttgagctcaagagttcgagacaagcctgaccaacatggtgaaaccacgtctctactaacaatacaaaaattagccaggtgtggtggcgcacacctgtaatcccagctactaaggaggctgaggcaggagaatcacttgacctcaggaggaggaggttgcagtgagccaagatcatgccactgcactccagcctgggcaacagagcaagacagcctaaaaaaaataataataataacagtgaaacagctacacacaagcaaatcaagttctaccaggctttcaaggaacagattatccctattgtatataatctgtatataaaaaaataaaaaatagcacttaaaaaacaagtggtcaaagcaaggaaaatagaatcgtgtcacagaaaccaagggaagtaataattctcatgtaggtggagagctgccagatcccacatatctctgttaaactttgcttcctggatgaggcactccctaccccttaaatccccctattaggggtatagacacctatattgcaccccaactctctccttcatagcaataatgaccattactaactaattttaattttgttttgttttttgggttttgtgagatgaggtcttgctctatctcccaggcttgagtgcactggcatgatcatggctcactgcaacctcgaccccctgggctcaagtgatcctcccacctcagccttccgagtggctgggaccacaggcacgtgccaccacacccagttaatttatttttattatgtgtagagacggggtgtcactctgttgcccaggctggtcttaaactcctaggctcaagcaatccttccgcctcggcctcccaacgtgactgggattccaggtgtgagccgcctcacctggccaattttacatttgtctttgagattatatgatcgatgtctgactctcacactggtgtgtcaactccgtcagggcagaaaccacatatttgtctgtttgtttttcatctttgtgccccattacttggctggttcctaacacaaaatgaatgtgcaaaaaacgcttgtcaaatgaatgaggaggtctaaggggccttgagccctctgacgtttccattttataattgtggacagagccgctacagcacaaagctgagctggaccatccaatgtttagccagtgccttacgtgctaggagacactgggagctgtgctgggcttctgaggagtgggcagaggctggaaatacccatagttggtcagtctcctgtgtcacccagactggggaggtgcagaaatgaaaattacagagctgcgaggacccagaacctcattaatgagcttaactcactgtcctgaccaggtggcctctcaaagccttgctgggaaggaggctttaaggtggtgggggcagcagtgctggtggtggtcatcgaagaaagtgggagtcggggaggaagcaatggggagcaggggacaaagagggccagacaaactcagagcttcaggtgatgagactcaggaagcctaagtcaggaacagtgattgcggacatctttgtcccataacagaacttcctcctaaggaaaggtcttgcagagactggtcctgctgagcgctttaacaggttattgattcataaaaattggagaaaaaagacaaagtctgccacacctaacagccttctgtttagagctggtttagaggaaactttaagcaagtcttgtgtccaacaatttgggcctgaggcagggtacaggtaagggaacagacaggagacacggaggcaagaacaagactttagctgaaagagaaatcagagccagaggcagccacaagaacacccaacctactggaactcatgcaggtggacagcctgcccaggacttgccctgagtgggaagcaaagagcatcttatctagattttaaggagcagggtgcccctggctgacatctaggctacagtcactgggccaggtggagggttggtcaggccctctcaaaagtcatgagaggccaggcacagtggctcacgcttgtaatcccaacactttgggaggccgaggagggcagatcacttgaggccaggagtttgagaccagcctggccaacatagtgaaaccccgtctctactaaaaatacaaaaaattagccgggtatggtggccggtgcctataatcccagctacttgggaggctgatgtataagaatcgcttgaacctgggaggcaaaggttgcagtgagctgagatcatgccactgcactccagcctgggcaacagtgagagaccctttctcaaaaaaaaaaaaaaaaaaagaaccaaaaaaagtcatgagagtcctcagagttctcaagaagggctgctgtgggcctgtttctggaaaggaaagaaaagcagggagctgttgagaaaataccatatgtttttatgccccagccaggcatgggggagaggctgaccccaaaagagaaagtggttgtgtgagatttcaaggaagatgtcagcgggctgcatcccagggcctctagacaaaaggaagggcccagccaggcatggtggctcgtgcctgtaatcctagcactttgggaggccgaggcaggcagatcacctgaggctaggtgttctggtccagcctggccaacatgacaaaaccccatctctactaaaaatacaaaaaataagctgggcgcggtggctctcccctgtaatcccagccaaggtgggcggatcaacttgaggccagcctgaccaacgtggcaaaactccatctctactaaaaatacaaaaattagctgagcgtggtggcacgcacctgtcatcccagttactcaggaggctgaggcgtgagaatggcttgagcctgggagacagaggttgcagtgagctgagattgcatcattgcactctagcctgggtgacagagtgaaatggagggaggaaaaaaaaaaaaaaggaaggtcccgtccagggagccagcctaggatggggaaggctcaccagaagtggatgcaaagagtgctggagatgagctcattctatttgcctaggaaagaaaaacgtccagaaacctggccttcctcctcttggccgaggccctccaggaaagccaggcagaccctgctcctgctctgaccccctggagaagtgatatgtagaaaagaggagatgggctttggcccagaggacagcagcgttaggctagtgagcagttcccagtcggttcaaggttgctaggctcagcgaactgcaagtccctgttcgacaagtttcttcctaaaggtccccagttcctcatgattcttctgagggtctcatccaccctcccagggcctgcagtcagctagccaccccactgccccatgcctgcagtgaagacatttaccacaacctggaaatggctggtgacagaaaagtcctcagggccacagcactctctgcggtgggaattcaggtgccttgcctgatggtgacaaggctggttttgcataaacagctctctgaatcacacccagatgtggcttctgacttgagtggacccccatgaagagctgcagagggggctgggaaaagacaagagaatggagaaaatgaggagaaaggaaactacagagtgagatagagaacagatctgacaggtgtgaccacagcagtgtgacatttatgaacagtgtggaaacaacggcaaagcccctgaattaaaaacttcctggggaaataagccactccacatatcggttgctgaggaaagagtggaggaggctgttgacccgtgtgtgtccccatgactcaaagagggaaaagtctagctgtttccaatatcccgaaatcagtcttgctgggagaactgggaaaataaaaaagagatgacccccgtaggaagctacctttaatcccaagtgcccaaggctaggagagaagatgctccaggcgatccaggacaccagtgactgacacagccagaggtgggaaaggggaggataaagatggcacaaaagtgaggagtgagcaagggtctgagagggaaggccatgtgggcagtaggtggcacccacatcagagactgacatgaggattaaaggagagcataggtgatcggtcagagtgtgacagaagagaggcagctctacaccccttgcttgcaattctgagcattctgtagcaaactcgtttggccatcaaaccagacctcaattgagacaaggctatttaagcttcctcccagttggtgtaaatattcaatagttttgctgcagaaatgttgcgtttgattatgagactaccccaactccccaagggtgttttgtggtgctggtttctgtataaacctgaaaaattctgaattccaaaacttatctgacccccaaagtttcagataagagcttgtggacctgtgctcaattctggttctccttccttctttcaactgttgtctgtgaaaggagggatgcaggtatgggagacaggagtcctgcgaattcgtctgtaaactgtggacgggggggtgggtgggggggggtaacgtgggcacctttgtgcacaagtgcatgaataggaggggtgagcaactgtgtgtccatcacctttttgtcaaagaagcaggagtcagtgggctacgtgcttcatgagcaggagaggcggaaactaaggaaggctcatgtgttggaggaagcatgtttgaagagcagcaggtctcacagagtttgctctttaatactctccccagcacacggaaggggaagggggtggaggttgctgctatgagagagaaaaaaaaaacagccacaatagagattctgccttcaaaggttggcttgccacctgaagcagccactgcccagggggtgcaaagaagagacagcagygcccagcttggaggtgctaactccagaggccagcatcagcaactgggcacagaaaggagccgcctgggcagggaccatggcacggccacatccctggtggctgtgygttctggggaccctggtggggctctcagctactccagcccccaagagctgcccagagaggcactactgggctcagggaaagctgtgctgccagatgtgtgagccaggtaagagggggccttggtaagggccaggtgastggcgaaagagagaggactggggttaatacagtaaataggcgcagggtgagactgagctcaagcaaggagggaaatcctgcagctgtggggaggcaccaccttgaagagggcagagaaccagcccttctcaggccttgatcccttaccctctcctcccaggaacattcctcgtgaaggactgtgaccagcatagaaagrctgctcagtgtgatccttgcataccgggggtctccttctctcctgaccaccacacccggccccactgtgagagctgtcggcactgtaactctggtgaggtgggcaagggtgtgtaggtggggacgatggacaagcatctgggggagcaaggctggtgacgggtttgggggtgcaaggaggatgacggggccaaagctttggccttcttcaaggctcacagcaagtggagccaatgctgggaaatgcggcaccctaggtggggcatgaattaacgtgggcagacatctagtattccaggaaagggataaatagaatttgagggattggtgagaacgggtctatggataggatcaagacaataaaatgagagaagtggctctatgaccccagatttcgggcaagcaacccccaaccaataaactgactgtgttcccagagtgcacatgtgcaggttggccattgggaatttggaatacatctttctaaggaaataacaaagcaacccaataggtaacaacctttttttgcacaaaagccaatttgagaaaatgagtatgtatgtagcctgtgtttttattttatagttccaaaaaaaaaggttttttttaaactaagaagtataatatctgcagttgtgcttatgaatgctgttattatttctccatcttcgctacaatttcagaaactacggccagtatacactagaatagcaggctttaaagtggcccctttgaacaaatgttctctagcaagacactttttagaaccaggtaactgtaactattaaactacctacttgcaaaacgtgtttggtgtcactgggtctcttggtactgggttttgttttgtttagtttagagacaaggtctagctctgtcacccaggctggagtgcagtggtgcaatcatagctccccacagccttgaactcctgggctcaagcaatcttctagtctcagcctctgaaagtgccaggattacaggtgtgagctgtagtgcctggtcccgtaaaaacaaaaacaaaaaccaacaccagatgtggtggctcatgcctataatcccagcacttgggaggccaaggcagaagggtatttgcatattttgtagagacttgagcccaggagcttgagaccagctgggcaacatagtgagaccttgtctctaaaaaaattggctggtcatggtagtgcacctgcagtcccagctacttgggaggctgagatgggaagatcacttgagcccaagaggtccccaagaggtccaggctgctcacatcactgcactccagcctgggtaacagagcaaaaccctttttcacacacacacacacacacacacaaaaagccagagcagtggctcacacttgtaatcccagcactttaggaggccaaggcaggcggatcccttgagcccaggagtttaagaacaccctgggcaacatggcaaaaccctgtctctactaaaaatacaaaaagttagccaggcgtggtggcacgaacctgtagtcccagctactcagaaggctgaagtgagaagatcacttgagtccaggaagtggaggctgcagtgagccgtgactgtaccactgcactccagcttgggagacagagtgagcagagtgagaccctgtttccaaaaaaaaaaagaaaacaaaagcttttccattgcaaatcaaccaaaaaggaacgtctttaatacacaagaaatattcttcagtctacttaacttaaaaatgtaactgtaatagatgcttttctcttgacagcggccccggcagggttggaacttttcctagtcaaaacccccctactcactctgcagacccttcctgaaggtcttcgccccatactgagcccatcttcagtcccttcacttgttccaaactagcccaatccatgacccttctctgggagctcagccaatagatcccaaagtaccacagcagcacctggctgcagaaggacccccgggaaatgcagtcaggggtgagaagatgggtgggctgaatgagctcggccctctctgggccttagtgctggcatctatgagatgaggacatgcctgaagtcagcctggaatkttgagcccaggttatacctggtaaatagaactcccaggtctccggatactcaccactaaaacaatagcacctcattgtttttgttttgttttgttttgttttttaattatactttaagttctagggtacatgtacacaatgtgcaggtttgttacataggtatacatgtgccatgttggtgtgctgcacccattaactcatcatttacattaggtatatctcctaatgctatccctcctccctccccacaccccacgacaggccccagtgtgtgatgttccccttcctgtgtccaagtgttctcattgttcaattcccacctacgagtgagaacacattgtttttaaccctccccagcagcttctttaacccctccatttcccttttggcggagacccttgtcatcactcctctctaccaccagtgctctcccctcctgcactgtcccaggcttcctcattcttcccttgcaggtccttatccawcatggctcacaattcctgggaagccacaaggaaaccaaattctagtagcaactcagagtcagcattcattagcaggtcacagggccataaggatgccaagaaggaatttgtccctctccttgtcctgacaaaaggcataagtagaagaaaattgttaggtttggttatgacctttgacattctctctttgacatcctccctttctgcacccctcttccacctgtcagggcacctagggctccccgggtccccacaagtgtctgccctaaggcccaccaggctttcttgcagcctgtccracatctgggtgtcactgccttcctctgaatcaccctcctytcaaaccagccgccagcgagcccagcccagcccayctagtgccctaccacacccgcccccaggataattaacacccagccacccagcatcggacctctacacttgagcaaaatgtatattttaaaggcaaattctcacgcctrtaatcccagcactttgggaggccaaggcgggyggatcacgaggtcaggagattgagaccatcctggcyaacacrgtgaaaccccrtctctactaaaaatacaaaaaattagccaggtgtggtggcacacacctgtaatcccagctactagggaggctgaggcaggagaatcacttgaactcaggaggcggaggttgcactgagccgagatcgtgccactgcactccaacctgggcgacaaagcaagactctgtcaaaaaacaaacaaacaaaataaaggctaagtaactgtaatcaagtaactatttattatttatttattttagtgtatccacaggttgtgcagccatcaacactatctaattctataacattttcgttaccccagagraacttgtaccccttagcaatgactccccatttcttccccccaaccaaccccagccccagccccagcccctgggaatccctaatatactttgttttgttttttgttggtggtgtttgagacaggatctcactctgtcacccaggctggagcgcagtatcatgatctcagctcactgtaacctccacctcccgggctcaagcgatcctcccacctcagcctccccagtagcttgggcctacaggtgtgcaccaccacacccagctaatttttgtattttttgtagagacggggtttcaccatgttggccaggctggtctcaaactcctgagctcaagcaatccacccacctcaacctcccaaagtgctgggattacaggcgtaagccactgcacctggctattttctttctttcttttcttttttttttttttttgagacggagtttcactctgttgcccaggctggagtgcagtggcgtgatctcggctcactgcaacttccacctcccgggttcaagcaattccctgcctcacccggctattttatatttgttgatctgctgctggttatgcctgtgagccaaatttgtacaaattcttaagctttacaatcatgcgtgcctctctgtacgtatattatactttaattaaaagttattaaagtattggggccgagcacagtggctcacgcctgtaatcccaacactttgggaggctgaggctggtgcatcacctgaggtcaggagtttaataccagcctggccaatacagtaaaaccccgtctctactaaaaatacaaaaaattagccgggtgtggtggcgcacacctgtaatcccagctacttgggaggctgaggcaggagaattgcttgaacccgggaggcagaggttgcaacgagccaaggtcacgccattgcactccagcctcggcaacaagagcgagactccatctcaaaaaaataaataaaaaataaaaaatgtatcagggagtacaagagaaagtcatataagctctttctacttttcatggtttctatgtctgaacccatgaatcttccttctgaaaggtccaactttcttctttaataacaataataatggcaaaggcattgggggaccgtgagcaaagggcaggcctttgcaggggtgggaatggaaagggaagcacgtccctagaggtgggcmtgggatgggggttgggggatgaagcaagtggaccttgaaggtctccacaggtctgagtgtcctatgctccctgggcctctcytcccccaggtcttctcgttcgcaactgcaccatcactgccaatgctgagtgtgcctgtcgcaatggctggcagtgcagggacaaggagtgcaccgagtgtgatcctcttccaaacccttcgctgaccgctcggtcgtctcaggccctgagcccacaccctcagcccacccacttaccttatgtcagtggtaagttccaggcaactctctgtgccatcacgtggggtagcggtgataccccaaccagtactccccactcctacccctagataaggtcagcctgtttctgccttcccatcccatccagcacctctcaggccttcagakgtgccctatggggtcccctgctgctactcattctgtctctgtttttccagagatgctggaggccaggacagctgggcacatgcagactctggctgacttcaggcagctgcctgcccggactctctctacccactggccacgtgagttttctccttaatccccaccgctagagagaatgcatacacgaggggccaggagggaagccagacagaaagctcctaggattagggataagaggaggggaaaaagcagagtccactgtttaggagaggagttggccaacggtggcgggtgggatagaataaggtgggggaaaggggagaggcaaggtgacaggagggctgggctgagggagccaagggctagaccctcccctaacccctgtgtgtcccctcctattacagcccaaagatccctgtgcagctccgattttattcgcatccttgtgatcttctctggaatgttccttgttttcaccctggccggggccctgttcctccatcaacgaaggaaatatagatcaagtaagagacagaacacaggcctccggtcctgcccctgcaccacaccccactggctcaaccccactgcccacgcctggaatctcactgaaacccaccagctccacttcaccagccttggtcctaccccttctctccccttagctggcgtgctcctgacacccctcccccaagcgcacccgcctctacccatctccttctcccgtctccccctgcccccactgctggccaagactcatcggatctccttctgcagacaaaggagaaagtcctgtggagcctgcagagccttgtcrttacagctgccccagggaggaggagggcagcaccatccccatccaggaggattaccgaaaaccggagcctgcctgctccccctgagccagcacctgcggkagctgcactacagccctggcctccacccccaccccgccgaccatccaagggagagtgagacctggcagccacaactgcagtcccatcctcttgtcagggccctttcctgtgtacacgtgacagagtgccttttcgagactggcagggacgaggacaaatatggatgaggtggagagtgggaagcaggagcccagccagctgcgcctgcgctgcaggagggcgggggctctggttgtaaaacacacttcctgctgcgaaagacccacatgctacaagacgggcaaaataaagtgacagatgaccaccctgcagctctccagcttcctctctgaaatcccagtcccaaaatccagtttcctggccgcctcctggctcaggtcaggatctggcagaggaggtttctcagccggttatgttggggcctgcttaagggcgggggtgagaaaggtccccaggctactgtggatcctgtgtctgacttcagatccccttttcccacagttatagctccacttttttgggacaggtggggagcaaaagggtgcagaggtcaggtcttgaaatcaccaggggatttccgggtgaggtgggtggtgagaaaggaaacagcaagcagggctctggcagctgctgcagacggcttcacacagggacgcgggctgccatcttgctctaagtgaaagtgaaagaaaagtcggcagcagagggaacagggaagaaacctaaaggctgcaggctgccaggtgtgcttggagagcccccttcttccgccgggcctcgcaagcagcgtaggactgtggagaagggcggtgggcaaggagggaactcgagagcagcctccatgggcacacaggagggctggtgcctgctgctctgcctggctctatctggagcagcagaaaccagtgagtctgggagtcggggagagctggctgggagaagagctactgaagccccagggtgccaccctccccgagattccagaagagcaaaggggccggggatgaccccatcgccttctaagcccaacgggaaaggctcagcggctggcaaaggaaggaaccaatagtgtgtgtggagggagggtggggactccacagggaaaatgctaaagaggggctgcctctgtggctgtggtcaggagccactgtcctacagagagggcactggcctgggagctgacacttcagaagaggaaaggactccccaggtgaggaaatcacttggaaggtgaccttgaaggcgggggaggggaaggctacccgaaatgggagaaagcagtgcaggctgtcagtgccccagcaacagtaactgtccagtctcctctctctgcggtggcacttgcttgttttctgagaattcctttgactgaaaagatagtcttttattcaacagttggaaatgcaagcataaactcctctgagcaaggcaaatccaggactttaactctcaccaagaagtatttgcctggactagcaggtgctctccagaaagctggtttggggatgacgggagaatagagggacacagaaacagctaggatcttggatggcaacttttaccctttgatgactccacagcttgagggcgggggcaggaagcaagtgtggagtagctttctggggaaggcggtgctcaccccagcctttgtctgcagagccccacccagcagaggggcagtggcgggcagtggacgtggtcctagactgcttcctggcgaaggacggtgcgcaccgtggagctctcgccagcagtgaggacagggcaagggcctcccttgtgctgaagcaggtgccagtgctggacgatggctccctggaggacttcaccgatttccaagggggcacactggcccaagatgacccacctattatctttgaggcctcaggtaaaagccttccacctgtgtccttggtcctcccgggctccctccaccaggacagcccaggtcccgattacagccacacatactgcctcccgttggccctggtgttctcacgctaatttgccctctgtgtgtgccctgcttctccccagtggacctggtccagattccccaggccgaggccttgctccatgctgactgcagtgggaaggaggtgacctgtgagatctcccgctactttctccagatgacagagaccactgttaagacagcagcttggttcatggccaacatgcaggtctctggagggggacctagcatctccttggtgatgaagactcccagggtcaccaagaatgaggcgctctggcacccgacgctgaacttgccactgagcccccaggggactgtgcgaactgcaggtaagaaaatgaaaagcaaggccaggtgtggtggctcacgcctgtaattccagaattttgggataccgaggtcggtggatcacctgaggtcaggagtttgagatcagcctggtcaacacggtgaaaccccgtctctactaataccaaaattagccgggcatggtggcgggtgcctgtaatcccagctacgagggaggctgaggcaggagaatcgcttgaacccggaaggcagaggttgcggtgagccgagatcacaccatggcacttcagcctgggcaacaagagcgaaactccatctcaaaaaaaaaaaagaaaagaaaagaaaagcaagtcacagaaagttttgcttttctaaagtggtaagatatggggcacagaagaagaaagggaacaaatccacctccatccacactggtcacctcagggcacccctaggccttggtcctttcttcctaaaaacccctgagtcaggccaggtgcgaaggcccatgcctgtaatcccagcactttgggaggccaaggcaggtggatcacctgaggtcaggagttcaagaccagcctggccaacatggtgaaaccccctctctactaaaatacagaaattagccgggcatgatggcaggtgcctgtaatcccagctactcaggagactgagacgggagaatcacttgaacctgagagacggtggttgcagtgagccgagattgcgccactgcactccagcctgggcagctgagtgagacaccgtctcaaaaacaacaacaacaacaaaaaccctgagtccacaagagaatgcttcgcagcccctacctgaacgtccccaggcacacagacaacctgtgttatttccaaaatggagatcgttctcatctcactgggctgccatgaggaaataagacacatgatgctattctgtacatgggtgctgtccactgtagtcttatcgagccaaaacccggttttctcccagtgaaatgctaggctgctctggtgcttcaggggtaaagctcagggatgcatcatttgttcatgatcttattagtaaacccagtacttgccctctccagctcagcacatcctcgagggcacaagaaattgagaacatgatgacagggttccccagagcccattaatccaatactctgtgccctgcttctttgagtctccaagaagaaacagccaagtccagagaaaattaggggcaaccgtcctatccttggaaaaccccagaacactctaacctctctgtggtccaacctaaatctatcctgacccattagaaaaaggtcttcatgtctgtccagtgtctaccatactcctggcatgcgtaggtatttctctctttttattccaaacctacaaaaaaaggtgaaataataatataatgaacacctatataccctacacctagatccaccagttgttaacaatttgccacattctctctcccccgactcctcatgtgtgtatatgtgtacgtgtgtattttcctctgaactgagagtaagttgcagaagataacacttgaaccccaaacgcatgtttgaaccccgaaacgcatgtttaaaccccaaatacatccatagcatgtattagtttacaatgaaggacaaggatgtaatccttcatagttacaaagccatcatgtcagaaacaaaccaaagtggggaagtagtctacccgtagcgcaggcaataagggagtgcagactgtaaaatatttcagaacaaaaataaaatcagctaaaagtcagatggctttatagtctcaccatctcccgacactggcaattctgaatattatcagtgataaaatactcctctctgctagggcagactgtccctatctccccacacgactgcctagtatgccacagatcttcatacttttagatattttttaattgatatgataatagtctcaactataaagtccagggcatggtggtgcacacctgtagtccagctactcaggagactgaggcaggaggattgcttgagcccaggagtttgagtcctgtctgggcaacatagagagcgagaccctctttttttttttttttttttaacagtctcattctgtctcccaggctggagtgcagtggcatgatcttggctcactgcaacctctgcctcccaggttcaagtgattcttgtgcctcagtctcccaagtagctgggattatagacgcccgccaccacaccagctaatttttgtatttttagtagagatggggtttcaccatattggccaggctggtcttgaactcctgacctcaggtgatccacccatctcggcctcccaaagtgttgggattacaggcgtgagccactgtgcccaacctaagacccttctctttaaaaaataattaaatgtctccaaattcaaatttctccacttgtcccaatatttttttttttactgctttttctaagtacacaattcaaacaagaatcatgcagtgcatttagttgtgctgttccttgttttaatctagaacatgtttcatagaattgacatttttgaagggtccaggctagtggtcttgtagagtatcccaacatttagatttgtctgattgttttcctcatttcctcatgactggatttaggttaagcatgtttggcacagatactactatcacatgcttttttttttttttttcgatatggagttttactcttattgcccaggctggagtgcaatggctcgatcttggctcaccacaacctccgcctcctgggttcaagtgattctccacctgagcctcccaagtagctgggattacaggcatgcgccacgacacccagctaatttttgtatttttagtagagacggggtttctccatgttggtcaggctggtctcaaactcccaacctcaggtgatccacccgcctgggcttcccaataccacgtgtgtttttttgttttgttttgttttttacattttttttgagacggagtttcactcgtcgcccagactggagtgcaatggcgcgatcttggctcactgcaacctccacctcccggattcaagcaattctcctgtctcagcctcccaagtagctggaattacaggcacctgccaccatgcccggctaatttttgtgtttttagtagagacagggttttaccatgttggccaggctggtctcaaactcctgacctcaggtgatccacccacctcggccccccaaagtgctgggattaccggcatgagccaccgcacccagccaccacgtactttttaaactattgtttctagtcttcacagcatccttgcttaagcaggtgagcttggtaacaccaagtgacttgtcaaaggtcacggagccagtaagtggaacaaccagggtttcagagctttttctgctactctagtagttcttacctgaagattgatggtaactcttaattttgcatgtgtatttttcctggtgggagatccatagctttcactaaattatcctagagtaagtgatcccaaaatggtgatggccatcatgtgtaccatgctacctttccagagccccatttctttgtggttccatgtgatggaaaataagctcaaccggcctgtcaggcgaggaagaggcaggtgtatgcccacaacatgcccacagcttggagatcaggtgacctcaaggaggaagtagcccacaaatcacccctcttttcctcttcacagtggagttccaggtgatgacacagacccaatccctgagcttcctgctggggtcctcagcctccttggactgtggcttctccatggcaccgggcttggacctcatcagtgtggagtggcgactgcagcacaagggcaggggtcagttggtgtacagctggaccgcagggcaggggcaggctgtgcggaagggcgctaccctggagcctgcacaactgggcatggccagggatgcctccctcaccctgcccggcctcactatacaggacgaggggacctacatttgccagatcaccacctctctgtaccgagctca

SEQ ID NO: 6967 - DNA, 142947 bp, Homo sapiens
  misc_feature (1)...(142947): n = A,T,C or G, or insertion/deletion polymorphism (see Tables 1-2)
gggcccactgcagcaaaaggaggtttttccagcttgctgggctgggtcctgagccttacagggtgggaaccttggctccacacaaagagagtctctcctttgagagaggcacacatttctgtgtcctccagcactcattagcttcatggccctaagcaagggaaggagatgaaaatattttatccccaacatatatttctttgacgtattcttaaatggctgccacttgcccatcctgaaagaagtggctagcagagtgtcttcagtgggaaaatttgcatctgtagagaatctccattaatgcagccaggccccctcccctttccagatctttccccacatccaggagagactgagaatccacacctttaaaagtctctttgagggaggcttcatctacataacaaggtcactttcactagccaagcctctcctccttccatagcctgtttcaccagaatctaagccccattctttctgtaacctcaaaatggtatataagtctctgttactcactgggaagctggaccatcattctgaaggctcccatgcatgcaccttaagtacatgtgtatgacttttctcctattaatcaatctgcctcatgtctgtgatttttagtgaaactttaaggggccaagagcctatggctcccacaaaagtcacttggtctctctggttctcagagccaacaccgcaagaagacctgtttttcctgagctccaggatcactcacagaattccactgcagatctcaacactgtgcttgcgccctatcccctttaccagactttcattcattttgatgaatttaatcgttttgacatcacatctacaggaaactgcatgagtacctaaggggtgtctgaaagacagctgtggcagcagcaaactgcaagggggaacacgcacacccaacaggagaggaaagggagccatctctctatttggagcattttcctggaacagccttttgcattgaatctccaagtgcactgggtggggcctttgagaatctctgctggagtatttttcagtcttttataaacagcacaaccttatcttgaaattagatcctaggtagaagcccaatacacaaatggattaaagcgaggctgcatgggtggcagcaggagtcaggagaggatgggctggggctggcctgccacccaggctcaggctcaaaaaaccacagagtgacagatgcagctggacaggccaagtcggccagcaggctctcccctcccccaagccgtgccattctgctgggaaagtacagctttctttgtctgggcccgttcccctcccccaggtcccaggacatagctcaggcctccacgcctgtttcccaggctggaggacactctgtccccaaccagagtgatcagctgcagccagggctgtctgtaccccagaggaggccccctaggcggcatgccagccatggctacctgtcccagtgaacaagcagtgagttgttctccctttccacttcagcagctgctctgccagccgtgcagagagagacagtctgctgtcactactgagggacaaaggccgccgagggctttagagctgctaggcatgggccgtctttccttttttgtgtttgtggggaaagttattacagaagaaggtgactgtgattctttcagtcacccccggggcccaattcctacaggccagtggcaaaaggaacagaagatgccgagtgaagtgaggctttcgtgacacgaaattgagtccacttgaaagccttttattttaagactgtgctgcctgcttttccttctgacagtgtcccttcttacataaaacatggccaacacagatgtggtgtcctcacttggcaaaagggaaaacgtacaggcatccaaattaaaatgttctaagcatatctgtgaagtctgagagcttggttacctctgttttcacatttcctgaaattgtgatttttattttcttatttcagcgtgatttaaatcaaataggtcataacgaaagtgacctgggaagcaaaagaaaggaggacaagtgtgtggggcacagctgggagcctgagctgctcccgctggtggaggacagcaagtgcaggccacagagcaggtgcaggccacgctgacggcattcctggggggactaagttcctgactgcagtctgtggctaccacattcgaattgccagccacaacggcagcagggcacagaggacaatgaagctttaaaaggcccctcccagcacctgttcgccagcaaatggcaggagcctggccagtgaagaagttgcagcgtctgccgaaaccaggtgcctctgagggggtaccctcagccaagcatttttgtggtgagagccggctgtctggttgtagatggcaggcggcgactcagcagctgctgctcccacctccttccacactgctgtcccctcctgctgcccagttccaatcaccagacccctcctctccactcccgccatcatccctctggctcaactcactcctccctgccccagaagactctgcactgtccaggtggaggtgatggagaccaggggagtccaggagaggcgggcacagagctcccctccacctccactcccgccttgccctggactgaccacacaggcccagctcacctttactccccgctgcggttctggcctctcactgacaggtctctctgagtccagtccagcatccaggcctccctgatacagctccccttcctctgagagcctggccctgagcagccatgtagatcgcagaccagccttcccagtgggcaagacttctggcttctgcccttgtttcaaggcaaagcaatttgggacaagaaaaccatttccagtcctcctgctccccccttacaccttaaacatacattctctgctcctggaaccccctgaaccactcctcaacttccccaccaaccaggctcacctctagcctatggaagagaagatccacagaaacaaagatcttcttagctatggttttcgggccaaacgtgctcaaaatgggcactgtccaatatcccgattgcctggggctgggagtgcaatgcagaggggcagacccctctgggtgcctgctgctgcagggctgctctggaggctctctacggctgccctcacctgtgctgtccactgccccaggcctgtgtgccacatgtcactgctggggacataagggccctgtgagacaaaagggtcccagaatcttttgggtcatagagtcctttggagtctcttgaaagcttagtgcactctccccagaaaatgcatgtatgtgcatgttgttgcaatctgcatccacgtgcaaacacacacacaatttgcatatcactgcagggagatgagacagctcttgtccatgtactcccagatccccagatcttaggtttagaatctctgctgaaacctgtcacagcaagaaagaggaggcagaggaacgttgtagagccttgcatgtgagttttgctgtggcattaacttggcctgtgatcctagcgtgttgcgccgtctcttgggcatcagtttagccagagctgttgtggcagctgatagagagtcttcagggctcttcccagcactgcagctatggggctcaatgacaccccacccctgcttcccaaggtcaggcagggcaaagggagggggttccgggcctcttcctcaacagtatatcctagggcagaaggtgggacagccagaaaaggagaccccgggaactacaagtttctcttttacaaaaataagaaaactgttgaagctttaggaagtgcagccacttcttatttgattttctttattttaaaacaatttccccaaacatactctgtgagagaataaccacctagcctttgcaaggctctgggtttaaagctctgctctgtgactgcctggctctgttaccttaagcaagtccagttccctctctgaaccttgggctcctcatcaattaaataactataatcctcgatgacttctgtgaagacgaatgaggagacctgtaagatgggccttgtgttgggctcacccataatgaaaagaggctcccattactattcttattgacactgggagttgggggctctggagagactgtggagccccagagatgggaatgtgaggcctgcctgcaggagtggccatgaatgaggagagagtctgagctgacacctgaaaccaggccccagaccccaggggcccagggcagagggctttctggcagatcccctagttaggtctcccctttgaggctttgcacttccagaatctgaactctgacacacacccaagtttcgttcatgttctttgttatctgtcatggtccacttggtcctgacccagggcgaccctggaccttgattctgttctcgacctccaggctacccactggagcttcatggtggaaatacaacccaatctcctgagtttcagacagacactttaatctgtagcatcaacctttttgttgtcaaatcaccagcactacacactgagagaattatggctagaactaatgacaacagccttcacatacactgacaaagtgctgaaacagcccatgacaatttccggccagcatttttttaacctaagtttaatgagtttcatctctcctcttccctcccttcctctttctcctctgaccctctcccttcctgtcttctcccctaacctgctgtcctggcagaagtagctaaggaaccacacagaggaacagaaggcaggatggtctacatttacctgttacttcaccaattcacttctaacttaaaaaaaaatggtttctggcaacaaatcctgattgacaccttagtactgtgggcagttaaactacagcaaagccagcgaggggctcctctgtgagtgcaaagcatagctttggagtctaacctgcttgggttcaaattccagaagcccagcccttatttgctgtgcgaccttatttaattcctatgtgaaatggggctcctgaagctgtccttactgtgttttaagaaagtgctggccctggcctgggcactgattctggtgtgagaggaggcctccctccctccgccgtgccaggttaatgaaaacactgaggcatgttttggaagtgggaagtgcaggatgggaccggagtcaggagcccagaagagcagggcagcaggcaggctgaccttcggagactaagggtgaagagcaagagactcaggggcacaacaagccctgggttcaaatcctggctccatcaccaactcatccggtaaaggtggacaattttataactctttaagcctcagttttcacatctgaaaaggggataacgaaagtaggactctcacttgctgtgaggagtaagaggcatatcgtgttaaagcacttggcccagagcaaggcgagccctctacagacagcgattgtgagacagaccccccctgctgctattatcttggcgttcgatttccatcagtgaaatcagagttgtgccagaggcctctaggctctctccccaactctaggatcagtgcttctaggaaactggttaaggacaaggtgaacaaaaaaggtgtagccagtggccgggctcatctgtcttgctcaggttgtagcccctaaattgcttaacagaggtgccaggcgcagtgccccctctcagcaatgagcccgaggcccgcaatgcgccaggctggcgggggagggaccctgcgcgctgcggccgaagggcacaagtgcccaggcttcagcgtccctgcctggtggcagtcctgggtcggaggggatgctccatggacgcccaagcactctcctgctcgttcatcactcaccgtccagtcatcgcgcagtccagaagccactgcatgtgtcgtgtcctcgcttgcaccggagctgcgcccgcagcgcctgctgaccccaggcttcagctgctcggggccaggcccgcccctcgccccgcccctcgcccctcgccccgccccgctccccgcctctcgcccggcacggccaaaggtgccgccccggtctctccgtcccgccccgagcacgcccctcactccgcaccggccaatggcaccgccccgtccgccccgctctgggaacgccggtaggttccgggtgcagggcggtggcctaggggcggcggggaagatttggggcctgcgacctgccaggtgtccccaggccattgttcagctcgccgcgcgctcccgagttcccgagggcgccccgggacgcgaggagaaagcagcccgactcagccccgagaggttcggtgtgcgggcagcggccagggactttgcggggtagcgcggactcctggacttccaacaagggccgctgcgcaggcgctgcaatcactgcaggcacttgtctgcatgcctggtggggcttggagtctggggaggcttatcagtaaagcccagagcatttgctatttattgctcaaggggcacctttgtacagtctggccgtttgcttggcatggcctcttagaactccttatygtttaagaaatccgatctggtgaataagaagttagtctttctctcccagtcactgcctcctggacgaatatttgccagcacggaggcagagaggacagaaaaccacaagccatttggggaactgggaacagttcagtgtttctggggtgtgggggtgtcaaggtgggggatggggttgatggaaaacatttgcaatttctgctttacctcacgattcccagcyctgacctctggacctgttctctcccacccctaacataaatcattttagtttcattcagtgtgcgtttcctaatatttttagggtctcatggccattttagaatctgatatggatcttctagaaagtgcaggtggccatatgcaccaaaatcagcctgggatttgagtctcatgggtccctgaacttcgacttagaggggctgtgctaatgcttgtatggctgctgtatgacttatgttggaacccccacctgcaaaaagtgacaggactgaagatacccagtccaggggccctcccgtttctgcgtttgcttgaatttttggagaatggcccatcctttgacagctctgaggctccctgtggttggtgacttgtcatgacacatttgctcttccacagccctcatcaaagctgagacaaataatcgggtgcttccaaaggttttttaaaagtgggtaaaattcaatrtaactgtcaacctctgagcatgagatcctaagaatttaatcactcctgataggagaagtaaacatagcaccagggtgacataacagtttccctgggctctccagaactcgagtgtgaatcattctctctgacctaattaatgctgttcacagggccatgactggctctgagtgaggactgggtttgggacagcaaccccatgtgtcctgtgcacccattgtgggctcagacactatgctagtgctttacattggggatcccatgcaattcccccagcactcctgggcagttggtgttactgcttgcattttttaaaatttccatttttattttaaatttaggggatacacgtgcgggtttgttacaattgtacattgtgtggtactgaggtttgggattgatcctgtcacccagatggtgagcatagtacccaataggaagtttttcacccctcgccccgctgtctccctcccacttttgaagtccccagtgtctattgtttttatctttatgtctaggtgaacccgatatttagctcttttgcttgtaagcgagaacatgtggtgtttgcttttctatttctgcattagttcgcttaggataatggcatccagccacatccatcctgctgcaaaggacacgattttattctcttttatggctgtgagtgcttgcattttacatcagacacaggtgtccattgtcagcgtcctcccctcagaaggggagggtccattgtcagacccctcagaaggaggggtcaccttttctttcagggttyagtagaactgggtgtggtctccagctcacttatggtggaggctacagatactgttggttgccagccaatgtccatttccttctttggaaaaaagaaagagagataggaaagaaggaaaaggacaaaaaggaaggaaggaaggaagaaagggaaagagggagggaggaaggaaggaaggacggaaggaaggaaggaaagaaggaaaggagggaaggaaggaaggaaaggagggaaggaaggagggagggaggaaagagggaatggggaagagaggaaagagagagggagggagggaaggaaaggagagagaaatacccacttgtctgtagcagcaacatgccagcccctagttatggctcatgcccacttgtatttttcatactctacttacaacccaatagtgggtcatgaaattaatttagttgatgatgtgactagtacttcaaaaatgcaagggaaaataccagtgtacagcacaaatagtaaatataagttgtgttttgtggaactttttgtttgcattgtttatgtttcagttatgtgtgcttcttactgtgggttacagttaaaaaaaacaaaacagctgtctaagtcttgacaatccttttcatagctttttttcagtgaagctagaagtggccatacgacctacttctggacgcagagatgggggaaggtgtcctgggggaggagagatctgagggatggtgaagataayttttgcttttctggtagaaagaacagatgtctctcctgcctgcctgtctcaaatgaggacatgatgtgtaatgtctggagcactggcagccatgttgagatcataaagcaacatgtccgcatgctgaggctggcagagcataaagatcaaaggtgtctggatccttcttaacatcatggagcttctgcaccaaccctgcactgcctactccagactccctaccatggagaaaaattagcccctatttcttcaaggcagaggttggtaaaccttttctgtacagggctggatagtaaatattttaggctttgtgggctaaatggtccgtgtcacaactactcaccactactggggtagtttgaaagtagccatagacaatatgtaaaccaaaggacatggttgtggttctcataaaactattttaaaaaatggatggcagggctatagtgtgccaaccccttccctagatgatcttgtcccctaattgtctctctgacctcatctcctcctactgcctctccttctccctgctctgatcacactgtttctcccacacacccagcctgttcctgtcagggtcattccttcccttggagggctctttccccagatgtccacagcgctccctccttcccctgcttcaggtctttaatcacaaatcacctcctttttcaggtcgtccctgggccctctgtaaaatgcccgtccctgacccacgcataccactctggcatgctgtatattccagtctttatcatgagctcctagaggaagagacactatgtttccttaaaaactgattctgtctggattgtcacagtgtttaatcaatatctgatgtatgattgattttttttttttctttttgccagattcaggtaagaaaacaaactcagggaggctgagttccccctccaaatgacatgtgcagatagtggcagagtccaggtttgtgcctgatggcccaatgtggtggtgtctgtaccacccgggagtgagggaaaaacaacatctacctctaatggaacacactgggtctcaggggagccaaggccacacagaagttcctgcaagactccttgctccagggygccgccccagtaaaggaggcctttgggagtccattaagtgagcagggtgtcctgttcgtcttgggcaattgcattctttttggccttcctacctcagaaagacttaggaaatgctgttattctgcaaacagtttggactgacttgtaagatccgtaaaaagacaaatggaaacactcatgagccartgtttttatgaaagagccgcaaaggataaatttatgtttaattcgcaagtagggaagctcataagagcctaagagcttgataaaggctactgggcccatctgtcaggcaggctgctctgtgtggttttggcttgaggcatcttggcaccagggcacagcttccaaaagaccgaaaaattaccttcttccctttggtgctcccagggggaaatgcctgggtacaatcacatgttgttgagatgtcatttagatttttgagtcctgaaaaataggtttatatatcttgatgtaaatgatattaataatgagaaccattttcaagccattctcttaagacagtaagtgggattttgaattaatttctgatagatctgattgattccttaaggccttttatggatggcttcatgtgattttttcccccttcattgtatccaacattaaattaaaaacaaatgacttttatttctctttcttctttttctttctctttctttctttctttctttttctttctttttctctttctttctttttctttctttctcctctctctctcccttcctcccccttctttccttccttcctttctttctctctctctctccttccttccttcctctttccctccctccctccctgcttgcttgccttccttccatccccttccttccttccttccttcctttctctctctctctctctttctttctttctttctctctctctctgtctctctttctttctttctttctctctgtctctctctctcttcttcttttttggcaagtcttgcttgctctgtcccctaggctggagtgcagtgacaatcacagctcattgcaacctcgacctcctatgctccagcgatcctcccacctcagcctcttgagtagctggaactatagccatgggtcaccacacctagctaatttctaaattttttgtagagacagggtctctctatgttgcccagctggtctctaactcctggactcaaatgatcctcctgcctcggcctcccaaagtgctgggaattcaggcgtgagccctgatgccctgccacaaatgaccttttcaagcaatttttcaaaaagtctgtgtgattccaaatgtgtattctttagaaaacagttgatgattgtgcgtgcttggcaggaagagaccacgtacagaacgtttcttgctctgtttgctttggtgaaatcctcgagcaatgaggttatcccattgcatgatcttaacgtacagaagactttgtatttaccatcaattttcaggtgaattctcaaaaaatctgcataccacttatctttcctttctatgtgaaatagttttcattaactccatttgttagcatataaataataactttaggttaatgtattttactcttcaacccataccagaggcaggctagaaatgataatttattctccaaatgcacataaagtttaatgatgtatgctgcataagtgccttcttgttaaacacamacacacaagtgcacagattttatgtattatttttccattatgattatgctttagaaaagcctttgcatgccaccctgcagaactaataagtgcctgagcacagagtttcctaggatggggggagcttgctttaaaagatggtatagttaaaaattgctgctgaaacttgcttttgaggaaaaaataagtacttggctcaagcacttggtctctacttggtctctgagaaaagggtaagctatctaacacatgtctactccaaacacatctgtgaggacaaggatggtctgaaagcccacatgcagagaacataactaggcctggtttgttgatagctttttccctttgtcctcacctccctatcttcctgctactggaaattatttatctatctatctatctatctatctatctatctatccatccatctatctrtctagatatagatatagatttatccaacagaacaaaggctggaaaaggacatctctccactttcctaggctgcccctgcctccccaggactgtgtcacctccccacccatccacacttcaccacccttctacctttgccttgggctgttctcctgtggggcacagagagtgtggggctcctggtaagctgattattattaatgggcgttgtaactgctgtgagttgataacatcttaaaaataagacaaaaataattacggtgatgcaagactcctgaacaaactgcattttcaatataactctaattttaacatcagaaagcagctttatgttggtcaatattttgatcatttaacaaacagcagcactgtaaaaggaaagtaggcacaaaacagttcagtgtaggagggtttacagaaggacggcgcttctcaaaggagaatgtcttaaaaatggattttcctccacaaagagcctggtgttgcagcttgggctccagaattcttatgaatggtgagatataactgagatgcaaagctgtgaactagtaagtgatcaggaccttccctcaagccaggatgtgaaacagccaaaggaagtggagacctcccagatggaaaaggaaaggaaccttgagagggcacagcacatatgcacaaacaagggcgatctgtccagctcctggactgcacattttaaaacacaccatcctcagggtattctgggaaaacccaccagccagacaatgtggctactcccatgtcctggagggaagctctgtcctgtctatctcttttaagtatgcagcttccaaggaatgtaaaacattccccaagggggaagggccaaactgccccacagctagctagacttgacctgttaaccctgtgtttaaagatgcttcagttgagttgwcctcacctcccagcctgccatcaaagccacctctgttcagcctcccgtttgatgggggctgcccatgcccaagctgccttcccagtcctcctaactgtgaactaaggactagtgtttaagaaaggatagagccatgtaattgcaaattgtcttaagttttgtctcatttggggatcatctctgtctttttaccttgaaaatgaatgctctcaaaataatgaataagctgtcgaccttacaactgagacagaattagaatgattagtgtattaatcagrgttattccagagaaacagtatatatatttacatatatctcccattgaggtcaagaaagacatgggtgtagctagctaggtagttcactatacagctagatagatagattataaggaatatttggctcatgtaattgtgggctgccaagttcaaaatctgccgggctgaccccagcaggctagaaattcaggtaagttgatgttacagtgttgagtctgaaatctgcaggccagcaaggtggaaactgaatcagggtttccatgttgcagtcttgaggcacaatcgcttctttttcagggcacttcaatctttgctcttaaagcctttagttgattggatgaagcccacccacattacaaagggaagtcttcattactcaaagtctgctgatttatatgtatgtgtcatctgaaaaaataccttcacagcaacatcgagactgatgttcgatcagacacacaataggctaaccaagtggacacctagaattaaccatcacaaccagtaagcatggagagtttgacccacagctcgtactcatgttttatcaggacagactctgtagcagagtgtggcctgatgccagggcattccaaggttccttagcatgtaacggtgcctctttttcctgggatttcatctacctgtgcaacctgtggcaatttttgagaaatttttgctgctccattggtctaatgagtcgaccttagggattggcaaacattttctgtaaagggccagataatgaatattttcctatttgcaggctgcactatctctcttgcaactgctcaagcaaaagcaaccataggcaatatgtaagtgaatgagtgtggctgtgttccaataaaacactatttacaaaaataagcagagggcctgatttgggccataggtgaagaagagtttatatggtatctccctttggcagggatattttctccccgccaaacatggtgaagggcgtggataagtgacactctgggctgggatgcttttagttgtgaggagtaaaaaacccaaacaatggggattttatgacctcacgtaataaaaatccccagcaatgggtagctccagacttggtttattcagtgtctcaaagtaatcttgaaggacccaagttcgttckttctttgctcattgccatcttcagcatattggtttaattctccttgatatttgcaaatgatttctgtgctttccctcagacatgccgacattcaggggaagaagaggaagagtgttccaatgaggytccgtttatttttttattttttgagacagggtctcactctgtttcccaggctggagtgagtggcacgatcacaactcactgcagccttgacctcccaggatcaggtgatcctcccacctcagcctcctaagtagttaggatcacaggtacatgccaccacacctgactaattttttgtagaaacggggtctcactttgttgtccaggctggtctcaaactcctgggctcaggcaatcctcccgtcttggcctcccaaagtgctggatttacaggtgtgagccatggcgcctcacctggggatccttttagtactgagggaaggaaacctttcccagaagcttcccagtcaccttccctttcttcccattggccacgactagggtgcaggcaccttgggaagggtggaccactgtgactaacccaatgcaggacatggctggccaaggggaggaaggtacatgagccaggacaattcaagctccatcagaaaacggggtcaatagtatcccctgggagaagccgtgcaatgcctgccacaaccctgcagagtcccagcagctgagggggtctattccaggggcgagatcacggcctgcaatgtgtgagctgggtctcaagagggagagagggaacaggctggagagatggaagtctgggagagcagctcctcgggagagcaccatgcatgaggagtgaggcttggggcagctgggagaggacctagagatggggagagagagaaggagtgtggccaggagcacagggggccactcaggccagagaagtgggaactgaaaatgctctggtgaaggggagagcagcagctgggcctgagaccagaaaagcccccatgggctgctggaggctcggggaggtggcagtgagctctgggctcagggcacaagaggcttttggaggctgggtgctggctggactctgtttgccagccttctctgtaagtcccaggcattagagcacagcaagcaggaataacaggagccctgggcccttagaaggaaactgaggagaagcctggatgtccatgctgtgttcctgagttttaaggtgacattttcttggccactttttatctgcatggtgttggggagaccctgctgaggctagggttcttgttctggtcttggaggtggcacggctggggcctggwgggagagcttggcacagctcccaggctctgctggggcccagctccgctcaggaattatcagtcactcagagaaaactcaaagggcactaggcctccagcagtcagcagcagtcacaaccaaagtggggagtggctccatttgccttctccacctgagctagtgctcccctttctcatgcttcctttatcccccacatygatgagccactttttcctcctcttcatctgcactgccacaccccaccccgaacacttagcatcccaggtgacttagctggagggaacctgctatggactgaattgtattcccctaaatttatatgtagaagctctaatccccagtgkgatggcgttaggaggtagggcctttgcagggtgattggatcatttgcatggaaccctcttgcataggattagtgcttctgtaagcagagacataagagagatgacttctttcctccacgtgagactatagcaaacaggcagctctctgtgacccaggaagccagccctccctagaacctgaccatgctggcaccctgatcttggacttctagcctcccctccagaacttcgaggaataaatgtttgttgtttgagccacccagtgtatggtatttgttatggcagcccaaactgagtgaaacagaaccttaggggttacctggtcaaaaccccccttgttcagatgatgagaggagagaggcccaggccatcaggcaggtgaggtctgtggccagcctcagactttagtttcctgatggcattaagaatctctgctctgagcctggaatgaatacaggctctacctgtttttagctgtgtgcaaattaccacgcactgtggtttcccatctatagaatggggctgtaagggacctggcctcacaggctctggggattagaggagatggagcaggcaaagcactgaatccactgaggtctcagtgctctcagtgattatcatcattgttgttgatacgcctgcttgccttatattctttttactgcacaaacgccttgttacatatggaaaataaatccacctgcttcagactctgatggacttggccatgcttcctttgtcccaagatagacaatgatgtgcatgataagattcyagctctgcttcygaagctcaactcaaatctaccttcccagacttccctctgcctgacttcctctctcatagcatactgtttgtgattttactgtagtgccatgtctgcctcatgtcagtcacacatttggcttgtctagagagcacacagcatgccagactcactccttcagcccagcaccttgtgtgatgcctggtccacacagtaggtgcttagtaaatgtttgctgagttaaaccgacttttgcccttagcaacctattctctaagtttatgctggtgctgttggtttaaaagaaaggaacatgtttcaatgtggaaagaggaactcaagacttggggcctgcaaatacctcatccagtttcctggaagctggaaactgaagctatagtgggctggtggcatcctcacccctggcggagcgtgtgcagcctcaggtagaagcacctatttagggacaaatgaataatcaaaggcatggcccatttgctttactctttatctgctctttaaagggaaatttgatttgaaactcacagagtcttccatatcaatgaggtggtaaacatctgcttggatgggcttttgctcctgccccagttattcccagtacaaccttctgtggttctgatgctccccatttcctccagatccctgtcctgagactatgcaagctttccagaagctcatactgtaaaaagaattgcacagcatatgtttagactcagtgctggattttccttgggcttgctcttaagtttgggcaaatgccccctggtaatgtgcacasctgggcatccctgaggcttggagctggcaggaccttttgggatggccttatcccttgggtttcatgtggggaatgacccaagactccaaatcccagcagagtcaagtgggaccatactcctggactcctgacttcctggatgctgctattctttctatgcagctgtctcacccttgtcataatgggaaactcagggcrtaacattccacttaactgcaacttggcttctcgaaatacctcttctcttctgtgcaaagatcatgactcggttcttccttcttctgtggaccgtaacaagccattcagccagtcaagcaagtcccatgggaaatccccattttggccaacagagacagttcctctttatctcccaagaacactacccttttgctcccctttccaggtagtcaaacagctgactgttcatcagcaggctagcagctgagcccggggctttgagggacagatgacagctggatggctgaccagcttgcagagaaagcttgaaatcttgggcacacagggaatggagcaagagattttcccatttggacataccaaaggataagttctctttgagagattggtgaggagtgagatggggtagaattccaggaaaagggaatgaagtttgtttctcaggcaaacatgccatcagcaaggtatgggctctaggctgagctgacagcagcagacagggcttgatgagcgtgacttccagcctgcagagagagctgcattcctgcaagaagggagcaaatggccccagagcagctgtaggcaccaatgtcccaggaaagaagcattccggggccaggaagatcctgccaatacttcacttatatcataatatttaattcttagccatttgtggatgtcagtacattattattgctttttttctgtttttttttcttcttgtattattatactttaagttctagggtacatgtgcacaacgtgcaggtttgttacatatgtatacatgtgccatgttggtacgctgcacccattacctcatcatttacattaggtatatctcctaatgctttccctcccccctccccccaccccacaataggccctggtatgtgatgttccccttcctgtgtccaagtgttctcattgttcaattctacagaatgggagaaaatttttgcaatctaytcatctgacaaagggctaatatccagaatccattattgcttctttacaaatggagaaacaggctcagaggagttccactagctggtcacacagctggtgaagggcagatatagggctcaagcctaggtcttgtgtacttgatggtcaaagttctcatcagtgcactctatttcctcatggtcatggtaaaaaagtaaaaattaggagcagtactttaggactcagtagctcagatgccccrttttatagcaaaacaactattttactggagaaaatgacaaatattaattcatttaaatctctggaaattgtcctaagggcacacagcaaatggagaaacattcatttaataaaatctactaaattttggtaaaaacagtgagggagggtccatggcatttgaaccatgacccactcccctaccctctctcagctctgccttatggaaactctgctctagggtctttactctgggcaggtgtggtcaagaacacaggggcttcctctccctgtagccctcagtctaggctataatttcactccaggaggggcaagatgctggtgtgtctcatcccacttggccctgtgttgcagaagctctattctagggaggcacggccaagataacttaggtttactttctcttctgagcaccgagtcatttagcagaagctctattacaggagcaacagactgagaatactggagccttgattactcaccctaactcactcctagggcagaggtttcacactgaaaggggcaagctgagaataccaggggccacttcccctagaacctacttgtagagcagaggttcccctagtacctacttgtagagcagaggtgcctcttcagggaagcaggtagttcccactcccagctcctgtgcagtgctgcagacattctacccggggagaaagcagacagtaagaatgaagagcttatagctctgcctgagaggaaggattttgttcaggacaggatgtggataattctgtgcaacatactgttattgaaaacaatgaatagcttggggagagcaattaaaagtgctcgtaactccgtgaaactggtagcaaaaaacaaaagggcaggacacccagaaatttaacaaataactgggaaaagagacagccaagatcccaagagccctcttggcatcacagtcaattctgggaattgggaagcctgggcaaatactaggctgtacccactcaggagcaatcagagcagaatgtggggcaacttgaaaacactccccaatttacacacaaatccacacacaaaaaaagtatagatgcctcactggcacgaggggcttaagcacatgctctgaccaaaccctagactggggcaactcctagaaagctaggccaaaaaaataaaatcacatacatctcaggcagtctagatcacagttttgtaggctcaagattgtgccctcttagaagtgatcagagaagaaacatccaagctactggtccctagatgaatgtaggaataaatgtaacctctttgaattttggtagaggcctccaagccttatgcccctagttagatacttacttaagaggtaagtgtcttactggttaaggggtcttaaccacaacttttgaccagtaaatggcttatgctgacccagaagaaattctgaggtaaccagtctaaaagataaggacagggagcagggacatcagaagccaaacattggggaaaaagtgactgacytcatagaattagcccataccagtcaataaacaaacaaatgaataaacaaacaataacaagagaccaggtgaaaaaggagggagaatcagtatccagaactgataccaattatgttctaaaatgtttaaatgagagagtgtgatccacagggaaaattgcaagcaatagacacaacttttgagggggcccagatgttgaacttagctgataaagacatcaaagcagctgttataaatatgttcaaagaactaaaggaaactacatttaaagaatgaaataaaagtatgattatatcttatgaaataaaagagatataaattatttttaaaacagaccaaatggaaattctagatttgaaaattacaataatgaaattaaaacttctcaacagtagatttgagatagcagatgaaagaattagcaaacttgaagataagttgacagagattatgcaacctcaatgacagtaaaaagaatgaagaaaaaggaacacagcatcaaactaatgtgggacactattaagcacaccaacatatccataatggaagtattagaaggagaggagagaaaaaaggagaagaataaatattctaagaaataatggttgaaaaattcccaagtcagatgaaaaacattaatatgaacatcaaagaaactcaattaatttcaagaataaatgcagagacctacattcagacacattttcrtaaaaatgttgaaagacaaagacaaagagaaaatcttgaaagcagtaagagaaaaatgactcagcacacataaggggaccccagtgagaataacagctgacttttcatcaaaaacaatggagaccagaaggcagtgtgaagacaatcagagtgctgaaagtaaaaacaaaaacagaaactgttgaccaagaatagtatatctagcaaaactctttcagaaacaaaggtgaaataaagatattcccaggcaaacaaaacctgaaagagtttgttgctatcagacatatccacctaataagaaatactaaagaaagctcttcaggcaatgacaatagcagcacaaaggagacaggtggaagcaaaactacattgcagaaatgaaatgaarccagatggtaacttgaactcaaagaaggrtatgaagagaactagaaatggcaaataaaaaggttaatataagaagtgaaaaatatatactcctttcttctttcagcttctttataagacttgattgtaaaaagtaataatgacaacaatgtgttactgggtttgtaatatttatggatctaatatatattagtagtactatagaaaattggggacagaatggagctatacaggagtaaggtttttatatttcaatggaattaagttaatataaatctaaagtagattttgatatgttaagacgtgttataatcactagagcaatctccaagaaaataactaaaaatataattttaaaaattataaaaggaactaaatttttgcactagaaaatatttatttatacaaaagatagcagtaaaaggggaacacagaaacaaaaaatatacaagatatatagaaaagtagaagtaaagtagaggagaaaatcaagagaagttggtgaataggtcacatatatagctagacagaatatatatatatataaatatatatatacgttctaatgtttgacagcagagtagggtgactgtaattagcagcgatgtatatttcaatgttgctagcaaagaggaattgaaatgttcccaacatatagaaatgataaatacctaaggcgatggataacccaagtacactgacttgatgattatacgttctatgcatgtaacaaatactctcatgtatcccataaatatgtaaaatattgtgtatcaatataaaaaagcaaaatgagatatataaatcctatcatatcaataacataaaatgtaaatgaattcaatgatcagatcaaaaggtggtggttactstattggataacaaaacaagatttaactctatgttgtctacaggatacacactttagtttcaaagacacaaacaggttgaaagtaaaagatgaaaacctgatacacactttagtttcaaagacacaaacaggttgaaagtaaaagatgaaaactattccctgggcaaatagcaatcataagagatctggagtagctacagtaatatcagacaaaattgactttaaaacaaaaaagttactaaagataaagagagacattccataataataaaaagtcagtgcgtaagaagatataaaattactggcttacatgcatctaacattagagccttgaacacattaagcaaaacctaacagaactgaagggacaaacagacacattagtaataataaagacttcaatgccccactttgagtaatgagtggaatgaatcagatgatcaacaaggatagagaagacttgaacaacaatacaaaccacttagacttaacagacctccacaaagcacaccatccaacaacaggagaacacacattctacttaagatcatgtagaatacccttcaagttagacagtatggtaggccataatacaaatccaatgcatttaaaggaattgaaatcataccaaatgggtttgccaaccacaatggaattgagttagaataggtataaattaaataacacactcataaataaccaacagatcaaaagaagaagtcacaaggtaaactagaaaatactttgagatgaatgaaaacaaaaacacagcatataccaaaacatatgaaatgcagtcacagcagtgctctgaaatttatagctgtaaatgtctatattaacaaatacatggccagacacggtggctcacgcctgtaattccagcactttgggaggccaaagcaggtggatcaccacagtcaggagtttgagaccagcctggccaacatggtgaaaccctgtctctactaataataaaaattagctgggtgtggtggcacacacctgtaatcccagctactcaggaggctgaggcaggagaattgcttgaacctgggaggcagagattgcaatgaactgaggtcgcgccattgcactctagtctgggcaacaagagtgaaactccatctcaaaaaaaaaccaaaacaaaaaacaaaaccaaacaaaacccaaacatatttcataccaataaccctactttccacctcaagaaactagaaaaataagagtaaactaagtgcaaagtaagcagaagaaaggaaaaaataaatattagaaaagaaataatgaaatacagactgtaacaacaaaacagaaaatcaataaaagcaagtggtttctttgaaaatattgagaaaatggacaaaattttagctagattgaccaagaaaaaagagaaggcttaaattactaaaatggggaataaaaagagggggcataattatcgattttatggaaataagagagattacaaaggaatactatgccaacaaattagataacttagataaaatggacaaaactctaggaagacacaaactatagaaaccgattcaaaggtgaaattttcaaaaaatctgaagctctatatcaagtgaagagtttgaattaggccaaggcccaaatggcctcaccggtgaattctaccaaaatacaacaaaaaatcgatatcagtctctcacaaactctcaaaaaatagaaggggacacttcttgattttatgagagcagtattgccctgattccaaaataagacaaagacatcacaagaatagaaactacagaccagtattccttatatagagaaacacaaaaatcctcaacaaaatatatcaacatataaaatataacccagcaccatgtaaaaggattacataccatgagcaagtgggatgcattacatgaatacaaggttgattaaatatctgaaagttaattaatgtaatgaaccttatcaataaaggacaaaaaccacataatcaattcaatagatgcagaaagaccatgcgaaaaatctagtaccatttcatgataaaaacactcaacaaactggaagtagaaggaaatgtcctcaatctcacacagggcatctgtgaaaaatccaccaggaacatggtactcagtggtgaaagacgaaatactttccccaaccatcaggagcaagacaagaatgttggctcttgttgcttctattcaacattgtactagatgttctagctagagaaattaggcaagaaaaagaaaagacttccaaattggaagaagtaaaactttctatatttgcagatgacatgatattgtatgtagataataacaatgtatccattaaaaaaagattgtataatcctgcacggtggctcactcctgtaatcctggcactttgggaggctgaggcaggaggactgcttgagtccaggagtttgagatcagcctgggtaacatagtgagtccctgtctctatcaaaagtaacaaattaggtgtggtggtgtgcacctatagtcccagctacttttcaggctaaggtaggaggattgtttgagcctgggagctcyaggcagtagtgagccgtgattgtgccactgcactcagcctgggcaacagataaagaccctgtctcaaaaacaaaatacaaaacaaaaagactgtaactaataaatttgtttagcaagtttgcaaaatgcaaaatccatgtacaaaaccaatcatatttctacattctagcatctgaaaatgaaattaagaaaacaatcccaatcacaaaagcaaggaaaagaagaaaatacttaggaataattttaagaaaagaagtgtgagacttgcacattggaaactacaaaacgttgaaaaaattaaagatctaaatacatggaaggacaccccacattcatggatcagaagatttaatattgttcagatggaatggaatactccccaaatttatctacagagtcagagaaatccctatgaaaatcccagctttctattttgcagaagttgacaagctgatcctaaaattcatgtagaagtgcaagggaccctgaatagccaaaactgttttgaaaaataagaacaaacttggagggggctcagacttcctggtttcgaaacttaccacaaagctacagtaatacatggtgtggcaatggcatcaggatagacatacagatcaacaggctggagttgcaagttcagaaataaaccctttcatttacagtctattaatgtttaacaaagaggtcgagacagttcaagtcaacaaatagtgctgtaacaattgtatattcacatgtaaaataattaagttagattccatttcataccacatacaataattatctcaaaattgatcatagatctaaatgtaagaactaaaactataaaagtcttagaagaaaatatagaaataaatcttcataacctttggttaggcaatagtttctcagatttgaccacaaaagaataaacaacaaagaaaaaaagaaaaattgaatttcmctgaaattaaattgtttcttcctcaaaggacactatcaagaaagtaaaaaaagccggcgcagtggctcacgcctgtaatctcagcactttgggaggtcgaagggggtggatcatttgaagtcaggagttcaagaccagcctggccaacatggtgaaaccccatctctactaaaaacacaaaaataaccaggcagtagtggcatgcgcctataatcccagctaatcgggaggatgaggcaggagaatcacttgagcctgggaggtggaggttgcagtgagctgagatcgcaccactgcactccagtctgggtgacagagtgagacccagtctcaaaaaaaaaaaaaaaaaaaagaaagaaattaaaaagacaacctacagaatggatgaaaatatttgccaatcatatatctgaaagggtatagtattcagagtacattaaaaactcttacaactcaaaatacaaagacaaataataacccaattaaaaaacaggcaaagcatttgagtagacacttcttaaaaaagatattcaaaggccagtaattacatgaaagaagctcaacaccattggtcattaaggaactacaaagccacagtgcatgtatgactataataaaaaaagacaatgacaagtrttggcaaggaggtggagaaatcagaaccctcatacactgctggtgggaaagtaaaatggcgcagcccctctagaaaacagtttggcatttcctcaagaagttaaacacagagttaccatatgactcagcaattccactcctagatttatacccaagagaaatgaaagcagatgttcatgcaaaaacatgtacgcgagtgttcatagcagcgttattctttatagggacaaagtgggaacaaccccagtgtccgttaacagacgaacggataaacagaaggtagtatatccatacaatggagtattattcagccatgagaagaaataaaataaagatacatgctacgacatggatgaacctcagaaatatcacgctaagtgaacaaagtcacaaaaaaaccagtattatatgattcaatttatacgacagaaagtagattagtggttgcttagggcaggtgatgggaggtagggagtgagtgcgaacgggtgctaggttgtgtttgctttgggggatgatgaaaatgttgtgaatttacattgtgatgaacatagtttgagaatctactagaggcctggcatggtggctcacgcctataatcccagcactttgggaggctgaggcaggtggatcatgaagtcaagagatcaaggccatcctggccgagatagtgaaacctgtctctactaaaaatacaaaaatggctgggcatggtggtgcacgcctgtagtcccagctactcaggaggctgaggcaggagcatcgcttgaaccctgggggcagaggatgcagtgagccaagatcacaccactgcactccagcctggtgacaaaasgagactccatgtattaaaaaaaaaaaatctactagaaactgtttagctgtacacttttttttaatttaaaaattttttaaagattattttgagacagggtctcactcagttgcccaggctggagtgcagtggaatgatctcagctcactgcagccttgacctcctgggctcaaaccattcttccatctttgcctcttgagtagctggaactatacgtgtgtgccaccatgcctggctaattttttgtacttttggtaggaacagggttttgctatgttgcccaggctggtctcaaattcctgggctcaagtgatccactcgccttggactcccaaagtgcttggattacaggcatgagccactgtgcctggcctagctgtacactttaaattggtgaattttatgttatatgaattatatctcaataaagatatttcagaaaactaacaacaaaaaaccaccttagggctgatgggagagggagacagaggacccacggtgtgacccccagggtgcagctgctaggaaatgtggggtccactatgactttcctctgaggtaggcaytgggggctgtaccctccccaggctctagccctggaacctggagtggagacaggagctcttggacctgaactggccttgccacagacgcaagtcagggtggtgcttcctcagtgcccmctcacggcgagtcccccgtagggatagggatgtagtgcaatcacagtgacttgttkgtagttctgaaaagcacttgcccatgtcttgttgagttactgctgtgatttgcacttaataggggaacctgagccagagatgcgaaggggcttgaacaaggtcagacgtgtattagtggaggtcgaatggtgctcagcctggtgctctttcttcttcctgtcactctgttcttcatatacaaaatgctcccctctctgctgaggtagggagggggatcatggcagggccagtccttctagtctttgcttcttggcaaggatgcagatcattacaacatctgctttgcagggattcttctggacaaggatgtggtcatagaggtcacaggctgagaatcaatggagacacgtggtgctcatctgcttatgaggaagatgccacyttcttgcttggtccactgatgggtgagaattctggcctatttaatgatctcactccagctttttgtttttgttttgtagccataagagtgtttgagaactttactaacctaggtaagatcataattgtcctgtaatgctgcacaccagcagacactctcttaactgatgacaatctccaggaagcctatgtgcctcagaattccatcgcatcatcactggaactcccggcacacactaagacacctccaaaagggtgytcccaacacacatctctaaaacacacccaaaacaacactccacacttgggtttactgaagtgtttattaaacgggatctgacatctctgccatcacactttctggtttgcttcttgcratctggtcatccagctctgctgactggggcttcgaggacagaactactctgatgcagaggaacgtcagaggctggccatgtctgtgccatgagggtgtctgtggccatcacattccccttccacagwtgacaggggaaagatgcctggcttctctgcacttaggctctttctgtgcacagggggcctgcctgagacacccggcccatcagccatggggcacgatccttgtctaccacctacctatacccatatcccatattgttcactattccctgactgtagacagtcaggtcctgaggtcctgccttgatggcagctgaagaaacagctctgcagctctcaccatcaagggcttgcaggagtgtcttgattagccatttgtcatttggtgagacctgggctactgcaggaagagctctgcttatctgcttatcaggaacacctgctgcatttaggccccaaactgatactagcttctggttggccattattttcatacctttgtaaaatatcctgtagggaacattgaaacgtgtgcaagcacaaacacaagtttctcattagaccatagagcatgcactctaaggcttgttctacagagctttgcgttagcctccacagggactgagaagccacaggactcttcctcctgactgctccctcactgcagttgccatgaagaatggtgtgtgtgctcttcctggcaacagcctcatggacccgacaacaatttttagaagtaaagcctatattgcaaatcctttacagatttacaaaggaatatctgattcagatgtctttgttccttctgggttaactgtcacttccgtggccccatggcagagaacttgcctgcctgcccacttcctcctatcctcccattttccctcctcttcttcccccctcacttcctttcattttgaagacatttatatttatcacctattctgctaccaagtgcctaaacacggcactgacacttctctgtgctgtgccacccctgggcagcctctgtggtcctgcccacagcagacattgccttctgggccctggcattcactgcgttcagtttgcatcatcaacctggaatcttggaaaggccatgtggtaaggaggctggaagtccccagccatgtttctggaatgagctttgctcatctggcctggctttcccacagtgagcacagagcggcattgttttcctgagcagctcagccccagccctagagcatgcagagaatgtggcccacggcccggctgctcccaccagaggcctgcagcctcccctcccgaccctgagcagtcttggttggtcaagacccacagccaccttctctgccttagagatgcttaagttactgacacttccctgggcctgcagagatgggtggaccataggttcctcactgagtgttgtgccctgggttgggagtaagaaaagcccagaggcttttgctgggcagacatcctctgtcccttctgggctgagtcaatggcacctgcagcctcgtgcgcagtggcagtgatggtcttgttggggaagcataagggtttccccacctgtggccaggaggaaggagcttgtgctggcttgaggtggcgtgagccttgtttgtgcctccctcgaggcctctccagaaatgctggccagtcacacctcctgatggcctcaggggcccagccagygtgggggtgtctggttaccccttgaaaagctgaccagagaagaccctgaaactccagggagggccattgagctaggtagacccctcactgagcgtcctccaggctggagcaagcgctcagaacaggccggtggctgtaagagatgacaggaagagtggggcctggggagggggaatgatgggtgtcgtgtcagaggtggtctcctctggctcactgtccccatcatccagaccttcggcgagggaggggactatgcggaccaagttgtcttcaaagtgcacctgcttcttcttggccagggagtcggctggctccaggctcagctccatcagggtgttggggggctggagggcactgggcttcttagtccccttcaggatactcttcatgtggatgaaaagggagctgggcccctccttgagggccccatggaaagtgtaggtttgctctgtgtccccagagccggtggtgctcacagcgctgctagaggggtctgtgtactgctctggggaggccagcacctcgggggcagctttcctcttcttccgcttgctcagaaggaagtaggccaggccggtgatgatgagcatggagcctggaaaagagccagaggtcagggctctagaggagtcacggaaaaaatccggagtccttgcaagcatgtcgtgcagcagagctcctgcaacccggcgctgtgtggccattcacaggcccctgtggccctggccctcttgcctggcttgtcctcacaccccacatcagatttgggggtccacttggaggctgggatggggatgctaaatggcaggaaggatggaggctctgcttttcaacatggtctccctggagggctgtcttccctgtattgtagatgggttcatgaggagggggcacagttttcacagatagggagcagagaggagaaggacactagcagaaaaggtcgtggatgaaactgaaaaggtgggagcaagaaatcctgggttctctgaccagaaaccagctggccagtggtatgcacccgtgaagtggaagtaggagatgaggctgtgaagattttctggggtcccaccctgaagtgcctttcaaaccaggctgaggagtttggacctgaatgagtaggcactggggagattcagaagggtttgggcagggaagtggccatgtcacacccttgggaagctcagaccacacatggtcagtgggaggaaaggtgaggtcccctttgcggttccacttctgtacggctctgtgaaggaaggatgcacttcttgggacattcctgccatttgatcagcatggagtatgtctggcattccgatgattcctcatgtccaccctctaggtcagagagggcagtggggcaggtaaggtccctggagccaccactggagctagactttgaggggctcagctcctcctgctcagagtccacctgtgctggggctgcatatctctacccctgtgctcttacctgggatggtcacgtgccagaccaggaccgggtggaggaagcaggccaccgacagcagcaggtaggccaggaacttctggaagcagcccagccagtgggctttctcccttactctgtctgccagggaccctggttgacacctggggagagggagtccaggttagcataatgtgtcccaggaaaaccccagcaagactggatgccatggagtctgggccaggccctgctgtgggcatgctctgcagtgggccctggctgaacagaaagccctagcggtccttggtgtgggttccacaatgagtggatttgcctgagtccctctagagggtccacaagtttttgaaaggctgcccmgacctgtttttctggtcgaaggggaagcaagttaaatgttctcaggatgctgcatgagttagtgaggaagacagctggaggctcagggctcactgggaagtctgcactaatgcagagaaagtgtgcagtttgggagccacctgcctgggacagttgtgcttgtagtgcactgcataagaggcttggccaggtgagtgagcaggctggcacccagctgtgccctgttcacccagccttgcttaggcacagtacagtgttggcccagaagggcttcttttctaactgtatacacagggaccacacatagccctggcagaagcctgatgctgagcagcttccttcaggggcgctgcctccatgtttcacagggggcaagtgcctgcctttagacccagcgcctccatcctctgaattggcctagagctggggctctacacagccacatcctgcccctctagctttgagggagtgctcaggctgtccaggtggcccaaagcactgctctcttatgctcgcaggctggactgcyatggctcactggtgccccctggtgcccattcctgcgtgtgtgtggtggcagggtgcggtggagtccatccagggtccattcctccccagccttctccccagctgaagtttcaagcacagcttggcagtggaattcagcagaaaggggaaagctttctgccttagggctggtgagcctgagaggcagccagtggccttgcaaggtgctgggacatctggatctgaagactggctctctcactgaccacccagggaccagtgtctaggttctgagagccgcagtcctcggtctcaccgataacagcttccacatactgagtgtaggctgggaagcagcaagggcctcacgagatcctgcagggtctgcactcctgccccacgaaggggtgtagagacatactgcccctgacttgcccccgggccctaggaagagacagagccagttcccaaacccaggtctgctcactcccagctgggccttctgcagggtcctcaccccatggcagatggctcagacactggggcccagtgactggctgctcctggtgagggggagctggacttttctggggattctgggcaaggacaggccctgaatgamtgtgtcagttggttctcttggttgggaccagggcaaagaaggcaatggagccccttgggcctgtgcccacctccaggccaggctgattgtacctcggtggggggctcctgtccacagtggcttcaggagcaggacatcccctggttgtgggctcttgggtggagacatctgtggtgtctggggctggggtggamaatggaggggtctctctggaaactacttactggaagcagatggccagcagctgagccacaaagtaggccccttcacatatggagacagcggctcctgtaaacctgcaggtggagacaggtgagggaggctggcgcctctgtcttcctttgctttcctgagggctgtcttctcacacgtggcctcctgacatcacatctacagccaatggactcacctggattcccccagacaacattcaccacgggctgtctccaggacatggcgtgttccggactgkgccatgctggggagaggtggggtctggggttcagagatgggtggggagggcaccgtggccagcaggtgacatggccttcacctggcaccctgtgtgacactggcaggcacatccttctacctgctggtcaccaggatggacacccactgcctgtgttccagccttaaacctggacctgttcctgaccctttccttcttccttttcctattatccaaayagtcaccaggagctgttgattacattccttcaataccttccaaatcgctcctgttctctgacctcatgggcattgcctgggttcaggccctgccccctggacccctgcaccagttccacttcctcacttaccccaggcctgtctcctgctcccccactgtgtcactctgggctgcctgacacctgaatctgatcatgttcctcctgatacaggatgcctcaaaggctccttgtgctcccagtgtggtccatggatcctgcaatcagcatctcctgaggaatgtgtagaattcatggctcccaggccacccctagactcacatcagaatccttggaaatggaatatgtacttacggagggtctcactgcmtatcctccatgttcccttgacaacacaagaagctatcaggtgccacagggcttttgcacaagtgagyttttcctggaaggccttccccttccctctccagtctgtctggtgacctcctcttacttctccatgtggtaccatatgaccagagtcactagtctgtgaacccccagagggcgttccctgtctaattcttctgtacagcccaggctcacagtgggtcgggcttattgggctccattaatgagcattgcaataaatgaaggaatgaaagtggatagtgttgtgcagaaggtggcttggggtcagggtttcctcagagccatgggtgtttctagattgtgtgatcacaggtgagaggtgtgacctttctctgtcttagtttcctcagctgtaaactggggttattatagtgcatcaacagtaaaactgttctaagaattaaatgatatttgtaaagcacttaggaccatgcttggcacacagtgattatatcaattctagttatcatttctctctccctgtgattagttagatcatttagtgatctccactcctctcagtctctatgcctcccagtgtgagcctaactcttaccccttggttttaaaatgataataactaacatttatgtaatgattgctatgggccaggcataattctaaaggccttacaaatatcaactcatttagtccttgcaacaattttataataagtactatattatattataataaacactataattactgtcagtttaccgatgaggaaactaaggcacagagaggtttgccccatcaccaatggccccttatcagtagcagggggaagatcagaacctagcacgcaggctccagagcttgtgtgcctaacaggcacatcaagacgtgttttgcaaaataattgccactgcctttttctatgccctgggacagaggggtatatcaaggcttggggaataaagcgactcattcagacttcctgtctggtgctattgagtggcagggagggacagacagggcaggtactgagtgctgatcctgcaggtgttagagaacagggcacagcaaggggcaggggaccccaggctggactggaccacccagagaccacatgggcatagggtcccctcaaaacagagacaaaacagggttctgggcagaaggcagcctgcattcacctgccatggcctgacccgagagttagggacccactggagaggaggaaggcccgcctgcttctggatcccagggcaatggtgcacagcggctagggacatggtcagttagacacggagggtgttcagaaccaggagaagtcactgccagccagcaggggctccaggctcagggcacaattgccagggcagaatgccaggaaggagtgtcaggcattgggcaggtggaaatgggtggamggtgcttgggcacccaacagaatgagtgaagcttggaggcgaggccatgctggtgagtttgaaaaagagtcagaagcctcctgctgtacatgagtggcaagaagtgaggcagaggccagaatatggcacagggtgtggaccagaggtggtggaagctcttgaaggttgtcagagagatctgtgtgtctagatggcagtgtggaaatgggctcagaggctgaaccgcatctgggagatggcaggtgtgagcccccaaacacagcaagaggcctgccctgaggcgggagggtggaggctgctaaaagcacaggtcagctgccacctgaaggtagaggtggatcctgaggaggkgggggagtggaggtcacagcctggtggaccctgtaggcagaacaggacatttgtggggcagcctggcaaattgttatctgttgcttctcagttcagtaagctcttcaggatttggggggctagaacacacagcctycctatatcatttggaagaaactgctagaagcccctcaggatggggctgcagagatgctggggcagagacccaggttcttctaatcccctgggacaccactgcacagggatcaccttcctgccaggacacacttacagaggtagctggtagtggagaagaaaagacattgtctggggaaaaaaagggtcttgggtttgaatctggatcctgctgctcatgagcttggtgatgtgggctaacctgcttactccttctgaattttytcatctgtaaaactaggccaatatgcccttctcctacagtgctgtgaaagttaaataacataatgcaattaagacatttaactgtatttggcatgtagagaagctcaaatatatatttctttgacctgattccccattctctaaacaagagctcaattaatatttgctgaataaataaatgattgatgagatgcgtggatgggtgggtgtatggatgagtaggtggatggatggatggatggataggtgggtggatggatggatggatagatgtatggatgggtaaatgaatagatagatagatgggtagatagatagatgggtgggtgtatggatggatgggtgagtgaatggatgaatagatggatgggtgaataaatggataggtgggtggatggatggatggttgggtgtatgggtagttggatggatggatggatgtgtaggtgcatagatggatggataagcaggtggatggatagatgagtggctggctggatgaattggaagatggatggataaatgggtgggtggatgggtgaatgggtgtgtgtatgtatgtatgcatatatgggcagatggatggatgggtgggtggatggataaatagatgggtgggtgaatagatggataggcaagtggataggtagatggatgaatagatggatggatgggcaggtggatgaagaggtgggtgggtagatggataggtagctggatggatgtgtggatggatggatagatggatagatggatgagtggattggtgcatgaatagattggtgggtgagtggatggatgggtgggctgacgaatggatgggcagatggatggatagatgggtggctggctggatcaattggtggatggttgggtgggtagaaaggataattcattgatttatgggatggtctgcacaaaccaggagctattctagagcccccctcaactcccttcacccctgagataggatggaattcacatgggaaggggactgctctgagttattctgagtagacagatgtagggtgagttgagcagaacttgcaggtcaaaagtggcacatgcacacatactcacagcagatagaaagccaggcttttgaactggccctggaggaaggtctcagtgcccacgccgatcaacactaaggggcaagagaagaaggaagagtgggcctggtgctctacaccacagcactgccctgttgagggtaccttggctgtggagtgastcttcttcctggggactgacagccaaggtaggttcttctcttcatgatacaggcagctgtgactagcaaggtgcaagagagcaggaagcctcctggattgctccctggaactccaggcagargcccagaggtcttctgattaagcttccccagagcagccacccttagtgcccccagcaactgcccacactaatgtggcaccagccccttgattcacagctgttctctgtcatgtgctggggcccaccccagtgtgtgctgtgtgtctggcttcagtgcttggccgtggatgggtcctgccccagccctgttctcttgcttgggtcactggttgctgttgtgtggccttggtcttgcttgctgaggggtggcggcaggtcacactcattgctcattgctttggacccagtgctgattaaactcctggggtttttctctgacaagaaaatgttgctcaacctcagctctcctcctcccctttcttggcagttagtgctgaactttcatctgtcataggtgaatttcatctcggacctgcctttccagacttgctgtctctgggtgctctcctcacaaggatttgctggctcccatggcttyccacaaccagcacagcacggacctttggagtccccaatagaaacattgcaggggcagtgcatcggcctgctgactagaagtctttctgtccctaactgattacaatgctgaccctgtttctctctgggctctgatgatgcccctgctgtgtgctgaagggtggcttcatcctctcttcctcccagtcaaagatggtgggctgggctgtcatccctggctgcctgggggtggcctctcctccctgctgctcgtggcgctgcttcctggcttctggtgcttcctcttccctggcagagacattgtgtgggcttccatcgcctggtgtctcaagctgaagggggcccttcgtccaatgctgaaatgcctcttctagagagcagggaagagccttgcactgaagctaccagcactccayccctcgattctgggggtggggggtgggaggggcgatcatggagatatggggccggggaaaggggacagagcacttggatctaggcaggtgagaagaggcggttatgttttctgagcaatggatggagggctctggggctccgctgtgcttcatgggcgactgcccacattaacgtgccaccagtcccttggttcacaggaggcggacaccgagtctcccactctctccaggttccagctgccctgctggctcacctggggcgaggacagatgatgctagtgggccacatccccctgcagtgtcagcctaactgaagagtcaaaacttacagagcacttcagagcttccacaccatgttgcacacgtcccggcccttccagcaggcctgtggcacaggagtcccactctctccattttacagaggaggacagtgaggctcagtggcctgtgtagttcactcaaggatacatgctggacagtgagggcctagagaccaggtggaggcagccagctctaggtggtgcgcggtttcctgctacccactgctttccagcctgcgtgcgtgcatgtgtggacacgtgtgtgtgtgtaggcttgtgagtgcatgtatgtgtgagtgtatgtgtgtgtgtacatgtgtgagtgtgtgagtgtatgtgtatatgtgagtatatatgtgagtgtgtgagtgtatgtatgtgtgtatgtgggtgtgtatgtaagttcatgtgtgaatgtatgtgtgaatgtgagtgtgattatatatgtggatgtgtgtgagtgtgtgtgtgtgagtgtatgtgtgtgaatgtgcatgtgtgaatatgtgagtgtgagtatatatgtgcatatatgtgtgtgagtgtgtgtgtaagtgtgtgtgtatgtgtgtgaatgtgcacgtgtgaatatgtgagtgtatgtgagtatatgtgtgatgtgcaggcaaatggccatttatttggttttcgccatgtcctattatcagcacccagcattcatttgcttgtttaatcattgcagcagtcctatgagaaggtactcttgttatccccactttacatagaggaaactgaggcacacagaatgtaagtaatgtaagtcaaaccaaccaaccaaccacggatggaggcccaggtcagatcctgagtttcagtctttcattttctagttcatagcatagtcacccaatctctctgagtctcagtttcctcattatctcctgcacacagtggtcatgaggaccgtagtgagctaactgataccaagcgtgtcatgggtgctcagtgaatcactggctggggaagaagtgcttcctgccctgggcctgggaaggggtgttcgactccaggctgatgcctgcattgagcactctgtaggacaggcatgggctccacttacgtgacacgtcatgttggccaatttgcagggggcttgtggcagacgaccagcagatggcaggaaagggtcttgggaactcagcttcttccctgacctgcacctgtttggcatgtggagagctattttgatgccttttgttttgcactctttagacaaacagagggtcagcggtcagaggggcatttgaggaacactgtagagagagtgctggtttgcatwaaaaaaatggcaacagagaaatgagagccggatggaaatcccagttctgtgtgttattacatacaagtggcaagtacttaactcatccaagctgtgttttctcatctgtggaaggggcagaataagttacaactcacagtcattgcttggattggagaaaattgcttggattggagtctgaaatgcacggcttagtgcctgatagatgtcaggtgatcaatgcaaagaggygactccttcccccaacttggccctggcagctttgccagtgtccagtcagccactttgtactaaggggcgtgaggtcactcccacaagctccctccaaccatagccagcaggattctgcctgccgagactgaggaatgccacctggcgggaggaggagagtgtggggagccaggagtatggctcctcaatttacccaaggcggaagaggatcagtggggcgctcatgggaggctgtaaagccctttgatatccaggccaacgggtcaccgctttctgctcagtcctcccacttttggggttcgtgttcctggatgcagagcatgccaggttgaaacaacayggactcgcaccgagtccctcctctgtcccctgctctgtttgcctctggtctcaatgttcaggcagctctgctgggagmggcaggcccaccctccttggggggcggctcctggccgcttctccgaggcccacctggtcttctgtggttaccggttgggccaggcactgggctcatggctgtggtatgcttagtccagcaggagagatgtgatgtggactgagaaaagtgcattcagcgagggcagtaacccaagctggacgagggactcacccaggagctctggggccagacaggaggggccactcgtgggactatcagggaagatgaataamgatgaaggtagagtggactaggaaagcagcaggaatagacctgtgcagatggaggggccaggcactgcagggtgtgggggcccctaacagcagaagcaggggcacagtcgggggcaatgggcagtgcatgtggatcaaggcgactgtggggttcttaaatattgggctctgcagcgtgagcagaagggactcgtgtttagattggtatttcagaaagctccctgaccccgtgcagatggtgagagacttcagtgatatttggtggtggctgagggacagagaccagctccaggtgctcctggccactccctctcccagcacagggtatctgctagtttctttgttgacttgggcttgaagcacagttctggctgtggctcctggtggtgtggtgcaggtggctttactgtycagtggcacagcagggcgcttggcatagaggcccagaagagtggagggtctgttctgtctggggacccagagaaggaggcttcccaggcataaagcagaaggcatgccctgccattgcatgttgatgtttggactttatctgggcagtaggggggcagaggtgtgggctggccaggaggtgtctgggattggaagcttcctgggcatgtcagccctgttgcccctcactcaggtgccaccacacgccatgtagacagtaggccctctccatacgtcttgtttcctctgcacatctcccaagtgggaactgccaactctaaggtctcccagttttctcagcgatgtgctggctgccatctctcaggaaaattggctaagaatggttttgctgtgaagacacacctgctaatccctgaggagtgagaccgacatattgtgaggaagcccaagccagccttgtagagagacttgtaaaaagagagagggagaaataagagtgagagggagaaatgagagtgagagagagaaagagagaaaggaagagaaagagagagagagagagagagagaraaagagagagagagagaggcacaacagccccagctggttcagcattgcacaggacaaatgatggaagaagttatctttgacattccagctccagcagatgtgacatagactggaagtgatggacccagacaacaatcagaaccaaagcaccagatgagccacctcagccacgtgagccatgccagccaccctacctgtgaccccatctgtggccccagttatcatggagtagaggtgagccgcctccactgagttctgccagaatttccgaatcacaaagttttgagtataatcaaatgattgtagccttacatcactacgttttagagtgggctgttatgcagccatgcaaggttaactggaaaagcagctaattcagtcatctagccacctgaggtttttggcatagaagtctctgtgtctggcctgacgccttagagtaaacattatattgtgactcctcaggagtaagcatttctgggtcctgcagcacctgccccatagccttggagattcaggctcctaggaatacagatggtgtctggggacttccactgggtcatggaatcctattggtggttttataacttaagacttcatagaggatctgtggaggagaatcctgtatcatccaaagcaggtccctcccacagttgcattttgcaaacattcccagtagaaaaagtaaagaaagcaagaagtgagattccttgctgcaggaatttcgtgaaccgtatccaacactcaccccagagagccatgttgggactggctgtggaagctcctagcctggtgtgctaactggactgtactgggaacaaaatatttttggaaggtatcacagttccacatgacatagatataggaccccaaagtgttttcacacagggcctggagtttcccaaaagttttttttccaggggactgttctccagaattggcaggaggtgaacatgaagtgtggcctgaaatttagtgggggcttgaatgaagaatgggattgtcacaggtaagaaggagctcctctccagtctgctgagcgtctgttcccggagactgcacaggtgggcccccgccctctcaaaggcctcacttcaacctgtggatgaggacagcccactccttgttttgtggaattggaccttaggtttctgccaggtttcagatttaggcggggctctctgttaaacacaaagaagttatggcacccggataactaggagcagagtgggcccagaaggacaccagggctcaaaattagggaggcacacctcctaaaattacagaggtgctcattcattaaggaggtgttctccctaagactaagaagatatttgccattaaattaaggaggtgttctacaatgaaggaggtgctcctcttaaaattaagggggccctcattgtaatttaatgtggccttcagtctaagcccaaggtggtactccctccctcaggcgcagtgtaggcccttcgtgggccctgagagtggtagctctggccctggcatctagagatttgggaggcccagagtctgagggcttctagctcctcttggaatttagcctgcgctctggccttccatacttctcacagggcagtggggctggtgtcttggaagctctgccttcacagggtgctagtccagtgtggaagtggttggcctgaatcagcaactcactggaacagatacccccagggcattaccctgagctgggaccagggactgaagagctgatttttggattagctgatcaatgatcaggagccaatcaatggagacaaacaatgggacaaaggccctgctacccgcagaatcagagcctcatgacaccaaattctctacaagaaataatcgccctgagatgtgcttcagtccggctgtgctgtctttcctgcccaggtggaggggcaagggaacactgaacagcactgcttgacacggccattagtggcctttgactccttccatccctccctattatcccacctcaggctccccagctactctcaccccagcccaacagaggtaccttatgcccactccagcacagctcaccccacgcctctgtctcactccctgcatgatcccaggaggtgccttgcatcgcaccttgatggagccattcatggacaagcctggcctctctcatcttgttagctccttccctccagtctctgtccctcctgtgtgggccagatccaaccttggtacaagaactttcttctctcagggtccagggcttgcttctgtgttgctttcctgagctgtttgttgtagttcaggcttagcagagatcagagatcctgggccaagagcctgtggtacagccctgggcagggcagccactgtgtgagtatccttctcatcctggagctctggtctcagcatgggttgacgaaagctaggagggggctgcaccagagcagaaagaatatggggcctgcatcagaaaagctgagtcctgcatcctcaggaaagtgattaactctttggtctgcatcttmttctggaaaatggggaaaataaaaacatgcaaaatggtgccgaccactgctcagtctaagtaaatgagagtgctgcacaaatgcagacgatggctaggaaagctattataagaggcaggcggttcccatcagtattctccagtggaaggagagggtttattctcatcctttgctcccattaacacacttgtgggtttttttgtggccaaaaagctgttccctgtgcaccagtgttgcttgttgttcactaatttactttgaggtcccttctcaaagcccagttgggatataagtgacccaaactcccatctatctccacatctcttgtattagccctccataaccctgctagggtccccacggggctcaggccagcatgttcctgaggctggggccatctgcggggctgcctactgaggggatattcccctggcctcaggctgctgctgcttttgccatagggctgacctcatgatccactgttgcttatccgttctgactccatgggttgaattgtgacatatgtcttgcatttattgtgatgcccttggtggtaacatgggacgcttcacagtcatcagaggccacactaaccttggcactggatgccctgggcattggatgagaattttgtactcactgttgctgagggcagcctccgaacccaccgcgtatatttattgcttcttttcattctcatctcctgctggactcagggtgtccaaagacacctcagggaaagacgctccaggctgatgacaatgggcgtggatggtccaggagaggtggtcaccgccagggtagaggtgaaaagctagatttgtaccatttccaagactatggagttgctggaaacagttgctgtgaattcactgggacagtaaggtagtagccacaggcttcttagctcrgaagttgtggcaaacagtaagcatggtggggaggtttacctacgtgtggagatcagttcagctgatatacatgagccagggttcagagacagtgtgggaaaagggaaggatttcatggcagatatttctggacatycrgttggaagagacttcagattgagctcctattgaaactgtatagcaatttgggggagaactgatgtcttaacgatattgagccttctgacccatcaacaagatgcatctccattcatttagattttctttgttatctctcagcaatgttttctagtttctagtgtagtttgttttacatcttttgtcagatttatccctaaatatttcggattttcaatgctattataatttgtatttttaaagatttcattttctaattgtttgttgctaatgtatggaaatacagttgattattatatattaagcttgtcttctgcaatgttgccattccctccattagctcaagtagcttttggggtagattctattagattttctacagatgataacgtcatctgtgaataaaatttttctttttcctggacaatctgtatgcattttgtttctgtttcttgcactggctagaacctccagtacaatgctgactggacgtggtagagtggacacccttgccttgttcctaatcttaggaggaagcacctggtcttttacatttaagtagatgtatgttttctgtaatgacctcttaaggttgagggagtttccttctgttactagtttgctgatgatagttttattttaatcataaaagaatgttggatttcgtttaaaactttgtgtctatttagatgataatatggtttttcttttttagtttttaaatatgatgtcttagtccatttcggctggtataaccaaatcccatatactgggtaccttatagacaacagaaatttatttcctacagtgctggaggctgggaaatgcaagatcaaggtgctggcagatttggtatctgagggaccccttccttatagaaaactgtcttctcactgttaccgcacattgtatgatagaagggcctagggagctctctcaggtctcttttataagggcattatttccattcagagaaggccctacctcctaatacaatcatgttgggtgttaggatttccacatatgaatttggctggggggacacaaacatttagtccataacacatggtaagttacattaattgatttttcaaatattaaaacaaccttgcatttctgagatgaactccacttgattatgatatatcattctttcaatatatttgtatttgttaaaactttgcttagaatttttgcatctatattgagaagaatattagtctatagttttcttgtaatatctttggttttggtatccacataaatactaattttatagaatgagttgagaagtattgcctcctttcaaatttctggaagagtttgtgtggaatagatatttcttccttaagtgttggtagaattcacctgtgaggccatctgtgctgataccccactctttggtgatgaggaaggactctgcagacccatatggttcattggcactactgaggatagtgtctcccacgtagaatagcatctcccttgtaagtaccctggtatggtttggctgtgttcccacccagatctcattttgaattcccacctgttgtgggagggaccagcaggaggtaattgaatcaggggggcaagtttttcacgtgttgttctcgtgatagtcaataaatctcaagagatctgatggttttaaaaagaggaattcccccacacaagctgtctctccttgcctgctgccatccatgtaggatgtgacttgctcctcctggccttctaccatgattgtgaggcttcctcagccacatggaactctaagtccaattaaacctctttcttttgtaaattgcccagtcttgggcatgtctttatcagcagtgtgaaaacaaacttatacaggcccacaggagaaatttcttttaggtctcaatgtcagggagaaccgaggtattcacttcctattccttctcagtgttcagggagaatgcatctgctcactcatccacatggcaggtttccagaaagcattgtccatgctcccattgttctctgtccattccacacacaycaggcttcttcatctgacccttacctggtctcctgggggtttcctgagccccttcttcacagtgtcagccacttatgtcagacaacatttctttttgttcacagccctcttcagaaggctgaatagaacccaggacaatcttgaaagagctgtcatcccatgaaaaataaaacagggctgccatctttcctctggttggcttactatatgtggtgtagaaatagccaagttcctgtgggctgatcttcacaacccaagctcagaatgtgatgggaaatgtttcccagtataatgctctttacagtgtagccccttcctccttccagcctcatgagtcacatactgctttgctcctttcctcggatcttccttcttcttccttccaacaaaaggagcygataactcatgctacacagttccatgccctgcacgttcctctaaaattagcccatgctgagtgagaatctatgtgccaggcagcttgctactttagccattgtttcattgagccctcacaactccagagggtagatacagtgrttgtcccaggacacagacccacctcccaaacactacgctgcagtgcttggtgctcggatgtgcacttactagtttgcttctctgtccagcccatacactcccacagggcaaggtcttgccattctaatccatgtgtctatgctgcatgactggggactcaggactggggatgcaggactggactgcatcctgcatcttggggtcatcaaaatactatgggacatgctttttaatcctgattcaggtggaggaaatagcgattaggagtggagtctcaggagcagatcactggggactcagcaacagtttgccaagtaaatgaaacctaattgaagtttcagatttcttgttataaatctagaagcaaggcacaggcacaaagttgtgaaaaaagaaatgtttgaaccaaatcctattgcctgttggtggtaggtggggggaacagagggaggcagattccatttacttgtggagccarttgtaacagaaaaggaaaacagtcaacattcacttggaaggtctgaaaatacaatgtgggctcacttgggtgataaatctcttgcgaggcgttggagtgcatgacactttcttaaacagcaggaggtggtcatggggatatacatgtaagaggggtaaaattagcatggagggcccaagatggctgcttcagaagcatttgttttcctgaaggctttgaacagggctaaggtcaaactatgcatttgctctatcctttaaaatataatgagaacagctgggttttaaatacttcttttctcctaatgtacattaataagccaatgctctaactgtgtgggaagcatgggagcagttgaaaatgtggctgtgtccattatatagagaaacaggttaatgggtcaaaacctggaacaaaataaaacccctcagtgattccaggttgattccaagcactcaatttgtgagaaacagcacgtcagcctgacaagcagagttcactcagaatggctttgcctccatcccctcatgccctgctggctctgccatgccctttgctttggagctgccataacacagccctgtgtttgggcagagtggagttctaacaccggacctctgtctcctggccatgtgacctctgccaggttacctcaatgttctgagcttcagtttcctcatttgtaaaataggactgagcccagcactctagcstctcaggcatttgtggggctggagcgagacaatgaccataatgcatgcagtcagccctgcacctctggacccatcaaggcaagccctactgtgatagttccccctggaaatgtgtgcagatttgtctgtccccagatgggttccaggagcagatttggctagagaaggtcacggtggtgctggttaaagcatgtgtggcaatcttgagatagagaatggatagctgcaatgaatatcggtgtcttgagatttagaaagtgtttggtgatccttgactatgtgcttcastgtacgtgtgtcctcaccatgaccccacctgactgatcagaactgaccaagggcaggagcatgagggtagaggatggggaagttctgatcaagcctctcctgctctcctctgtgtgttttgcatcctgcatcttggggtcatcaaaatactatgggacatgctttttaatcctgattcaggtggaggaaataaygattaggagtggagtctcaggagcagaccatcatcaggtggaactttgtcttcttgcttcctggtgtgagaccctgagcaagatgcttcgctccatcaggcctcggtttcccttcctgtacagtgggtatgaggatgaacatgatgatgctcccaatgacaggaggatgaaatgcgatactgcatttaaaatacacagtgcaaagcttgggctttgagtattatttgagtaaatactcaaataatcatgttcattctcagcaacctctgctctgggcagaggctggaagagtgaaattcagccctggagatggggcagtggggcctcaagctggagcctctttgctctgagggaaattgggaggccttgctcaagtgcccagagacattttctgagcaagcctcttatggggaagcccatgcacatctgtgtgtgaggacacagcctgaggggagggctttcactacaaggcggggctcagggacatgtctccccttccctccatgcccagcctggacggcctgagaggtgcctcctctgycccacaaagggggctcttcccatgctcttcctggccacctcagcaggggctggggagtggcaaaggagttattcaagattcccctgaggttaaagggtaagaggatggctgaagttcaaagggaagccaaccctgctttcctagcctgcaactgggaccaatgctgtgggacaggtcctttctcatctcacaggggaggagtgccctggaccgctgtgctccaggctcagttaaatccatttcccaggacccctttcctgccatttggtctgtgctgagaacctgtcacagggctgagcctcctctggggcctgagtctcacactcaggacatctttaccctgtctctagtggacacggggagaacctgctttgagggatggacaggcaggagctccggcatccgcacaggggaatgtggagtgctcacagcctgtgtgccatttcccagctgtgtctgcttccatgggcggcaatggatgccgcgtctcagcaactgaggcacttagacatcacacgggcgcatgcatgcacatggacccatgggcgcctgccccccaaccccacatcctgagccagggaggtgaagcaaatgaacccggtgtaaacaatgcgggagtggtctgttatgtcctggaaaccacatgactgctccagagggagggaattttctaattttagaaacacttccacccaggtgcaactacctgaggcctgtttatcccaatttggtggtggcaatgatccgtctgtgctctacaacccctcatgatatggggctggacactgaggtggggcaagaatggtctgcgggacttcgaggaatcctaaggaggcttcatccaaaggctgtggcttcatccacagtcatagggccttgacatgctggcagaggcacccaccaggtgccgtcagtgcttttgacagccctgatcctgtctgcagggggtccagggaagaggctgctaatgagaggctgtagcctcttagcagctgcctggtccctgcaggtgacactctgagtgcccttgggtcacatgtcttcctagcttttaagaaatccacactccccacctccctagggtttctgcaaagtgaggccctctatttccggtcttatttcctctctagcagcagtgcccttgtaaatgaagcctggatttctcaacagaagatttcaacaaaaragaggcttaggagaataaggaatttgcaaatcctatgtactggaaataggccaggagttcagtgatgctggaagaaactcgagatttgcccaagaacaccaaacccctctctctagcctcccactccctcccagcactctagaaagcccgagcaagatcatttgaaagcctggccattagaagggagctcatggctatttttagtctgaatctcctatcaaaaccaagagggaggcccattctcagcattaacagcagtccctgtgcggagataaaggctgtggttaagacgagccctatgtgcrcgcrcacgggtttgtgtgtgtgtgtgtgtgtgtgtgtkcgtgcacatgggagtgtcaggggctgcagactcttccggtgactgagataaatcagactgttaaactgtctctagctaatccattagaaggataggtacatacatcttagaacagcctctcgacgggaggtgggcctcagctctgggtggagtgtggctgggggaactgtgggattcttggcattttacagatttggaaaccaaagcctagagggagcagggtggactcagatcaacagacayggaaacctatttagggtggccttcctctccccaggatggcttttttgcttgttgggggtcttggccatcattctcttatgtgtagacgacaacgtggttctgaaagtggctggatctggctcctccctcagtgcctccactcagagcctcagcagagcaattctgaacctcttcctgctgcctactctggaagacagggaaggttttggccagagccctggcctttgtgaaagttgaaggaccagggctccgggctggctgtccctctgaccatgaccttgggcaaggtcaccacctgcatttgagctcaggtgccccatcctgtagcaggaggggtggggttaaaccatccagcagcccttcatgatctaactcatggcctagatgctggaagagcccactggccagctcacggctgaacccagcccagtgctcctgaaatgacccagcttcccattgagctctggagtgtgtcatgggggcttctgctgagaggttttcatcctcagttccacttagccatgctcagttcctgcatccttaatctgtccaaacacctggccagcaggtccccatcatacagatcagaaagtgcagcctcagaggggtcaggggctccccaaggtcatatatcacgcaagtgactgggctggggcaggaacaagcactatgtgattttgacctaggagaactttcccatttggtaagacccgtgggtaagcttttgcccagtggtggggaagggctttgatagggggtgtgtctctctttgtccccaagggacaatgtggctcagagttaagggctcagaattctgcctgttcatttccccaaaacagatcctggctctgtagggggaatggggctaagggtcaggcctgccctggggaagcgagcaggcagggctcaggatggtggctctgggctctgctctaacagtctgccctcctgtccagttgagcagccctgtgattctgctgggtgaaggaaggagcccagcatctctgggaagcatctctgctgctaagaccacagtgcattcctgcagtcagacctcagacaggggtctgggttcctacagggtgttctgttaacagggtccagcatgggcccgagggaagcctgtgatctccacgtccagccaggctcagcctgtccctccagggcagagctgctcatgactgggagttctctctccatgaggtagggctatggtttgagtaaagcaggatgagctcagttgaccttttgtagatacacagcgaagcccagccctttctatcttcaccttctgtctccacctccatctcatgacaactctctgcgtaggtggggtggcccctggaatcattttgcagatgaggatcttgaggcttcccaaggtcacagggagggtgacttgccaagcaaagatccagcacccagccctctggtccccagccctaggctcaccccactgcacttgctgctgctctacagagcagtgtttctaggggtcttgggaaaaaaattgaagcacagaagtggccagatgtgcctgctgtctcctggccacctcccacccctcaggcagccctatctgtggtgccagtgtgcaaggatcagcagccaggaggcagggtcttacctgcagcagtggtgatgcccaggagccggcaggtgtattccagcccagtccagaacacctggagctgcatggtgccaggggtgaggacaaagtcctggcagggcaggcagcaaagtcttcggccctgagatgctcccgaacacccttgtgtaggtaggaggctgctggctgtggctgcacaccggggccctgccttcccaaaccagtcctggccaccgcagcctggccgaggtgtgaatagggctcaccttctgtgctctcagcccgtgcccttgccaggcactcagcttaatcattaccttggaagaatgctcctgctgctcacacaaccccagcctgggctggagccgctcagccccagcgcagcccagccgcctgagatcggcgattagggctgggctggaggcagtctggagctggcarttaaccgtttctggctgggaggagggagccaaggagtgggccaggcccttcctcaccaagccatgcctagaaagtcacacctggatttcacacttgctgggggcctgtagtgtctggctctggaggggacagtgctcttgcaggtctgtgcttatgtgcatatgggagagaggagtgtgtctttaaatcaccagtagaaacaacttttgaaatgagttccaagctttattcttctgcgtataggtggattagaaagcttttcaaatctgtcccggatttggactctgactagacatacttagctcaggccccgccaygcagaggccttccttcctcattaacatgcatcccaacatgggacgtgggaaatcattttgattctttgttttgcgaggggagttgctatgtcaataattaaccgggtgaccttggggaaacccaaaggcatctgtgagccttggtaacttttgcagaaaataaatgtgaagttttggctgaattggtgtttttgatgtacttggagtgtccctgtagctgtttcaaggagcccagcctttacacttggacagtggtgggctttccctcattcttaatttactaacggatgtgctagattgaatggtattaagatttatctctcaggtgtttttctgaaatcttttacccctttgctcatataagatagaaaacaaaacaaccaaataaggaaaaaaactccaagcaaacccaatacacatgctcctcaacttatgatggggttatgtcccaaaaaacccatcagacattgaaaatattttaagttaaaaatgcacttaatccaaccaacctactgaacatcagagcttagcctggcctacttaaatgtgctcagaacacttagtttatggttgggcaaaatcatctaacacaaggtttatgttataaagtgtggagtagctcatgtaagaatatattgtagggcatgttgctagcccaggaaaacatcaaaatccaaaatttaaagtacaatttctactgaatgtacatcattttcacaccatcctaagttgaaccatggaaagccaaggtctgccaataataacggaaaactcaagaacaattagtttggcccttccctcccctcccttcccctcccctccctccccttctccttccccttccccttcctttctttcctcttttctttttttttttttttttgagacaaggtcttgtctgttgcccaggatggagtgcagtggcacaatctttgtggcctcaacctcccaggctcaggcgatccttccacctcagcctcctgagtagccgggaccacaggtgtgcaccatgcctggcttgcatgtttcttgcttgaggatgatacaccctcaacatatataatgaatagatattttttgctattaaaattattttaatttgattgattaatttgatcaagaatcatggcattccataaagattaccgttttttgtatttttccgccttgaatgagtttaggaacttctgtgctcgtgtgatcttcaagatcaagtttatgagtgtatgatttacatatttatttcctgggttagttgttttctattagcagactatcaacttcaatcttcttaaactttgacatatcttgacaccacacacacccactcccccaaatgcaggtgttccggtctctgtggcatatgctgaattgcacagatggagctgcgggggctgggcttcagcagcgatggcagctccctgtcctttaggaacccttgatttgcatgggtcgggaagctctggctggcccacagtgctcacttgcttcttgctggccaacagccacttatttttttttgtatctgatggtcacctgctcagaagatacgaattccttccgggcctggcttggcagggactgttcagtccacaggttagtctactgtctccctttcccagagactactttaggaatgagagggtgtgacccagttctggtcaaatagcccagacagggtgtgtgctgaggagcttctgggaaagcctctcttgcttttaacaagagggagaggaccagctgcactccctccctttggatgcacctgctcagggtggccagctgtctcctgttgtggcagggctcagccaaggccatcaccagctcaggtcctggcccatgagacaggagcagcactgggcagtgggggacgttttggagctgctaaacttacctgttcttaattgtcaaatgggtgatgtcggcttccagttagagctaagagcattgtgctgacggtggactgtgtctgagctgtgctctccccacgtccttttccgcaggaggcttttttttctgtacactgggctcaggttaggggagctgagaactaacaaggccgagggttatcctgggactgcccccataagagggagggaagaggagggtgttgggtgacagtggaaagaaagtagggcctgtggcaaaaaacaaaatatggaggaaccccagagaaagtccctcttgaagaacccgcaaagagggctctggtggaacttccaactcctctactaccatctaagcccatctgtggagcccccggaggagggggaggtctggctgggcgggtgtgctccttagacctctccggagttagagaagaggttgccaggaaccaaaggccacaccctaaaatagaagttggaagagaaggtggtgaagccccagacatccatgtctgacccagcagttgctaatggacccagaggtraaagagaaggggcatttcctggagaaatcagcgaacgcccggggagctctgcttctaacaggctgtgagacgggggaggacagagggaaggacagagagccccaaggcagtgagggaggtggaaaccagccgagtgcggaaaagtactctgagaagggagtctcaagttacagcattcatgaagcagagtggacaggggcccagctgcctggggaaaatggtgcaatgtagatattacacaaagaaagcacaattgccattgcatcttaaggagtccaaatctgggctagtgaggggaagctgggtaggggagcttttagctcaaagtaggggaagatgctccagcaacccgccacttggtgttaggctgagctgctgcaggaggtagtgacgacctggagcccatttgggtgctgggttgggaaggatgtcccggacagttctcacacactgactcaaccatttggacccaggagtctgtgattctgggcatccgcaattcctgaaagaaccctgaaagcgctgagaagttgaaaaggacttctggaagacaatctctgctggaacccagcatacaaaggaccagagctggggcttccccctctgctggttctttcttgtccatggtccttgggtgtttggtcaggaagagcagccatgtatgaagggaaggaggccagaagaggcgcgaggggaggggagaggaggggaggggaggggaggggacaggaggggagcaaagcccggctttgcagttagcagctgtgtggcctgggaaattcgttactctctcggtcctaatttcctcatctgtaaaatgggtctagaagttgtcttactgggtcagatatactgtgtctagagagggtgccaggaaatggaagctaatatcataagggaacaaagaaaactggccaccctgacaaatcctgcataggttttgttataggattccacctactgaaccaacactccaaactggggacacagcctggccccctggccatggaaaattggggtaaagggagtagcttttctttggaatgatgggctcatccaaagcccatattcaccatattgtttcatttcactgtacactaagcaaagtgtctatgtgcgggagcagtaggaagacagactcaataaacctataatcaagtcccttggcagtcagtcatgtctgacctccagggcttgtgaaaaacagttagtgtttgcttaacattaaatgcattccaggtattgcgctaaatgatatatgaacaaccctattcttcccattttacagatgagggagcagggtcatgtgaggttaagtggacttgcccaaggcttgaccctctgctgccactctggtttcataggtacctcaggcattagagctgcctagtgagaagagaccgtctgcacagcctcggggcagatgatttgggaggactagaggcagaggtgttgatctcactgttcctagatctgcagagctgatgatggatttggggaaggctcccatcatcttccttccaggtggtccaggygaataagctccccyagcagtcaagaccacaagtcycccagccttgactggagcttctattaatataaatagatgctttgtagacattcccagctgtaggggatggacataaattgtgcaccattgayagtagcacacaaatgccaaatgcctgggtggctctggggagcatgagaagtcgggggaggatgaaacaggggtgtgtgttactcttcagctgtggggtgaggaaatttccacaacacagcaggaaggtcatgggcattactcaacgccagkggctgtccctggagacaagtcaccagagctaacctaagccttttatttcttctgaaccccctccactacctcatccctcaactcaacgtcagcagaagaaaatagagaccctcagacgagcagcccgcatacctctcgcatccctttcaaccatccctcacctgtcctttcctgccactagaggaaggggagttaattatctcagcttgkgcttccaatcactgacctcatatgtcctctgggactctagatcatcaattaagtctctgtcccatgtcttccaattttcccctctacctcttcccaccagccaaagcttttgtgtacagaacagctttcccctgcaaactactctcagtctctcctcacatcaccaccaacactctggaaagtggtttacttttaccagcaccttccattatgtcttcattttccacccacttctccatctgccaagaggtggcttttacctgcttttgtagcactgtggctggccatgccagtctagaagctggtcaccaagtccagtggcctaatttccatgctcattcagttcccattgcctggactttttagcatttgaaaccaccctgtccttctggacaatctcccatatatattattctctggtaaacatcctacacgcaatgrggcttgcattctttcttttttctgtgcatgctttacagactcacctttctgtgctgtttcctgggttggtgatctgtggttggcagccttcaatgaaccaccctcctgttattcacatccttatgtggtcccctcccacattatacctgggtttgcctataggactgagcacagcagaagtggtagcaatagtccaagtgttgagttataaaagataagaccttggtcactctctcactcatgggttgctctcttagggggaagccagttgcctccatggggagccctgcagagaggcccatgcagtgaggaacwgagggctcttgccagcagctgccatgttagggagcttaaaggctgatgccccagccccagttgaaccttcagattatggcagccccagctgacagcatggctacaacctcatgaaaggccttgagccagagctacccagctaagctgctcccaggtaccctgagaaactgtgagataatagatgcttgttgtttcaagttaccaggtgtcagggtaatctgtcactcagcaatagaccgaggcatcatttgcaaccctctctctcccatccactctccgctctcttcctggttattgctaaggggctctgtggcctgagcaccataagcacaaggactgttcctagcaaggatttacaccagcatttctcctcmgccatgagctccatttccacctgcctattggtcacctctstgtcacactcaatgtattccaaatcaaaccatctttccacctcaattcctttccgcttcctggactttacatcttggccactggtttaattattacccttgccaccaaatctggaaacaaaataagttttgacaatatttcttcctcttccgttctgccaatcctcatcctcattgctccacatctgccatctctcatctgtggctcccatccctctcatttcttgtacagatgctgcmccagtctcctaatgagcctcccagcctccagcatcatccctctccaatctgtcctccaactgctggaattcactttggaaacagcaggtcttcacaattacagccctgcttaagactcccagagattttccattgcctaaagtctgagttcctttgtccagatcccaggctttctacaagcttcccccgcaccacctctctatcttccaccttccatccttctccttctcctccagactgactcccaggccatgcagacaaatgcttcaaatgctttccttttacctttgtcatgttctccttattcttttgtttcctccttctccttttttccctcaacattctcttcttctcatcatcattacacacattatycaaagtccagatcagtcaccccccgacagttgttgatccttacagtcagagtgagttacctgccctccagcccccagcactcatctctttgtatttttttttttttaagatggagtctctctctgtcacccaggctggagtgcagtggctctatcttggctcactgcagcgcctgcatcctgggttcaggtgattctcccacctcagcctcccaagtagctgggactacaggtgcgtgctgccacatctgactattttattttttatttttagtagagacggggttttgccatgttgcccagactggtctcaaactcctgggctcaaatgatcctcccgccttgacctcacaaagtgctgggattacaggcacgagccaccgtgcccagcccctttgtatwtgaattccctaaattaatgctgacatttcccaccagctgggaagatttgtaaaatcagaggtggtagatgatggaatgaatgcaggaggcttgtccaagggggctcttttatttagattcttttctgtagaatcaattggccaacatccatgaagcaggtaaagccacacacccaactgtggaacagggtgcagtggatacattttcaggttcacctttgtccctcacttctcccttcttctctgagttagatgcagtccctgcttcctgcctcacactgtgggcagtatctagagtacgcgcagggcttgtgttcccagcaaagcagagaggccctgttattgtgcatgattctcctgaccattgcccagcaagtctatctttagcttccagggcattagaactgcctagtccactgggcattggtctgtgcgggatggagtgagatacctgctccacaatggggctgcagaacagttggctctgctccccctgcagcacatatgggggccttagcagctgtcatttgccacctgatttctggtagggggatggtgcagtggyttttgagccagattacctgggggtgaatcctgattggagctaagggtcagtgggagcttgtgcagccacactttttgagcattggtttttctgttcacaaagaggtagttgaacccttcagatcctcgtgagtcactgaagctgagatctttatcaccatgagctccatttcacctaagcctccttgaaacagggcactgacagagtgagagattgccatgccagctggggtcaggccagggatcacctctttgctgcacaagctcattggacgtccttcacacggccctgctgggtagctctgtctcctgggatgagctgtcgtgaggcagatttacaatgtctggtcacggtagagtctgaaccttcctgggcctggccttctagatgaaggcagatttctgtaaattggtgtctgacgtcagtcctccccagagacccaggggactaagtacacagcattcaagaggttaagtccccaatgcctccaggaacggattccaacatgcagaggaagcaatatttcaggcgaaggcaccgagtgtctgtggacagggtccccctctgctcttgctgtgagaaaagggtttcctcattaatcagagcctccaggggcaaggggctggcccaggagaaagcacaaaggatcctctgtgagggctgggctgtgctcttcaaggggtgtagggctggagtagactttggagggaagctacaacctcccatctgtgtcagtgctttttataataatgtctctgaacatttgattttttcagtttaaattaattctcaaaagatggctaaagttctatcaggaaaaatgagaatttagtcagtaaaagtcatttgtaacttccctaagtgttaaaattgtgttttattcatttggctctgttcattctcccgccatcaaccaattgccaatccacatagcaaaaatacacacttcctggcataactgaaaaacaaaacaaaaaacaggcttatttttgaaaacacagggacttccagatacatatagctgctcagtgatcggcatttggctcttccccaccaaaaaagaaagtgagaatttaaaaaatgttcattctggggacacagataagagcagacaggaattctggtgaagggttggggggtaactgatcttgtggaacacaggagggttctgcctgcagtgggctgttcctgtgagcaatgagtgtttcacctgagcccacctgaagggctttgcacccagaaacaccaggaattaaggagcagagattgggtttggggctgaaaatgaggggatagctgaaagtctgcctctagagcagtcggaccccaatctcctcccaccccacccaatctggggacccccatccctcctctcctccctgccccctccctgcccttctcctgcttccccatccaatgcagaccagagatttattctccagatgaactgagtggtgacgggccaggccttggcaggctgggtgacacagaggatggagatggggactgaagccagacttgtgccaactagtggctcttcagtccccgtccccagaacagcagcaggtacctctatcccaggcagttagaggactcttcctagagagtgtcagtaaccccagaaaagacagggatatggtttggctgtgtccccacgcaaatcgcatcttgaattgtaactcccataattcccatacgttgtgagaggaacccagcaggaggtgattgaattatgggggtgggtctttcctgcgctgttcttatgatagtgaatgagtctcatgagatctggtggttttaaaaatgggagtttccctgcacaagctctctctttgcctgctgccatgcacataagatgtgacttgcccctccttgccttctgccatgattgtgaggcctcctcagccatgtggaactgtaagtccagtaaacctctttcttttgtaaattgcccagtcttgggtatgtcttcatcagcagtgtgaaaatggactaatacagggatactaacatttgygggaccaaaaattctatgaccccctggtgaagccaataagtctttgaaatcttcaacactcacrtgtaataatttcaatcagtttttcagggcattgtcytaggtatgaggacagcccaaagtcagctggtatttgaggaaaggatccaacatgaagcacagaaaccaggacaaacggaaaaaggggacctggagagggcagtgcagccaatgtaggacacatacagaaaacttaaaaaaataatataccctacagttactatactgagtgatatatgagaagatgttacatctataaaacaaggacagaataccatgaaaagtaaccagaccacaagaacctcaaaattaaagacaggcaaaaaattaaaaaacccaaataaaataaaacaagaaagcaacagaatggttagaagctaaaatcaagtagaacaaaaagacaaagggaaatagaagcgaaagaataaaacaaattatagggtttattctcaaggccagtctmctgacctacaagagttccagaaacagaacggggggaggaaagcttcaaagcgtaatgcaagaaaatttcccaaaactgaacaaaaggagtcttcaaagtgattatgtgttaggaagatgggaagagggttagtgatggggaattcaaaagttaatgcctacagctaatcaattaaaaattgcaacatgaatatagtaccaaaaatatgaaagtgaagatgagaagaatttcctagaagtgttaatgacaatgtttgtctttggggagaactgggggtggaatgggtgaaatgggactgctttgtgttactgttgtttttctttgtctttttaagactcactgtttcttggctttttaaactcagtgcatgtattactttgaaaaaaataaaaaagtatttaaaaaaaagaaacaggcataaacattaagaaaatactacctccccatccagattttaatatactaaaatacatccttttagatgtatttttatgcatatacagaaaaacatttccttaccataaaaagttaacatgcatgttgctaaataatgatttatttaacctaaatactggaatcatctgtgtgccaacagaaatattcagagtgcttatacctggatgtctcactacagatactgcagaaaagaatgaggccctgtacagttcacagcaataaaggctacatgaattgagtgccataagggagaaataagcaggctgagctgacycagggaggcttctcagagaaggtgttttcaggaatcaccccaagtcacaaatgggaggcctcagcacccaagaggatgaaatcagcccaggatcatgccagcccgtgccacccacagccactgaagtgcttgtctgagtcttgctggaaacatgggcccatgttagtgattatgagccttgcagcagcagactcaaagctttctctgctgagaagtttccagcagttccatcagtgcgagccgggaactgatgacctgaacgacctggagcatggtgagatccctgctgctgggggttttgggagaggccaggctacctctctgagctgctggcaagcgattctgagtttggggcagagggcatgcccccatgaccttccatgtgggctgatgcgcccagctctgaccctactgagtcagctcctgtctgtatgttcccaactttaaaagccaggctctcacttttcctctgcctttttgcttttcctgtttccttgctgattcaggctgtgggtagagatagttccttgtgcctgtaggacagaggtccctgttttccttgctgtctgtcagggtagggctgttcccagcttctcgaagggcccacattcctttgtttgcagcttttctctgtcttcaaaccagcaaatgtgacccagtccctctcacctgtgagtctctacttctttgctcctctctttcttccaactgggaagggagtgccattgtaattacaatgggcccacctggatgacccaggctagtcagttgctgtatcttcaggtcagctggttagcagccttaattctgtctgcagcctgaattccctttatacagcaacacaacactcacaggtgccggggattaggacctggacrctattctgccccatctgctctccatccttcctccacacactctgcctctgctgaagattggggtggggaagttcagcacaagaagtcagagtgctttggttagacttgcagagaatgctcatgtcagagaaaaagctacactgtgggaaagtagaaagcagcagcccaggccggcggttctacaaggaggctcccaggaccaacggcatcagcccaatcaggaacctgttagaaagacaaattatggccccatccagacccactgaatcacaaactctggggtggggcccagcagtcttggtttcacaaaccctctaggagattctgatgagattctttgctccagaacagccaccctgcttctcttgctttggttctggtgggcccatcagggaaactgcaggtagggccctctgcatcgtgcttggcccaaggagttctttttagactgctggtgcctcccagtcactttgtgccacccccagaggacgggtagctcaatttcctcagaagccaggctgctaatgccctgaaaaggtaacatgacccagaaaatcgaccagcaggaagtgaaaagcctttggcagggtctccagggaagcctgcctggctcctggctcagacagggatggaggaaggcaggactgcaggggaggagcctcaagacagctgcatgcaggacctgggcagcctgagctttgtggtgccagctgcagggcttctctgcatgtggggctgtctccatggccagagatcttgaccttggaggatgacgtgcatggaactccttggggttagcaagcacccaggtggcggggggacttccagattgtgcagtggctcattgctgtagtcccagcactttgcaaggccaaggtgggcagatcacttgaggtaaggagttcaagaccagcctagccaacatggtgaaactctgtctctactaaaaatacaaaaattagctgggtgtggtggtgtgtgcctgtagtcccagctactggggaggctgaggcaggagaattgcttgaccctgggaggtggaagttgtagtgagctgcgattatgccactgcattccagcctgggcaacagagcgaggctctgtctcaaaacaaacaaaaaacaagcaaacaaaaacttttctgagaatcccagatccattcttcacctaagtgtcacttaagacattgggcctcacacttgactgcccataggaatcacctgggagctttcaaaagtcctgatgcccaggtcacacctcaaaccaattccatcagaatgagtgaggtgggacccagtcttagtaccttttctaaggctccccaggtaatttcaatgtgtacacaatgtgcaggcaatgttgagttgaatactacttgtctaaaagtggctcttagtcctggctgcacattaatatcaactgggaaacatttaaaaaaataataaagcaggctgcccccgtgccataagccagagtctctggggagggggcctgagcattgcaggtggtaaamgtccccaggtgattgtactgaagcacagcagggttgaaaccctggcaccacgggctgtggtgctgtctcttgctggctgtgtacagtccctgggctcagccccaccatctctagggtggtattgtcgtttttaaactccaaggcatgacagtgctcagtaagccttcctttgcatcctttgttgtttgcaaactggctcttatttgtgagcctcaaggaaacctgtggcagaagtaaggcttgagcmccacacatgagacctgagagttgccccagaggtggcccgtgtaggtctgggttggctttagagattatttttaaaaataaagatctaggacacatattttgatagcttacagaatgattttcctagtttatctttttgctcttgcagttctgtataacccacagagaaaaaccagacaaaggaatcaagaagggaccactcctcagcacttgcaggtgttcaaagataaactgaggcacatattaaaatattaaagagattttcttgagcaactcacgaattgggcagtgccagatagaaagaagttagggccctgaggaaggcatgcgagaggaaggcttttacaaggtggaggtgggagcaaggcaaagaaaatacatgcttgtttacagtgaatagtaatttcattcggatcattccagtggaaagtccccagttagagagtagttggtggtttctgattggttaagcttaactagtagaaagtcgccagttaggggttagtcagcagtttctgataggcctagaatatgactgtttatgctgagtcggcttgtggattgctaacgaaggagttggaggcactgcagctgcctsagcccaatggcctcccgattaatttttgtttttaacacaggtatgacaacacagtggccacatgtgccttccaggtcccgggttgggaaggttggtgaggtagcagcagcagctccccagtgcagaaactgaaggctctgctcctggaygccgctcttcctgatgggcagccaatacttctcacaagataccctctctgcagctctcagctgctgaggttcactttgtggcttccaatgtcagtgggccactcttcctgagatacaggcacccatagtatcatgtcatgtggttgttaaaagcagggtgggtgggctggtcagtttcagctatttaccagctgcatgaccttggtcaagtcactcagcttctcttagcctaggtcaggttatctgtttttaatgggtatgcattttagtttataaacacttgagtataaaaattgtcccattctccaaattagataactgctctaatttccaatcactgagctggtggaagacaatgcactctgtccagctgagcaagtatcaagagttctaaatggttcaagcatggctgggcatagtggctcacacctgtatgatcccagcactttgggagactgaggcaggaggattgcttgagttcaggagttcaasaccagcctgggcaacatagtgagacactgtctctacaaaaagtttaaaaaaattagctgggcatggtggcatgtgcctgtggtctcagctacttgggaggctgaggcaggaggatcacttgagcccaggagcttgagactgcagaaagctgtgatcgcaccactgcactccagcctgggcaacagagcaaaacattgtctcaaaaaaaaaaaaaagaaagaaagaaagaaaaaaaggcctaagcattcagaagaggctctctggcattcattccacactgaaattctgaaatcctctttgcaaatccagaggtttcttgaaggcaggtgactgggtcacctcataggcctatggcagcagagtgcacaagtggccacagtcctcctctccttcccatgtccacactctttataatgtggctttgcagcagcttctctcccctctgaatctgggctggactgtgtctggctctggccaatagyggagtgatgaggggccagctctggacctgcatctggctgcaagacctccatgccctgcattctctctctccctgaacccaccccgttgcctctggagcaagtctggctagctggctggaggagcagggagactgtgggcccaactgcaaggcgccccccagaccagtcagcccctgcccacccagcagcagaagcacacaaagaaccatgtagctgagtctgcctcaaattgccaatctgcagtactgggagataataagtagctgcatttaagtcattagctttagaaggcttattaccctgacagagcagtctttatcctctctcagttctctgcaaggagggagaccaagctgctgctacttacagaaaggaaccccaccatccccaacctctctccttcctagtgttgctaattccctctcagccttggcttctttcagcaaactaaagcctatgcagcaggtgcatccttctcctgggcaccgtttgacttgaggtattgttcctgaaacatgaatgacagccacagctcccttgggaggggactgctatgtcagaacacacagtgggttccctttctagatgaggcagcatcataccattcttgttctctctgtagtccctagagcccggaaagcaaaggaccatctctgcaggcaaagcaggagtggcacctgccagtatctgctaaaggaagtcggaatgtgcgggtactgggtccgcagtcactgctaaatgaagatggaatatgtgggtgctgggcacagcactgggcccgtgatcactgctaaatgaagatggaatgtgtgggtgctgggcatggcgctaggcccgtggtcactgctaaatgaagatggaatatactggtgctgggcacggtgctggacccgcggtctctattaaatgaagatggaatgtgtgggtgttgggcacggcactgggcccatggtcactattaaatgaagatggaatgtgggtgctgggcatggtgctgggcccatggtcactgctgaatgaagatggaatatgtgggtgctgggcacagcgctgggcccgcggtcactgctaaatgaagatggaatgtgcaggtgctgggcctgtggtcactgtgaagtggtggggtggggctgtttctacctcactgctgccctgtccacactaggcttgctctggccttcctgttgcctggggcctgccctctcttgctgctgcagaacaggcaggataatctctctctagggcaaggaatgcactcgggccagggactcctcaccaccagcttgaggggctgtgcccaaccctgcctccttcaggaaggtgtcccaagttctgtccttgcctaagcagctggcacctgtgctcaaaatatttattkcccccatgccagctgctctcccacttgtcctgtcaaagggagagtgggggcctgggggggatcttgctgcatcccagcccaagcccatcagatgtgggggacttttgcccctctgaccctgctcctcatgaggcacagtctgcacgaagtgacagccccggcrctacctgagcccatgggactcagctcttcatcctctcagggcctcttttagtctaggtgcccagggcactgagagggacctggagtgacaggaacacttgactcatggatcagaggtggagcagcagctcagggtggctgtgtgccctccctgggggtcattccctctctcttgtcctaggagcttggggtgcccatgcttgaggcaggaggctgtgtgctcctgggagctggccrtggtgccatcttccagggccatttctcatgcctcccagtttccagtccctcctgactcccctccttctgggtcctccgcggcacaatgatatatttcatatttctatggaaggggtgtcatgtctcagcccccacactggcacacacacaaaaatgtatatgtgcatatacatatatatatatatatattttttttttgccaagtaagtcagcttggactcaaatgtcagtttctttgaacagatttgtcartgacctcaaattaaactctcccatttgaggaatggcaggtgctgcccttaatatatcttgcaggcctgggagtgacaggtgtggggcctgctcacctcggatcaaccctctgggccttgatgatctcatctgttcaatgagcatcacaaacatccttccacctcagacaccctgagattgtaaaatgaggtgaaaacttgctgagcaagggaaatgatccgttagcaaggacatgggcatcctctcccaagctcttagctcttgtcaaggttcccaagagcgcacctctataaaaattctagatctgaaggagttcaactcattagctaggaaaaacaccttcttgctcactcttgtcagactttagaatgtcagcatatgaacaagctggaatttatattcatagtgttggccgctgtttggcacttgcttggattttgagatatgaattatactgtgagtgtgtcctgctctagggcttaggttatttattatttgaggttaatgtatgtggaggattggatgtggaccaggcgagtctggccagggacagattacagggccctgggttattttctcttgttctttacccattcatgttgatgccaattattttgaaaatgaacaatggtccataaatatgagagcaaagcttgggtgcattgccctgagccttgctgtcctccctggcactggtttgtgcttcctcttctggggtgcacaggagaggcagattggggcaagagagattggcagtatgatagcactgggactgaccctcagaatccctagtctgagagtgacatattaccaagctttctagacaggctagtagctcctgtcacctctgtttctaaggaaagaaacatagagacagttacaaatttgttgagattaactttggcaatgccttacattgcccttaaagtatagggtacacaggctggtgtacagtacagaaacagtgcatagtccagaaatagcacaccacaaatgaacgctttagaccaacataggcgtgagatggatgcgtgtgggatgcaatctgacaatacgcatagaatagagcaaaaggccagtccacatgcattaggatggctgctaccagaagaatgggaaaggcaagagtgggcgaggacgtttagaaactggagccctgtgcattgctggtgggaatggaaaattgcacatccattgtggaaaacagcatgacagttattcaaaaggcaaacacataagtgaaataagcctgatgcagaaacacaaatattgcacattctcactcatacttgggagctaaaaacattgatctcacggaggtaaagagtagaatgacagacaccagagactgtggaaggtagcagggaggagagatgaagagggatcggtcaatggttaaaatgatacagagaggtggaaggaataagttctagtgtttcatagcacagtagggtgactttagtgaaccataatttattatgtatttctttttttattattatactttaagttttagggtacatgtgcacaatgtgcaggtttgttacatatgtatacatgtgccatgttggtgtgcagcacccattaactcatcatttagcattaggtatatctcctaatgctatccctcccccctgcccccaccccacaacagtctattatgtatttcaaaatagcgagcagagaagatctgtaacattcccaacacaaatgtttggggtgatggatatcccagttacccaaatttggtcgttacacattgtacgcatatatcaaaatagtacatgtaccacataaatatgtacaaccctgatgtatccatacaaattaaaaataataagttaaacactaaatggaatcaccatgggatccagcaatcccacttccaggtgaagytcactsaaataagtcatacacaaaaggacaaatgtagtatgatgtgtttacactgatatgaagctacctagaataggcagattcttagggacagaaagtcagatagaggctgcagggacctgtggcaggggaggatgcagagttaccatttaattgggacagagtttctgctggggaagataagacagttccggaggtggatgatggtgtgattgcacaacattgtagatgtccccaatgccacttaaaaattgttagaattgtaaattttatgttatgtacattttattataagaaaaaaaggagagcaaaggcagctgtgggtgagttcatgatgtttcccctgagttccagcaggtcccatctgtgatgtcccacagtcctgttgcatgggtagggctggtgacgttgctggtcccattttatagatgactaaacaagtcacagggacatacctgtgtgttctcattcacattcctgttcattgtctgcctccctacactggggtgtgcattctgtcagggcagggacctggtggggccgctcaccccagtgttctcagggcctggcacatataagatatttgcactgaatgaagacgtgaatggcacactttgtgtgaggctggccccagagctagtaaggagcaggcccagaacactgcctggtcctcctgctctggctctgtattctccaatgcctcaggctgcctagagggcgagcaggaaccgcatacacatgaaggcccttcctaccacaaaccagggaaaatggcctctgaacagctgcacttggacaacaggcctctgccttggggtcaccccattttcttagcttgaactcctcccagcctcccactccaccctacttagaccttgtcccagtgctggcaggtgtgcccacacaggtgtggcctcttctcctgtctcctcacctctgcaccgaggcatattctgcttccccagtcctgggtcagagtgggaagctgacctcatccctcccagggtggccaagagccagtagctggcggggcacacttcatagggaggtagagcctgaccccaggctcaaccctcacctgtgcagccttctcctcccacatcctcctcccaggggggcctgtgcctggggtcaccattgcatctccacttctccccaccctggcacagtgtgcctgtctggtctgcgctggccacagatccagaggctccttgctgaacctgcaattgctgccctggtggacccagttacacccctgctttctgggtgtggtgtggaaaaggccaggaagattgatgagtggaagagaaggaagagggaaggagaggcctgtctcccaccacacccatccttttatgaagtcaggctctcagagtgacagggagtgacaggcttgtaaaactgtaaaaactactgggcacagacatgatctgctagctaagcatgtgagcatctgtcctccaatctcttcttagcctgcaccctgtattcaagttcatgggcaccatcrgtttcttctgcttcagaacagcctaaagcggctcatctcttctcagtcctggtccttgctttaagccttctgaggcttctaaattggctgataccattggcatctgccygtatctcaggcttaaaacctcagggccagcatttgcttctagttttcctctagtgcttcccagttcaacagaagccctgccctttccacctccctggctaccaccctakcggctgctggggccccagggtctgcctatttatcctctgatgcggtgccatcgactgctggctgactgtctgccacacgacagccagggggtggctcaaaaacacagaataaccatgttattccccagtgtaagatttcaacagctttctagttcccctgcaggtcatgtaggcagccctcatgaagctctgggacaatagtgtgctggcaggtaagtatttaacaaaaactgtccagggaaaaagcccttacctatagcatttgccaatttctgtggtataaatactcctactgtggctgatttcaagccacccacatgatgtcactgagtgcagggctgggaagagatgcctagaatcacaatgttagacagcatctcccctgtgtagtgcaatagacactaaatgaccaagagcagagataagaggaaaacgtagtcaaataattaggatgtgatgagtttggggtacttattacactttatctaatttatttaattgaaaataacttaatgatggctttgtttaacatccagctctaaaaatagctgaaaatttaaccatcagctctcacaagctagcacaagtcaactgcagtgcataactgcctgtgaccaagtttgtctccgttttgactgggggtatagcgaagggccatgggtttgggagtccagccgagtcagcttgcacatggactcttctctgctttccagtgaccaagtccagcatggtaggtcttgtcctactctagtttcttgagcagaatctcaggtcctccataaagtggtcctgtcttgcagttctcagtttctttcaacttcaggagtctgtttactcccatatgtgtttgtgatatagttgcagcagccagaaccaggccctgccatggcctctgcagggtacacaggccatgccctccatgtggctctgctttccctgaccacccatctcmttggcaccatcattctcgcagagctggaaggcagaagctctgtcctgtaatcagtgtggtggggygagctggacagcctgtggcctgggctctgtgtctgcagccctcttgctgtgctgaatgcacactgttggatgtcacttgatggttccctagaataaattagtggagttagacttcttcctgcagaggaaaatgtattagaaacaaaatcaaagcccaatcaaacaaaagaagctctgagcttgcacatcaggtgtattgtctcctgggaatgcaggaagttggaaaagtccaggaagattaatgagtgaaagagaaggaagagggaaggagagccctgtctcccaccacgcccatccttttatgaggtcaggctctcagagaactgctgcttttgcttatggagtcagaacaagccctagcgaccttcacacctgcctaaggagctcaagtagagtccaccytctgaatcgagatcacttctttttctcccatggaggggcttgtgcacgcttggtaaagccatcctcagattgggatccacagtgaagtgagtgctagaggcacaatccagagcctgagaacctggaggacaggccatcctggacaccagcatggagtcagctatccatggaattgagatacaaagcatcacacacccaacacttcatctctaattcttgcatgcttttcatttgtggaaccagagtgcagatggatttgaaaagccctggactctggtaaaatgccatttgaaattgttatatggttttccattaggagaagtccaaggaattggtaagasttatggtggacattgtacagrtcattgcataataatttttctttgcaattaattaatcttcatctctgatattcacttcaaatatgtgatgataaaacgggaagggacccttgcttgggcaaaaacaacaacatagcttctcttgaagactgcttatagcaatggtgccagcacaaggtttaatgtgaactgacctggtccttgggccaggattctgggtccttggtgtattcctcagtcctcccgaagggcttctgactacccaggagaactggtaggccctttgcaatctacccagacattctcctggccctctgtatcttgtctctttgtctgcccaccagcgtgagcatcccagcacccatgagcccttccctgaccaccccaatagacrtggccatttatcttcaatgctgccagaaaatctcatccatttgctatggttgcccttatctcattgtaatcatcatcattgtctcattgtaaccactaatatttctttttcttttcttttctttttttttgagacagtctcgctctgtcacccaggctggagtgcagtggygcaatctcggctcactgcaacctctgcctcctgggttcaagcaattttcctgcctcagcctcctgagtagctgggattacaggcatccaccaccaagcccggctaatttttgkatttttttttttttttttttttgagatggattctcgctctgtcgcccgggctggagcgcagtggcgcaatcttggctcactgaaagctccgccccccgggttcattccattctcctgcctcagcctcccgagtagctgggactacaggcacctgccaccacgcccggctaatttttttttttttttttggtatttttgtagagatggggtttcacatgttggctaggatggtctcaaactcctgacctcaggtgatccgtctgcctcagcctcccaaagtgctgggattacatgtgctgctaatatttctgaacactcacaagatgctaagcacagggctgagcagtttcagctgtctgtgtgcctgactccctccacccctgcttctgtgagttcctgggaggcaggaaccatgtttaatacaactcagtcccctttatctggtggctaccacaatgcttggtttacagtaggtgtccctaaaaatatttgttaaaggaacttgcatcatttgatttgtaaccatgtgttttataaaatcaatctcatttctatttactgcttgaataatggctttagtcctttgtcttttgcaagaaggcccttctctcctctggagggccgtgttcctgtaataagtgtagtgcactcacaggatgcttacttaggcctgcaagcttagtgcagtttcttctcccttcccaatgggctgagactggaggactccatggctggggccagaagctgtttcctgtggagcggccccagtgctgatcttgctcctgctgccacggggcgtgccacggggtgtgggtgcttctgctgcccagctggggtctcactcacatgcctaggttggtatacttggataatcaaagttcaatatatgtaccccatgacagggggatgtctttgttcctgttgttataacaaaataccttacactgtgtaatctgtaaagaacagaaacttatttctcacagctcttcgaggctgggaaggtgaagctcaaggcagtggcaggtgagggcctggtctctttgcttccaaggtgacaccttgaatggtgacaccttgaatgcttcatcctcacatggcagaagagcaggacagagaacaaactcccgcaagcccttttatagcggtgcagtgctcatgacctaaatacctcccaaaaggtcccaccttccaaacactgctgcactggggattaagtttccaacacatgaattttggaggggacatactcaaaccatagcaagatgtttacatggtgatgttggaaattgtgcagaccctcagctctgacctacctaagggacttgtcagggccagctgaacgcaggtctatcttggggccaacaggtctgaagcaggagttgtaaaccctagtctcactgtacttcattgcaaaagaaagttggagaaagtagaagttaatggatgagagaggacttcaggtagctttttttctccctaatcaattgcttcataaaatgcatacatgattggaatttcctgcaggagagaagggggagggsagagagagagagagagagagagagagagagagagagagagagagagagagagagagagrgagaacatcaccctgtagtccccgccccatttttctgctgcccttacaacaaaactcctgagtgagtggcctgcatctgctgtctctctgttgtgtggcgtaggaaatccttccctccccaccaccgttggggtgtagaaatggtataattatgtggctaatatagtcaaagtgtgttgactacctggatactttggtgtgtaaggttgggttttctgagtcatccatagctgatgttggtatttagcaatttagaacaattctgcattcacagaacgcctttggtcagcctgtccctgccaggcttgggggacacagaggtgaaacaaatgactggactccctgtgtccgaggagtttctgatttaggagctcaggactagagggaggcaggcactggatagtgatccgagaatgcactgcatagacgctgccttcagaggattcagggagaggcaagggtagagcagtgtccgtgtgggcytcgaaacccttcctcagcaagtcaccacatctgactcagttctggatttcagggcctgtaggattgggacatggacccccttcagtcttcacaggccagggccaccccttcccactgagtcacagacctccatatggttcctagacccatgatccccactgagagggcttttaaaaaattgaggtacatacaacacacgattgttaaacaaaaattataggaggccattgttttgaactaaactgcattaggccccaacaggccagactaaaaatcaaaatggagtcagccatgctcagaaaactgaaactgagtaattatctgggctgagaaatcagatgagataacatccacatttcccacacaggttcgctttcaatgttcagttggcgtaatgatgaagttcatgccctcaatccttataaaagagtaacctgaagcaacctggtgttaatcaatctgttatttttctgttattctgtccgggtcccatcttataagaaaagtaatgttgaaatgaacaatgtgctttttgttctttctttttgcttttttcagccctttctctgtctacaaaaccaacttcctcgcccagctcatgggaacacttattctgttgtatagaatgaagtgttgcttgattctagaatcgtaagtaaagccaattgagatctttatatctgttgtaattttgtcttttgacacagtaacacgcgtgatttaagccttcagtttgcagaattttgataatcatttatacctgtttaactacactcaaaacaaaatgtgaaacattgtcagcctctaagaagcccctttctacccctttccaatyggccaccaacaaccatactttatttcagtctctgtggattcattttgatgattctagatgtagtataaaaggaaccataaaatatgtacctttttgtgtctggcttcttaatttttttaaatcttcaaatatgtactgagttctttttttaaattttatttttccataagttattggggtacaggtggtatttggttacatgagtaagttctttagtggagatttgtaagaacctggtgcgcccatcacctgagtagcatacgctgcaccatatctgttttcttttatccctcgcccgtctcctactcttccccccaagtccccaaattccattgtatcatttcttatgcctttgcgacctaatagcttagctcccacatatcagtgagaacatatgatgtttgggttttcattcctgagttacttcacttagaataatagtatctaatctcatctaggtcattgcaaatgctgttaattcattcctttttatgtctgagtagtattccatcatatatatatgccagagattccttatccacttgttgattgatgggcatttggtttgattccatgattttgcttttgtgaattgtgctgctataaacatgcatgtgcaagtatctttttcaaataatgacttcttttcctctggktagatacccaggagtgggattgctggatcagattcacacattcaggttttcataccrgtagttcatttccttttattagaccacaattcatttagccattcacccattgtttctaggacttttttggctgttatgaagaaaattgctgcaaacattcaggtacagttctcttttgtagacacaggctcgtatttcttcaggggtgaatacgcacaagtgggattgctgagtcacagggctgatggacatttagcttgacagaaactaggagctgtgctctgatgtgggggcgcccctgcaggaccctgatgctcactgagagccaatgccttgagagtcagccaggtgaacccagctctgcctgcgtggcaaaatgagaaatatatatttggtctttgaacctagatctggcagagagctcctaaaactcttggaatttcctgagtgacaggaatgttttyttttgtttttcataatgagcccctttgactatacccaagtttattccaaggaggcaatgcctggcaggccccgagacagcctcaggatggagctggttgccagagggactggccacaggattagagggtgggaacttgcagcctgtctgctgaccttccgggaaggaggaggatctggagatggagtgcagtcaccaatggctgatgatttaatcatgatgcctacataacaaaacttcagtaaaatatcggaagcaggaggctaatggagcttcagggctgggggacacgtaggtgcacccagagagggtgtgagagctccgtgcactgactccccatccagcctgcccggtgcccccttccattcatttgtgtctttagaatatgactgtaattatgaagagtgtcctcctgagtcctgtgagtcattcaagtgcattgttaaacctaagggggagtcatgggcacccccaaatttgtagttggccaggcagaagtgtgggtgtcctggggattgcatttgcagttgggtctgaatgggggcagtcttgtgggatggagcctcaccctgtgggggctgagtaactctaggtgttcagtgtcagaatggaattgaattgtttgacatgcagttggtgtcagagaattggtattggaaagatgtaatggcgttatgaaaaccacatgggctcattcttagcacccttccactgtccatttttttctgtgcccgttgttttctgagctgccctttgaatgacaggacctgcttgtgttgggacagaagagtggtgagaaagacctcctcggaggcctggggcatgtgtgatgctccagtgaaaacaacagaatcagggtgtgagcaggcatctccgtggatttgccagacgcaatttaccaatcttctcagcacagactcttacaaagactgcattcctgactatgtcacagagcccaggagggcaggcagaaagcataaaccacccgtgtgagcagaggaargtggcgtggagaagtcgtgtaagaaccctttaatggatatgtaaatggcatcagtgagggagrctaaatggcagtggagtgttgcttagaggcgttttatgcattttatgatgttttgtgcatttgaaaatactggtaacaggargagagggaccctatcacaattctggtctctcattatttgtacataataagcatatccattatcgttatttagaccacttgctagtctgaatttttccagaaatgatgttttcccagaatgtctaggacttcctctctcatactgagttgttgagcttggagtctgctgcaggttagagtctgaagccaaatttgtcacgaggtgtctcagccagaatactgagctgctcagggtcacctgcccaggaaagcagccagggaattcctgggcattgagaccacacgggaacgtgagcatctattgctagagagctgtgcagtgtgggacaggcagtccgaagattkttgaaagaagcagctgcacacattktctgtttcaccactcatgggcaggtggaaagctgagcctggagaggtaaagttgttggctggccacaggcaggggagggggaacctgctcccttgggcctttgttgctgtgctgggtgaaggttgtggagaagccttgcctctagaaagagaggacaggaagagagcagtgatgccttaggaaaagaaaaaactgcaagttactgagcactgaccacgggccaacacctgtcagtgcttgatgtcagccacagccctgagggacaagggcatggagcctgggtccgtgaagtgagctctctctctaaggttggaggtgaagcgagggggcatgtgcagtgtgaactgggggctctgactgcaagtgctgtccaccattggatccaggtggctgggcatactctcactgtccagacgatgactggattcgggggtcttttctggtgccagatttccagtgtgtgtcggcagctctggtttttgttggtcccttatcaccaaagaccacttcccctttgcccttgtgggggatgtgaagggtggccctgaatcacgcacttccacttcctctggtcttcgctggagctctgaaaaggtgtgaacaccaaacactactattctgggctgatggcgttcaatctggccttctgtgcacctggagcatgggcagctcatcttggtctcgctgatggcactgttttccagtggctgaaggagcaggtgatgctctgttttgcatgttctgtgctttctgcagactcccctggtcacacktgggcctgggagctgcatggtcacccagacagggcatgtctcagcctgccagccttggaaggaaacatccccaacccatcagtgagtccttgccgcatcctatgaccttccgggtcccagggcccagagcacacctgcctctcatgagactttcctcagctgggatttaagtctgaattgcttaagaggaaaggagcaggtccacaaggactcagaggctacagcaagtgtccagtgaagctgtcacatgtgattaagaagagaaagaagcctgtcccatgttccgggatggactggtctggctgcttaaggcagctacgctgaataaaatgatatgacaatgccccatgtcttgaaacttcagcttcctcctcttcatccgggagcctccaccctggtctgaagctgtcccttctatcctaaggcctgccttgccttcagaacccatggtctgtcaggcctcccggttcctcattcccccagatagaggtgtgagggaggagctcttcccaccttctgcagacaggcagactgaggcttgagcatctgtggcttgcttttgaggacacaagggaggtggggggcctagctggagccaggtctttagatcacggctctgggctttccgcccacctcaccctgactcctcgtctagcctcatccccgatttccccattagacacctgctctctaccaggagaccaagcaggaaggtttccttagcacccttgggaaatcttctgttcttggggtacatttggagtgatttccrgaacgacaccatcccctacctcctgatgtcctcacccaggtgtcccacaggcatgtctgtccttccctgcccaaaagggaccccaccatctcccccatcaacagctcttccctttattagacccccacctctaacccaacaccctgatcagagcctgctgctgagcttatccayacacctgccttccagtggcctctccttcctcccagctctcatccctcccttctcttcactcttgccacgcctcaggcactgatcgtttcttaccatgaccattgaaactatctcggacgggtcccccgctgtggcatccccgctccacgtggccctgggtgccttgccctctctcactcccagtcttaggaacctattctggtaacgtgagygatgggagtgcaccggagtgtgtgagtttgccggtggatttgcagagggctggcgagccaggcctggagctggcaggcgtgaggggctccctggaaaagacgaacccatctcccccacttcgctgtgtcacaccaggtgtccactagagttgccaactgtgacagtgtccggaggtaaggaggtggagcctgccccagggtatgacctcccaggatccagggcaaaggatttgagaggagaaccaggcaatggacagggtctttgctagtaagacacaatcagagctaggaaggtcctgctcatgagtgagtgttcaactgggagagggaaggccgggttggaggggaagtaaggtaaataaaaaaggaaagaaggaraagagagagggagggaggaaagaaagaagggagtaaaatggagaaaaggggagactttagatttgaggtcgtggctagaccccaggaaacccagcaggcatgagaaagtctaaagtggagggtgggaaggggttctgggtgggaggtagtcctggggaaatcccttgagctgaggaagcttcgcctggggaatttgagggctcgggtgtggacgggaaaagattctctaaggaygccccctagagcaaccctggacatgaggagtggggggaatgaggcagaactgtcccaggtgcccacagggcagcagcgtccccgggacaccctcagacatagggagtgacagggacgagggaggatgcaaacagctgagactgtggagagcyggctcrtttccaggcggtgttgctgccttcgccttgccaatgaggacagtcsgacacagggaagaaggggctccaccagcagcacccagcgagcacccggcatgcctgggattcgagtgcaggcctgtctgattctgtagggaggagaaaatcttctttcctctacccctctaggttctctggctggggctctgaaagagactgacaaaggcagattaacgagagaaaaacagacacgagtttattaccacgtgcatcaygcacacccatgggaacgtccgcagtgagtaactccaaggggcggccagagctcgagctttcatagcacctcacaagagaatgcttgtttagagaagtgacaagacagaggagaagggcttgagtttctggggaggcgcagggcgggaaggccaccctacggggagctgagggaagggaagggcttcagtgggaccaggacgtgctgtgcagattcctctggtgccctctccaggctgaggaggggctcgggttgtgtctggtgattaactccatccttcccggtagagagggttgggggcacaccttgacaaatttatgtccagctttttggtaaataggtgagggcggagagtttctcttgtatctgcttcttctcaattgccggmagctccacttaatccttatgccaaagtgacagattttaaggtggcatgttccgctccccttcacttgcaaagcactttgctttcttccaaactgcgtatgctgtctgcctgaataccgatcttcctgcagctcagccaggctgaggcaggcggatccaaccccagcgcggtgcttcacggacatgtgcgcatgcgcactggcagagmgctgctgcggcacagggacttttcctctctgctcctccaacgcctcatctctgccattgggtggtgagcgaggaggcctcccctccacctccaagcggccttttcccctccccaggctgccccctcccaggttccacgccttcccagctgttgactgcaggaatgggtccctgacctggctgagaggcatgrtcacaagggtttgttctgttttccagcactgcccttaactcaaaccttgctgtgcagcatctaattttggctttctgacacccttctttaaaaaaaaaaattaaattaagaaaatggatacatatttgtacatatctatgaggtacacgtgaaattttgttacatgcgtgtaacatgtaatgttcaggccagagtattggggtgtccatcacctggagcatttatcatttctctrtgttaggaacattaaaagtcctctcttagctattttgaaatatacaggcctggcgtggtggttcatgcctataatcccagcactttgggaggctgaggcgggcggattgcctgaggtcaggagttcgagaccagcctggctaacatggtgaagcctcatctctactaaaaaaatatataaaaatgagccgggcatggtggtgcacacctgtggtcccagctactggggaggctgaggcaggagaattgcttcagcctgggaggtggaggttgcagtgagcagagattgcaccactgcactccagcctgggaaaaagagcgagactccatctcaagaaaaaaaaaaaaaargaaatatacaatacattgtcattaactatagtyactcaatgccactgtctttcctttcatctcctttccaggcctgactccatttgtcccactttccaatattccatgtggatagcctagaaccatctaagagataaggcacccagatcgcaaaccacaggactcggaattctctgcttgtctcctaattagaagccattgaagagtcagtggactgaatacaaattaaccattagatcaactgaaaatgtcaagtttagatgaatctgagttctcatttagatatttkctggctgttggcccagccccacaaataaatacacatttgaaagttatcctgttactttgataaaagaatttggtctcttacaaatgataattcagctctcaatgtggcttaggtgaacatagttttggatttcttcaagtaagatatatgagcacagtgtgtattatctttacaacagatatccataataattatagtaacaaagccatctttctatatttctttaaagtttsttttttccttttaagctccatcccaggaatttgggctstaattcagggacttgtagaacctcacagtgagagaggagtgaagtcctgtctgcttggatttattgctgtyttgattaatgagaattgctagcttttccttacttttggaaggaggctgggaaatgcaaacttcccacctgcccttgaaggagaaaggaatctggactggatacaaagaagctggtgaggagcatttatcctgcagtccctgctaggtgcagggtgctggagcctggagaccggagacaggggcagcaccccgatggtcgtatacctgccagccctgctggagggggcgattagggcagaagtctttccactgagaagcggactgtgcactgttgtggactgagctgataggtaccgagcttttggacactgtgctgctggagcagggtgggggatacagggggagtgaaaggaaccagccccctcagcaggcctggaaagacgaggtgggtgcccagacccagtaggttgttgctctgctggcccatactgtagcagtgacttggcttggtagacctgggaggccattgtgtttttatacttaccacaattcatgcatggtctgcccaatgtgtggggttagttctgcccgttgattctcttcctcttgtttcatggtacccttactgtaaggggagtgaccagaactggccacacagtgggcatcttctaggcactgtcctggccaggaggacaaggccgccttttgcactggttcccctgtcaggtcaggccttggcccaccacctgtgccttccatgtcctccttcctgtacactcacgcacccctcccctggtaaccatgttgcctttacacccatgagccctgctgtggtgcccttgccaggcacagtgagaaacacaagggtgacctgtagacgaactgggctgayatgggtggatcaaggcccagagctgttgtatagacgcgtcagaaatacatgcgtatgagaagggagagtaatgagaagaacctcattcactggcgagtggggaggaaggtgctggcaagagcctggtatggagctcagactagaggtggaccagccttgtctttagagctgtatgaaagctcgaaagctgcccccaccccaactcattcacccagtcacaaagataggtgacctgtcatcagatggcttctgtttcccgctaacagtctagkakcacagatgagcccattctccttagcaccattctctccaccaccaacacttactggtcacctctggatactggaaggaagaggtgaactggaaagacaagaccactctctgccctcaagatggggctgtgtctagctaagtgagatgtgtgtgtgtgtgtgtgtgtgtgtgtgtgtgtgkatacacatatatgtataaagacaaccatatttatttgtctatatgggactacatctctgcataaacactaccatatgcaggctctgaggtcaaagttcatccttacctcagctagacaggaggatccagcattttctaattaataaaatacctcacagctttccttatcctgctgtarttggacatggaattcttttggttattctgcttaggaaaagtagcctctgcattaaatgccaagctctgtaggggagcaaagcctatgctttgcttaacacatagaatggaattgcattaatgtgagaaagcatttcgaaaatgatggagtctgtagagawgctaggaattgttttcatgatcattacctgaagcttcatcctaaaatgtgctgactcttaatttaagtatatgcaacccaaagttatctaggcctgtcagcctcagccttaagctctagtcttagcactgtgatgcatgaagagaaatgtaatttctactccaaaagtgttttaagataacataagattggccgagcgcagtggctcacgcctgtaatcccagcactttgggaggcagaggcaggaggataacgaggtcaggagatcgagaccatcctggctaacatgatgaaactctgtctctactaaaaatmcaaaaaaaaaaaaaaaaaaattagccgggcatggtggcaggaacctgtagtcccagctactcaggaggctgaggcaggagaatggcgtgaacttgggaggcggaacttgcagtgagccgagatcgcaccactgcattccagcctgggtgacagagtgagactctgtctcaaaaaaaaaaagaaaaaaaaaagataacataagactttaattaagtctttggagggctggcatatcaggggtgcgacacacagcagaagatttccaaaaatcctcacacatgtgcgccactgtccttgtcagcatggccttctcctcaccctttcatgggccacagtccctcttctggcctcccctaaaagctctggcaggccctctttcatgaccacttcccatctacctcttcttatagctctcctggtgccctgaagtgacaccttagcacagggtgagcctccttggcatccttcaacaccacaaacaattcaggaccaggcttccactgacaggtggggaaaggtgctgagtactttatgccatattgttgcctttgtgacatactctataaaagccactcaagttgggtctaaagtcttctttgatttgcatgaactgtaggtattaacagtgggggaagctgcaccttaataactcttggtgaggggtcccctgtggagtccaccaggcatgggaatttagcctcacttactgatgaggaactgaagagtcagaggggcgatttgacttgcccagatcacagagctcttaagggggcacagtctggtcttaaactcagttcttctggcttcgagttgaaggtcatgtccacaaactcccagagcaagaactgagtctcaactctgacctttggattgtgcgtgctacaccaggaatcacagcttcacagggaataaatgtagacttgtttcattgcacaaactggtggcatttctaccagtcatagtgactgagagatgagcagtgctttggcactctaactgggtgaccctcatctcccttgtgccacctgagcccacccaggggaacactcccatccagctatcctggtcagggctgcattgaaaccactggttcctccaggacccaaagccgcttttctggatggaatgtaaatcattcctacctggggccctgccaagccttggcaggattcaatgtgacattcagttccagattaatccaagttggaacagttttgctgaaggtttagagaccttcaatttatttatcttctgaaaccctgaaacagctttaataacatagctttggatttctgcaagtgagatgtatgggctcaataagtattatttttacaacagatatccataatcattatagtaacaaaggcaccttcctatatttctttaaagtttgtttctttcttttaagctttgtcccaggaatggggtctgtaattcagggacctgtagaagttcacagtgtgagaggaatgaagtgtccaatctgcaatctgaatcttccctatgaaatttccacctggtgccctccagcrcagattctcgcacccacagtcctgccttacagggcagaccatttcctctcygacagtactacctgtctgaatgttctgcttcaaactgagtcaagatatgtgaaccctgggtagaagaattatcaggtctggagggagcacaagcaaactatcccattttatggacgtggaaaccgaggcctgagggagagacgcaccaggartcaggagatctggctctgatcagctgtacaaattgagaattgtgacctgaccttgtccaacccaagtggcccaactcctaattctgtgagtgacatgtctctgttactttggaatattgattgaaggtatgtgattacaactttttattataatattctgagacaattttttattataatcttatgagaagctaaggactgggtggatattttcctgggttaaaagtaaagtttttcttgttgaaaacttagacattcagaaaattttcaaattgtttttattatatagaaactgtagattagaaacatattgtatgatgattgttcatgatgcttcagcgtaatcacttcagcaatgtagcaatgacgccattcaggggcgttttcaaagtgtggccttgggccagcaccatcggcatctcaggaaactctcacagggacagccctgctctactggatcagaagctctggggctgggacccagcaatccatgctttaacaagcccgtcaggggcttcctattcatgctgaagtctgagacccactgttacggaatattgtcttcctgatcttgatagtgtgatggtaaattttatgtgtcaatgtggctaggatatgctgcccagttgattggtcaaacactagtctagaagttgctgtgaaggtattttttaaacatttaaatcagtagactttgagagaagcagattacccttcatcatttgggtaggcctcatctaatcagctgaaggcattaagagaaatgaccgaggtcccatggggaggaaggaattctgcctccagactgtcctggaactcaagastgcaacatcaactcctgccagcttttccagcctgccagcttactttgaaaattgccagcccccatgattgtgtgagccaattcctaatctcttctcatatatatatatatatatatatatatatatatatatatatatatntatgtatgtatacatataccgtatggctctgtttttctggagaactctgataaatacaaacagcattagaatccaatctcagcaatttctcatttagcccaagctcagctgcacaatccttctcagtgcaagactccasacaactgctttcaataggcaggagccagcataggcatgccacttaatagctgtccaggacttaagatggtaastgggggccgaaaaatttgtaggtatacctgatttggcagaaaccatttgattttaggctattctttagaaaattctttattgaaaaatatctagatttcagtgggaagttaaaaaatggatggatccgaatttgaatccctgctctaacttactctctaagtggcctcaggcaagtcacttaacccatgtgatcaatattttcttcatcaatgaagcaagccgggagtggtagctcatgcctgcaaccccaatgctttgggaggttgaggtggaaagatggcttgaggccaggagttcaagaccagcctgggcaagatggtgaaacccctatctctacaaaaaatacaaaaaaatgttgggcatggtggcatacacctgtggtcccagctacccaggaggctgaggtgggaggatcgctttagcccaggaggttgaggctgcagggagctatgattgcaccactgcactccagcctgggcaacagaatgagaccctgtctttaaaagaaaaagaaatgaaccaaaggtactaaggctttccttctgtggttttaataaagcttctaggtagcacatctcaggtgccaatttatgtcaggcttattgtaggcgctcggtgaataatagttattatggtttcagcttgccattccccaaactggaggtatgccagaaagatattactgttaactgggagtcctaggtaactgttctctctggtgaatctgtgatttactgtaacacagtagagataacatgtttaattgtaatcaatatagcaacattattatttgagcaatgcagtaggcactgactggggagggatgcatcccaagaatgtgggagccatagcagcagcccttggtgatgagcagtactaaggctatgatgaaggctgtcaaggatgcacccacatttcatcatagaaagaagccaggcaagccatgggctctgggaatttctattaaaacaatatagacttttaaggggggatgtggggtacacaatctattggaaatgttatttgtcctacataattctagggacatgaatgatgtagggaaacaatgttatcaaacaacacgattttctgtttcaactgagaggaagagtggcctattcaagtaagcccagattaatgtgtgaacatagctaaaaggatcagcattttcctgttacttgaacactcacagtgcattcaattatattttaatgaacttgaaaaactgaattcaatagaaacagttttggaagactaagaggcaaagcttaatgatgaagatattagaaaagttatacaaactaataactactaagaaaagtaaggtggtattcaaagatttcccctcctcaaatccccaagcccggatgggttatagatgaatcttactaaattttcaggaacagttaattgctaatctttataagtggttccgtaagatgggaagagaaagttgtgtagctcattttatgagtctaatgtaattcataactcaagtatcagataagamcaataaatacaaagagaagaagacttcaattgattagtatatcaacattgaaggaaaaactaaatcttggctaagtgaatcaaatcttttgttaagaatatattataattaagtaggatgccacctaggaatacaagagtgactcatcattggaaaaattgtcataaaatcttttgttaaaaatattgccatattaaaagactactgaagaaaaattacatggcaattaaaattaatacagaaatagtactttatgaaattcaacaacttttatgattaaaaaagcatagaaaactaggaacaggaggaaatttccctaacttggcaaaagttatattcaaaaaaacctaccacaaacctaatatttaatggagaaacataagacccatttcctttgaaattacaaacaaaataaggatgtccaatgctatggtctgaatgtctgaggcctccccaaattcatatattgaaaatttcaagataatggtattaaaaggtgcggcctttggaagatgattaggtcatgggggcagaatcctcaggaatggggttagggcctgagaccccctcatcccttctactgtatgaggacacagtgagactgtgtgcagaaagcatgccctcactagacaccaaatattttagtgtcttgatgttggaattcccagcctccagaactgtgaacaataaatttctgttgtttataagccacccaatttagggtattttttatagcagcccaaatggactaagacatccattctaactgtttccgtttggcacagtgtttgaggttctggccaatgttgtaaaaagaggaaaaaaaaaaagctggaagagttggtgtgtgagagagattctagctgctctattgagggccagtgacgggcaggggtgaaggcggcggggatcggaccagacactaaatcactccggcttgagctgggtctgtagctatayaggtggtgagaagtggttggattttgggtaaattttgaagatgtgcttgacaaatttgtcaaaggatttgaaagtggggaacgagaaaaagagaggggccaagggtaattctgtgtttttttggttttgttgtgtgtgtgctatttttaactcgagcagtgggaattactaagatggggagacagtgggaagcatagtttgtgggaattttgaaaatgccaagtttgagatctctactagatatttaagcaacgatgccaagaggtagagaggactctagggttcagggaggaggtctgagctacagggagacatttgagggtggtcagtgtagagatgagattcagagctatgaaatccagtgagctcaccaaaggaggcgagttagagaaaagaagactgagttttagggcgctgccagttgagaggttggggcaatgttgggggaaggagaaagaccatccaggaaagtatgaggaaaactacaggcacacggtgtcccaaaggacaggtggagaaagcttctgtagagaaaacgctcagtgatattttctgagagtctgaacacgtgacaaaagggagtgaatccttttctccttcccttcctccctttctacctccttccttccttccacaagggtgtaaattcctctgtccctccctttccttcctccctgcctctccgtctcccctccctcccttccttcctccctccctccctccctcccttccttccttccttctttccctccttccttcctgtcttccttctttatgaatgtttacagctttgtttaggtataaacaacacagaataaattgcacatgtttaaagtgcacgatctaagttccgacatatgtctacatctatgaaatcaccaccacaatcactatagtggccctatccgtcaccccacacattgcctcctgtcccttctagtcctccattctgccctccccattgcgtctctgcacatggggagcctctccacaaaatatctgctttccatcagtatagcttagtctgctcgaattttatataaatagcatctaacaaaaacccttttttttgtctggctgctttcagtcagcataatgattatgacttttttccatgttgcttgtatcgatggttcattcctctttactgctgagtagcattccactgaatgaatcaccacattagcttatcacaaatagttcctcctatatatgcttatagaagattcattgttttgttttgagtgaattttggtaggtgctgcaaaatatgaatttaattcattttgattcatatggatatcaaattgtttccatttgatagactggaatagactatctttcccacgttggattacctttgcacctttgtcaaatctcagttgctcttatgtgtctgggccatgtgtagcttttcttatttagggacatttgtctttcagaataactttgtcagtttctacaaacccccctactccctgctttgggggcttatatggggactgatcatttctttttactgctgagtggcatttcattgaatgaatcgcctcagtaagcttctcacaaatagttctctctatattttcttctagaagtttcatttttttttttttttgcattttgggggcaaagtgacatattagtggtattagatattcaagtggagatgccaggaggtagagaggaatctagggtacagggagggggtcttttgatctttatatcaatttgagggcaaattgacatcttagtggtattatattttctgatccatgaatgcaacgtatcttccattttttgagctctttaaaatttttttctgagcaatgttttatggtttttagtgtacagttcattcatatcatttgttaaatgtatctctaagtatttcatatttttgatgctattttaaatgatactagatttaaattttaatttctgattgtcattgctagtgaaaatataaaacaattggtttttgtatattgatcctctatcctgcaaccttattaaactcacttgttaattctaatatctttttgtgtaggccacgttgaattttcaatatagaaaatcctgttatctatgaataaagacagttttacttctcccttctaatctcaatgccttttatttctttctcttgctgtattgtatttgctagaaaatgttgaaaaatgttgaaaagaagttgtaagagtacatagttttgtcttgttcttcatcttaggggaaaagcattaagtcttttagtattaatggtaatgtggacagaaggttttgtagaggccgtgtaccaggttgaggaagctccttctactcctagtttgttgagagagtttatgtccagaatgcatgttagatttttgaaaatgcttttactatgtctattgtgacacttctgtggtttctcttttttaatttcaaaatatgctgaatcacattaattgattttcaaattataaatcaaccttgcatttctggcatgtaactcatttggttatgatctttcatactgttggatttgatttcatttgccgaaattttgtttaaagtgtattttggtataaagtgtatatatagacccaggtgcggtggctcacacctgtagtcctagcactttgggaggccaaggtgggcagatcacttgaggtcaggagtttgagaccagcctggcaacgtggtgaaatcctgtctctactaaaaatacaaaaattagctgggtgtggtggcgtgcctgtaatcccagctactcaggaggctgaggcaagtgaatcgcttgaacctgggaggcagaggttgcagtgagccgagatcatgccactgcattccagcctgggggacaagagcaaaactccgtctcaaataaaacaaaataaaataatatatatatatgtgtgtatatacacacacacacaaaatttgcattcatattcatagagataatagtctatagttttcgttctttgtaatgtctttggtcatggtaccagagtaaaacaatttgagaagtgttctgtcttttacaattttccaggagtgtgtatggaattgatgttcattcttcctaagttggataataaagttatctgggcctggaggtttctgtgtgggaaggttttaaagtacaagtttaatgtaaaaaatagacataagactaattcagattatctgtttactcttaagtgccgatagtgtctttcaaggaatttgtctattatatttaatttgtcatatatattggtcttaagtttatcataatatgctcttaattttctttttaacatctgtagaatctatagtgatagatatcacaattcccatttctgattttagtaatttgagtcttttctcttttttggggggatcaacctgaccaggagtttatcaattttattgatcttctaaaaacaaacaaaaaactccagcttttaatttcattgatttgtcccttttgtttttctcctttctattccactgatttatgatatgatcttcctttctctctctctttctcttcctttcctgctgtaatctttctttctctctctttcttttcctttcgtgctctgatctttctttctctctttctctctccttttccctttccctttcctttcttctttctttctctctctttcttttcctttcgtgctctgatctttctttctctctttctctctccttttccctttccctttcctttcttctttctttcttgagacagagtctctgtcacccaggctggagtgcagtggtgcgatctctgctcactgcaacttccacgtctcgggctttagctactctcctgcctcagcctcccgagtagctgggattataggtgcacgcccccacgcccagctaaatttcgtatttttagtagagacggggtttcaccatgttggccagggtggtctcaaacttctgacctcaaatagtctgcccatctcggcctcccaaagtgctgggattacaggcttgagccactgcacctggcctatgctctgaattttcttgtttcctttcttcttactttgggtttaattcgctcttaaggcggaagctgagatttgagatccctcttcctttctaacctagtgtagtgctatcattttccctctaagtattgctttagccaaatcccacccattttgacaggttgtgtcctggcacttcgtccactgattgcattttctcttcattatgggtaatttttttctccctcacttcatgcatggtcatttcttactgggtggtagacattgccacttttttcttgttgtgtgctggatgtctttgttttcctgtgtgtattttcaggctttgttctggggtacggttaagttactttgtaacagtctgatgctttccggtcctgcctttgacgtttctcagatggggatagagctgcgtttagtaataactgctcccacccctgaagcagggctgtcccgtgcctcctgagtggtgagcctgcagtctggctgatgggggaggcgctgttcccgccctgtgcaaacacaggcggatcttccctccagccccacggggatctttctgggcctctggcagcttcctcgcctgcacgtgctgagccgccctgctgcaccctggccgcagcctttgtggatcactggagttgtgtctgtgcagccccctcttcctccagggacgccgtgcctgccctgaggactcggcttagtccctcaactcgtgagggtgagctcatggggtcaagccctgtccgggttcccgcacctcctgtgctgtggcccggaaactgtctgggtagtaggatcactgtcctctgcatctggtgtgctgggttttgaaaacggttgtttctatagttttgttggtttcctcctgcttctttcaggtgggaggataactctggtcccggttatccattttggccattcaacctcatggcaatctaacaggtagcggctgttcttccccscacgtgacacaggagaaatcttccgcaggctgttttcagtgacttcccagggcagccctctgggaggcggcggtgtcggatggagtcggcttcgctcagagcgctccggttctgggctcccgcgcggcgtccgccagggggcagcagaggcccgggatagtttgcacaacgcccggctttgcactcgtggcttcgttctcgggatccgtgttttcgctcccatcctttcactgcttttgtctccactcctggtgactgcttagctctaggcttggttgccgcacaactttgcgtcttggacgcagggccgagacgcgtctggatgctttgtgacgagtcagccaagagcagcagtcacggggctcctgagatccggtatgtttgctccggactcgcctcctccgtcttggctccgcccgccccttagtttggctttgttctcaagctggtgtccctcgtggttccaacctcacacatcacaccctccggaacgagagagagactctttccaaagtcatcaaggaggaatactggcttcgctgggtggacccaccttgggacacacgccgtatcctccccccaaacccaagagcggctgattgctgcagcaaggcttggtttgggctgggatccctgatcattcttgaatcaatgttgtttgcgctaaggagatgagattctgctaattagcccaaactagtgtgacttacccctgcagctggggtgggggccaaacccctcaaatcacacccactccacattagggaaggagtggaatgctagtgagccttcccacagtgttcaggacgttgtcaaagacagaagcgcccagaggccagcgagtgtcagggcagaacgctcaggccatgcgcgctgacgagcactcggtgtgcgaccaggtggccaaacgctcactgcacaggctccgccctttgaagagaggcagcccgtgggtgcgcaggcttggcaagctctgctttgcgaaggaaggatggcgggagctggatccgacacatttgtagacagcctagctcatctgctctcttaaaatgaatcaatcatccaccaggcgttgtgtgaggactgcatatgtgccagcaggacttcaaaaaatgtcctgtttactagggagagaaacaagaaaaccaataaatgcagtatagcatcagacattctgagagaaagaaatgtatatggaactgaggttgctgaaagggagaccacactttccctagcccggggaggctaagaaatgcagtcaagaggaggatgttcccagaacgtgaggcacagggaggagaatgaagtgggtgtgggaaaggggcgttcccgcgtcctagggaaataggtgcaaagacacaggcaagttagaaagcctgtcactttgggggcagcctttctttcctttttaagcaactcaggatttttacgttggttgaagttacttgatgatttcaaatcagtgctgacgttatgcttaaaagaaataaaaggtcaaagaaagagtatggtaggagtaattcaggtggttactttgaacagtttctatagacaagaactccgcagccactttgacgcacaccgcaagccccagctacgctcaggtgcaggcagcgcagagtcctccgccaggggagccacctggtgggggccaaccgcaaaccgtgtgtggtgtggaaaagctccaattcctttgctctccagcctaactcatactcactggatagggtataaaaaggtctgtaaaagaccttcacaaactaaaatctggttatagctgcaatctggcttggcaattcatggatcgctggctccccgtccctctgcactcacaatgactgcagggtgggacagtttctctgctttttgaaaaaggaaatctgctttcctagatcttgatggaatatacaaaaatggtttagtgccataagctccttctctaagcaggcagctcagggagctgatgccaattggttactcttgtagaaatttcgtgaactacagtaaaccattcgctaagcctttctgacatctggagcagcctccttcctgccactgccttttctcttggcaggaacacagaccctagagggacaaagggtggcagaagtcaccagaagctgtaacatactgcagctgcacggagacctgtgcctgttcatactcctcaactctcggctcctggtgggcttgtctttgtaccccatggagcccacccagctttcagccagtgccaatgtgcattttaaatcaaactttaatggatttaagatgcatatattctctttctctatactcatggcatcaggatctcaaagactactcaataatttttcatttactcattcatttatgcaaaaagtatttttagaccctgtgctgggtacaatagtgtacaaagccagatagaattgctgtgttcatagggcttggcatcaagcaggaagatcaatacacagggtgcaagggacatgaagcccggtcacaaaagccttcctggagaaatgggcgcccagcttgaaggcaggaaggcagggccttggccagaggcagggggagtctggagtgagtagagatctgcaggggttgtgtgtggaggagccaggccagccttgagagcctgtggtgctcttgagcctgtcagctgtagctggggctgggaggctttggtcagggttcgtgggaaagcagaagtgctccagctatttcaagtagagagagatttaatatggagagccagggccttctcaaccatgggagggagttggggagcagagatcaggaagactgcctcacgacatcgagaacagaaatggaaaggaagtcatcaccggcaaccccagcagcctgcagtgcccaagcaggttgctctcaggggaacacctggaactccgagagctgtgtgctcctggaggccagccacctgcagtgcccgtgggggcttcttagaggaagccctgggaggccagagagagagtgctgctgatggctgtggctgcaggacggagaaagacactccctctgacaccctagaatgtgagctacgcacgggctgaatctaatctggcctccggcagggacagtgattctgtggcttcagacatgtccctgagaagcagaggatggtgtagcaggcaccagaaaatgctgatgatgacgatgatccagcaaaatagttggtggagaaggagctgggctcctgtcttgcctctgccacttactggctgtgtgcctgtttctaggcctcagtttcctcctctgtaaagtggggatgacagtactacctgcttcatgcagattatraaacattagacaagataatgagtaaagtttttagcatactactttgcatgtaggttttggtggtttctggttattattcatagtgattttttcagtaattatatattgaaaagaaagctgaaaaccattaaaggatgttaaaaacaccatggaaatgtgcttatctttttaaaaagttgcagtagctttgggaagtcaccaggaatggcagccacgtggctccaaactgactgctgtgtggcagggaccgccagggtggggctgggtccagctcagagtcatcctgctgagctttcagcccccagatccttatcaagtcattgtgaatctcagcgcattccaatgggccatgttcatgatgcctgtggaggggtggggtggttccctccactttggcccaaggagagtttgcctttcccaggactctggccagtagagttcaagtggtgtaattttcttcatctcttaactgtttccaggagtttgcagagccttctccttcctggcttccttctctgccttgggggtgcctgtggccacaggagccctgagcagggtttgcactcccagtctggggatgaacaggaggacctgtctgatgggagcagctgccaagcaagggtggggatgggagagaacccccaaacagagcaggygtggcgtccgggtgggccagatgagcaggggtccaaggtcagggttcacaggctcaacaagaagcttcctcttggaaacctaaaaaaggaatcaggaccgagggacataaccacagagacaccaaaggcccagacaacaggctcaggcgggagcgtagctacttgtggtcataaagctctgaatgctgctttagtctccaggccccagggcctgagccttcaggaccaagatctggagctcctgccctgctataccaaaggtgctgctgtaaacactgttctggttctaactgtttaatcccacgccaactctaggaggcaggtgctatttaatatcatctccagttaccaaggaagaaactgagattcagaaagagaaaggcacctgcccaaggtcgcacagcttgtgagctacaaggctgggacctgggcagcctggctctgggggaagcgtcaggcaccagggtccctgcaggggcctctgtgcactttctcattcacatggcctgaagctcatcctgaggtcagctgggagactgtgcagccctcttcaaaggcccatctacagaatttgtgagtctttgaaccatttattgattgtagaagacaatcagcccagagagacgtgagatggttctgtaggaaacactatgataggacagtcagcaggagcctagtacagcactgagtatgtgtgtgtgtgtgtgtgtgtgtgtgtgtttgtgtgtacactcagaaaaaagcaagttcctactgtggcaaagaatagagggtaaaaatgcaaacatgcgagtacccctctgacacaatgagttctttctatcattcatttttttctttaccattttagtggaggcaacattgccccaagggaataaacggacattaaatctctgtgttttgggattttcctggcatttttaaatcaggaaagtactatttacagctacatgctcacacacacacacacaccctgcacacacacacacacacatacacacacacacacggggagggtcacagcagacaatggcacctggcccagcggggtcccctggatgggaaggcaagtgcagtgtgtcaatcacttagaggggcaaaggcgggctagagggaaagcccccaattcctgaagatggtggggctggacaggagagaccttcatccctgtcactttcctctaagctccataccaagtggaagtcacgaaggttagggtcttgttgctcacccataaaacgaagtatggtgatgacagtgatgggactaagtcacactcatgttaagttgtccagtacctgcgacacagacactgcaagaacagtccctctaggtgttagagacagcagcctctgtcccaaggcatctgtgagagttggaagtggtgcttggtagatggcattgtgtggatgggtactggggggagtcacatctgcgggttggtccctgtgcagcacacagagaacgatgtctgcgtggacctcacttgatggctgtgacagcctcagctcacttggcttcccacacaggagacctgcaaggccactcacaaaaggcgattgatttagtggctcagggcgytgggatggaagggcctggggagtccttcagtgacgacccttctctctgcgtggcctcaggccccagcctccccacttctcccagttctagcaactgacactcatctcttctccccaaccctcttttctctttctaatctgtgaaagaaaaagtagtccccacttccctggggctttacctttagaattccaaattgttttaccacaacttggctctggtaaattccaagttttgacttttctctctgttgtttaatatttgaatttcaagacccagcttggaagttgaagaactgaatattgaggattttattcccttgtgttcctgctacataactcctgattctccttcttgcagaacaggctagagggtgagtcactgtctcagtcagcttgagttgctgtaacaaatacaccctaggctgggaagcttaaacagcagacatttacttctcagagttctggagctgggaagtccaggatcaaggcactgggagatgtggtatgtagggggcccttttcaggtttgggatggcaccttgctgtggtctcacataagggagagcagggaggtagggagcaagctagctcaggtctctctctctctttttttttttttttttttttttgagacaagaatcttgctctgtcacccaggctggaatgcagtggtgtgatcttggttcactgcaacctctgcctcctgggttcaagtgattcttctgcttcagcctcccgactagctgggactacaggcttgtgccaccacgcccggctaatttttgtatatttagtagagatgtggtttcaccatgttagccaggatggtcttgatctcctgacctcctgatccacctgccttggccccacaaagtgctgggattacaggcgtgagccaccacacctggccctcaggtctcttataggagcactaatcccatcatgagagctccaggcacatgacctcatcacctcctggagtcctcacctccaaataccatcacatcgtggttaggcttcaacatgcctactccaggaggatgcaaacattcagcccatagcagtcatgtacctgaggttgtgatgaaataaatacacaaaataacatttctatctatcaccatcctcctcctttttgactgttagctgggctggccagcacctcgaggatggtgggtttgctggcatcttccggcagacaatgggggccctgatgatgggctaagagacccagtggccctcactctgtctcttaagcccttgaccctgtggcctttagtgaagctcagtgcagttatcaggaccccatgactcatttgctctccaattcttcctaaggatgtttacagaccaacttacaccagcaatagcttttaaaaaccctcatgaagaattcccacagtctacccataacctctgccgcagagttcgtaatgtcccagacccccgtcctcagccatgcaatcactagcgtctttatatgtaaagagaagatagtaaaaccttgccctgctgaattcatgggattcttttaagagcccagcagtggtagatgggaagttctttgtaaacggaaccatgctgggaccacttgcccttttattcagggtcctgacttttccttcctggccctgcggtccccctgcagtgcactctcctgaccctaggtggcagcagcacctcggctcccctcaagggaggcctgctgcggatggaggctaaggtcaggatgcagcctaattagctgaacagtttgcagccctgctcagcaaagaaacccctggggtgcgggaagagagtgactcacattyttgtttccttgataaaggagaatgttttgagagtcattctagcgttgcagtctggggtcacaccatccagacacttggcttctcttccttccccagcatccctcaagacctttttttttttttttaaatcctcactccccccaacccccctcaaatgcaccaataggctcagtcagaacaagggctcaagagtctgcccgaataaagactcttctgtgtccacaggctcaatgtgagcatccctgtccacacccgggcctggccagacccaagggctttcttacaagatgtgtgaaacgtcagcattgaaagggctgggcagagcatctagtctaatgggaatttgacaggggtaaactgtgcctgagaacccaaaagaggcagggagggaatgagcatttcctgatcacctgcagcgtgcaagccctgtgtgaggtgtcggtatacctgctcactcttctagaacagccgtaggatggggtaggtgagggaggtggstttcaaatggaaaaaatggctgcacaagagaacacaagtagcttcaagatgagagtagctcagttcattcatggatttatttttcctgcaaatgttcaccctggtgtgtttcagtgcccaggcctggggacatcccagctgacccctgcagctgggggctctagtcaggcccactgtcatgcctctggtggctcaagggtgcacctggtcccgtaatgcctcccaggtcggccacacctctcagaagataccattcctcaccttcctcgtgtgctggttcctctccttctgactttggttcttcagcctcagcttatctcttcctccccagagctggtgctgacttgagcccccatggccttgccttggaaaatatgacaatgactgtaaatgtttggccgcagaactgttctttcacggggccacaaaagaacgtgtggcctcctgataatgcccacggctggtgcaggcttggggaaggaggcctcttgcagaaccaaccctatagatgctgtagcaccactgaccccttgcacatacatatgctgctgactagctcttggcctgagaaacttcattcattaacatctttcccagggcacctgtgtccccttggaatctggtttatctccagacagaaaaacacatggttcctgttttcctcaggcagctcctggttccatactggtcattgcatggaaggttgaacaggaggattgcctaattctgtgcatctgaatgagagcacaggcccatccaggaggtctgccgcaaatgcaaagtgcttgtcacattacaggcaatcagtgaaaggaagctgcctcatggtgtcagcatgggttgcatgtcttataaatatacattggatctctygcaacaaaggctctgtagagtttgaagggacgtgggagggatctagttttgacttctgatggtggaacatcgggcatcaacgtgacaaggcactttgggcaagggggcttgttctcttcatctctgtgagagataattgccatctttggtgttcatcattcatttgtccacttaattctgctggctgaacctggaatgacaccacacgctggagacagcttgatgaacagaacaagacatggctcccaaccttgccctttgttgtctgatggagagcagggaagcaaagaagggaataggaggctgagaggtgaggctgggccatgtaaggccttctgggctatgtgaaggatttgcatctttagctcaaaagcaatgtgaagtgtttgaagggattttaggaggcgagtaatacaatcaggtttgcatttcactattaagtagatgagttggatggaggcttccagatctggaggcctggagaatattggtccaggcaaggatggtggcacacaggaataaggcagtgagggtggagatggaaagagtgaacagatttgagagatgtttaagaagctaaaagtgtaacctgctcccgccagagtatctgttcaaccaatggcaaaatcaactcaatggattacatactggtcctgggatcctgtgtttcaacctccttgttgtacaagagatagtttgtaggtctgagggcaaaggaacttctgggggcccacagcaagtgagatgcagagccagggccgagactggtgtaaacgcatgggaaccacactggggactcacaacaaagcccagtgctggatgaggtcctctctaggcctctccctagggatacctgggtcctctcctttcctctccctggagcaagccccattaccccatcagggagaggaaaggataggatccaggtctccagcctccagagacatctgcttaccaggggacccggggagtgaggaagagtataggagcaagcatggagtggggcctctgctcaggccctgtcccttctttcatggcgcctacagcacatctttcagcaaaggatgcgacaggcagcagggtggggaatctgagaacaaccaggcatttgatgcctctgggggcagggcagataatgagatgcaggcatgagcccagggggctgtttgcggtccagtctgccctccttcttggcactgaggccagacttaaaggtcaggaggacgtcagaccctctcatctggggctctcctggcagcccctcccctctgcactcctcttccagcccctgcacgcttctgccgcaccagcttcaatgcctctattgtggcggcagctgcagcgctgggggctctggccctctctccctcttctcccctcctgcaggcccccatgggtggggagctgagcagctccttcctattttctgtaccctcaggcccagaactcctggtttctggtcaccctcctcattctgggcaggtggctgctggtgacccggctccagctccctctcccgccttttctgggtggatgccctgagtgacacaggaaagtttcccaaagcaggtggactcctggggccaccgggacctgctctctccctccacaggagattcctgtctgtagatcttggctttcctgcaggatccacactggagggagggaaggggtagactggggaagagttctgtgctttcagctgtagcatttagattcaaggagagaaatggagagagaaagagagagagagagattgcacaaaagcattttaaaagaaaccacctttattctcttactctccaggtgggtacaccaagcctgataaaatccaactttggagtcatatgatttaactggagaagtctttcactttggtatgagacttaaacaagtggtctctcttttctgactttgacttccttatctgttagcagggtctcatgcctctcccagctctgtgggttgctgtgagtcccaggacacctagaagtaaactcaggaatgaatgacttgagccacctcggtgctctgtccaggctgcccctccccacccctgcctgctatcacagtgccattaagtttaagtgacaaagcaaggatttaaattaaaaaggcaaaaatttcacggagagttgggcatttgagctgcgcagagagcttacctgaagtgctgcagccctggaagcacagccagctggctgcccagatgtactgagccagtgcaaagcttgacataatggaaagacggttgctctctgtcccctggtctgagctgacagcaaaccacagagaggcagtgggcatgcagaggaggtgggagtcctgatgttagggacctgagcagcaggcagcagtgcacagcagagcaaaactgtgttccttcacggggcttccgctggccctggggaagagctcgtccaaagacccagagtgggcagcaagccttaaattggccaagtccagccccaggacaccctgtcccaccacccccatgaggccagccctcaacacttggtgactgtggactttcttagggtgccgtgggaagctgccaccttaacttgatgccagctcctggggagaactgggcggtgccctcactgcctttggaggggagagtctagtgctcaggggcacactgatgccaggggccctcctggagccatgaggagaggagtcagagagcaggtccaatgctatgaatcagaaaccccagctgaggaaggggctggggaaagcattagacagcctcttgccagcccatgctgtcctccagctggagtcttcagaaaccctttgtgctgccagaggaggcatctccagggaacccccaactcctcttcactctttacaagctgctttgaaaagatcaggtggcagaggccatgcatggagtgtgggaatggctggggcaggctgtccagctccctgggcccctctggtccccacctaaccccaccccctggctctgggtgaggtgctgacatgaggtacaaagctgggaaaatggggctggatgtgtgcttgctacagtgtgtgtggacactagaggcaccatgagctgatgtgccaggctttggcaactgctgtgcaggagagggcacygtgtgcacagggagtgaaggtggggacagagaaggtctgtgagcctaggctgaatgggcctggcaaggaagcagaggctgccaaagaaatgcatagtgctggttcaggatcacaaggaaggcctgaagaccataaaaaattcacctccaggtccacagatgttgagaatttcagcagagcagttgcttttctttggcttaaggtactacctctatggtagatcctgcccaaggccattccctcccccatcttgttagctgatatatatatatatatatgctgggcccctccaaggctgaaggctcaagggctaaccccagcctaataatcatggtcattcagtttttgtggctagtgattgctttactaaggggcaggtacattaacttggttattgaggcttgatgggatgtttacctggaatgttctcaaaagggtgtgggtgagaactcccatttctgctttggctgaatctcttcatgtctgcctgtgatgcctgggactgtggcaactgttttataatcatgaagcaacaagtttaaggatgaagtcaataggctgggaggattaatgcaaagaagtggaacgaacttgaattgttcaagacatctttgagccaacctcatagccaccatagctcggatttcttattctgtaaactaatcaatgtccatgtggtgtaagccattgtggttgcgttttcgctttatgctgctgaaagcacccatgcaggtatagcctctctttaagtgtgtctcagatcatctcggtgcttggctgagatcccctcagatctctccttattgtttccctcccactctcacttgagggcagtgctggcactggggcctgggctggtccttgcaggattcctgggttataggagctgctttacctgcaaggagcagaagtgcctgggggattttgcacccccttccctgtctgtgcctgtgggagacagggcccttggtccaaggccacaacccagctgtcttcctcctctcctcacccaggcccctacttgtctttgggaagcacatctttagtgattcagttgtgtgtgggtcctcatctcagagtctgcttctggggagcccaactagagacaaggtgcagctctcctgggcggagtcagcctcccccacgctggcggtcacggcaggagtgggatgcgaggctgggcccaggacatgcttcctagccttccctgtactccggccctgctggtgtgcctggggctcagggctgctcagaggcactgcctcaccctcctgtgcctgcttttcatgtgtgccatcctgggcccatcctgggcccggctgcattctccctgccctgggtggccccttctccaggcccctaccatccaccttggcccactgtgcgggggcatcatgacagcattggtatggggggcattgtgtgccccccaaattcctatgttgaagccttaatccctaacacctcagaatgtggctgtatttggagatgagatctttaagaggttaattaagctaaaatgaggccattagggtgggccttaattcaacaggactcatggccttgtaagaagaggagataaggacacagacatgcacacaggaaaaccattgaagacacagggagaagatggcatctgcaagccaagtagcgaggcctcggtcgaagccagccctgccgacaccctgatctcagacttccagcctacagactgggagcagatgcaattctgttgcttaggccgcccagtccgtggtactttgttatggcagccccagcccactgcggcagacaagaatcctctcttcccatccgggggcagtgcgctcttccctgattgaattatgtcattcggtctctcactaccttatcttgcttagaactgatttgcctagattagcaacctcctctcctctccacttcttgtttttcaacccttccaatcttctagattctgcagggaatgtgccccatgccccttcctccagaaagtcttcctgaagcctcctaagacgtgttctttccctctgttgggctcaacagcatttgtgtgtggccttcacttacagcctgattatgttgatagagccctgcacggaaaaggactgtgggtctgtcttactttatcaaacgggagcttcccatgggtctctgagcctcctgtcacccagagattatgaagaacttattctgtgctagacctgaaatcccaccacagagtgggagacagattcagaagtttcatgaagtaagggtgatggggaggtgcacttagggtgagaaggagctggggtgggtggtgggtgctcgcaggggtgtccagaagagggtgcctgtgcctcgctctaagttgttctgacctggaggtgcatggatggtgcagcaggacagagagggtgggtgctggaaaggtggtgggatcagatctggggatcgtcttttcaggggaagagcatcgggcctgtgggagaacagtgggtccagaccagggctaactgaggaagctcaacaacttctcactgagctcctgaggctccaccttcgggcctgcctctcctcccacctctgtgccttcctgtcattttcctgccccacctgggcagcatgccctcagctcccattgcacaatgtgttcagattttttttcctttggtaggaactgcaggggaagggtctcatttcctcgaggcattccagagtcacctgggctcccggaaattgctgagcacgtttttactgactgattggatcttgttggatgccagggctgccatccaagatgcacaatgaagcacatgcgttaaagaatgggagtcatcacagggcctggggcctttctcctggctcttagtgaccctgcctctgggctttgtgaggctgctgcctgcagactctactccatccatcccagcagtgagctccccagagcccagcaaggagtccggcacttctttcttctgatgacaagttctctgtaagatggcctgtgctttatttgtggggaactggatggcacatttatgactggaggagagcctgtgaaagaggctgctctcatgtttctcctgttaactccaggatctgggctacccagacttcagacaaggcccttggtgtgtccaggcagctacgccakggctgggaacagctttgctctccccacctctgtgtggggctgcagcctcagtgtgtagagccctgcaaagggcattgtagttgtccccccaacccctgcctggtgtccaggctctttcatacaaacaggagcaggtgacatgcaagacgtaccattcccaggatcctgggtgtggggagcaacccagcccagggactgacatctgcatgagaagataaagattgttttggtgggggagcacccagtgggatggggctgcttccttttcccctctctgctgggagtactcaggtggcaaacacagtccatgtgtccacctgtgggacagagggaggggcacaggctggtgttttagtcagggttcttcagagataggactgatatatatatatatatgtatatatatatatgatgtatttatatatatgtatttatatatacatatataatctatatgcaatagagagagagagagagatatgaagagttcattagcggaattggctcatatgattataaaggctaagtcacatggcaggttgtctacaagctggaggcccagggaagctggcagcttggctcagtccaagtctcaaagcctcaaaacctgaggagttgatggctcagcttgaggccagaggcttgagaacatagagtcagggtgtaggggcagttggggtgagtcccggagtccaaagcctggagaaactggagttaagatgtccaaggcaggagaaaaagggtgtcccaacttcagcagagagtgaatgagcaaggaattccctttcctccaccttttgttccgtctgggcccccagctgatttgatggtgcccacccacattgagggtggttctttcccactgggtccactgactcacacaccaatctcctctataaataaactcacagacacacctggggcaacccagttactttcatcaaatgttaaactgcctactgaagcattgagaataattaatgcagcaactgaaaataaataatgctttaccagctatctgggcatcccttaatccagtccagttaacactcaaaatcaaccactaggttggccaaaagggaggccaaaagctggagtctaagcagcagctcgacctcacctcagagcagccttcactgtgtgttgttcttcctgagctctgaggtctcagtttccaaataccaagaaaaagcttgagcaagaagctttctagtaaggtcattgactaatatgtaataaaacattcccccaaaacatggtagctgagatcaataacaacatttaatttgcttgggaatctgcaatgcaggtagaggcggctcatctctgtcccacttggcaccatctggggcagctcccagtcacgggctggggctgcagtcatctgaagtctccctcatgcctatgtgtggctgtgtggctttttcaaggggtgatctggcttcctcacaagatggtggctgggttcccagtgccagcatccccatagagagggagagatcttgatggagagagtgagagggagagggaggggaggcgggagaacatcatatggaaagtgcatcatctatcaccttttatgatctagtcttgcaaactacttgtgatgcattctattagttaggagcaagtcactaagactggcccatagttgagagggggagtagactccacttttggacagaagaagtgtcaaataatccttgtgtacaagctttgatactaccgccttccaagccccttccacctctaaggaggccacaggcccgggccatggcgtgtggcagtgctgtgaggccctggcttcgtggagccctgctctgccagtcctgctccctaaagttcactcacctcccagttgaacctgcacactaggttagaacaggaaattgtaaccatctaagaaggggcaggatagtctaacttctccctctctctccctctctgtcttttttgttgttgttttgagtaactttagcgtaaaactagtccagtacataaaaatctgaattggggagtatctgaaagtcccatttccagaaatctccagtcggctggctctcccactttttacttttctttgaagactcctccgagtggctctagcccaaacacaagccagttgtcacaaagttcccttctccagccagttgggagtcacccttggctggaaagctcttgcctgcctgggctctgggcctggccccctccatgctgtccgtgggtctctcctttttattagcttctccatcaagaaggctttcattactttccaatgctctgagcttctcaagttcccccttcctaggaaaagtgcrtttttaaagacagttcttcagcccaccactgcaccctcaggatgcatgccacctggggctggaggctggtgtccagggtgaggggagttaaaggatctccttggcctctgctgctccagtgacaagagcacattttctgccctccacttacgtcctgggacatctccttcaaatgcttgtcttttggcttcttgatggcagtggcagagaattggaggtgggataatttgggaggtggttgatagaacaagaagggaaacagagtcatctctgattcctctccctgcctagctcatttctgtggcagaagaaggcactatgcttttccctgacactgggccctttcatgcccgaaggtgggaacgcctggtacaatttcctgccatttcttcacaccattgctaactcccaatgtgttgggcatggacactgcagagaagctgatgcccaggtgaagctgtgaagctggtgaagctgtgagcatctggccagtgtcggctgccctttgttggaggcagtgcagcatggcctcagggcttggcatcacacaactctgaggggcacctggggagccaacctcatagaacacaagctgaatattgccccttgcagttctacaaagcagctgctgaccctccagcaaaggattagccatcaggagacatggatgcagatttcaactccacccctttctggatgcatgacaagtgacaggttatttctcatttctggtcttaaataaatttcgccatctgcaaaagaacaattttgaacaaagttgttaaatcttcagttcaaatgttctatcatcctaatattgatgaaagattatgaatcctaaattagctgcaaagtaaatgagatgctcttatggttgtggttctagggtatttcctgagcaagagacagagggtcagagtgggccatgcaaacatgttgccaggtatcacgggctgcttgcaaatagaaggtaggaagcagcagtgtgccaaacctaagagcattgtggaggtggatccagaggcagatccgttgggggggggccctctgttgagatttcccttcagtctcccccacccccacacacgtcatctcacttggatctccctctatgccccttccttaccagattctctctaactcatgcttcaagactcagtcttcccatcagcttctccatgcagatttcataggagtccacatctgggtctggtgccctccaccatatttcttctataccctgtgcttatcactgtagagtggttttaaatcttcacagccaggcgtggtggctcacacctgtaatcccagcactttgggaggctgaggcaagtggatcacctgaggtcaggagttcgagaccagcctggccaacatggtgaaaccccatctctactaaaaatacaaaaattagctgggtgtggtggtgcatgcctgtagtcccagctactcgggaggctgaggcaggataattgcttgaacccaggaggcagaggtgggaaaatttgggaggtgagccaagatcgtgccaacgcactccagcctgggcaacagagcaagactgtctcaaaaaaaaaaaaaaaaaacttcacacacacacacacacacacacacacgcacaatagtcatagagctttatttttatgcaatcgattataatcagttctctgccccacttctgccagggctggcagaaatctccctcatctctacaactggggtttgttccactcatcccaaaagtctatgaaggggaacttagtttgaggagggcatctgggaggactctattcatggccgaactggccacctttggttcactccttgtccagtgctccacaccttggttcccctttgtctggcctggctcctggtaagcagacagtgccaggatcccatccgaggcttgcgtgtggggctctttgctgggacctgcgggcagtctccctgcagccaacccccagggagctccctcrgaggtcctgccaccccccggagcagtgcaggtgcctgctgctcacacaaccccatctaatgtgtcctttttagtgctggggactctctttctccctcttttggctcttgcccagtcctttctcccctgctttccctttgtcctcctctgtgggacccatacactactcttgatgaaacaaaaattcatattttatgaaaccctccagccacattatgtgctatattaaattaaggagttatgtttatatgtatgttttcccaattagcaacacacttggggcaggcaagagctgtgttgtattaatctctactattccaaaagctgaaaaaatgccagacacacatggaaacttgagatgtttttgttgagttgaattgaattaaatatccctgttgtccagggttatccaagatgagtctaattcaagattcttttttctctttctgccttttttttgtgggtctggttgtttgaagaaaaatcacaagagtttctatcttatggcctctttgaatctttgagaattggcaaaacccaaagtcaggtgagtgataacatcttgtcagtagctgggagataaaggaattaggtttcagcccttggagaaaaggaggcggggacaggccagaagaatagggttacagcctattctatttctattctagttaactagaatagaaaattagagacagagcagaaacccagtcttagcgactggatctatttggtggtgatgaccaggagcaaggcgctggcttggttgggcactggggcatgggggcctaacattatcaccacaggacagcacccttccatctggtaggggcatgctaacacctgccatgcctagttctcagtgactccggacacagtgggggcagcctacccattaaggccttcattgtctttggtctaatttcctgttatggaaattacaaagctcgatggagtcatctccaaatggagagctgtcctactctgcatggaagcaggtctccaggcagatgaaagatggctcctgaggaaagaacactgacgttaactccaggggctgctcaagtcctagggtggtgatcaaggctttagatccacagaatgtagaagctctgatatctggagcttgaagctttggttgcatccactggctagctgagtagaattttggatttttgtctctggctgagactgacaggctatggggactccaaatgttccctgagtgatgtcatggagtccatggattcactgaatagaatgttgtgggaagtctgactagagcagtagggccacaccagctaaattagtgttcactcttctttctgagtatggtgagcccacaaggctggctgcctctgaaggtccctcctggttctcaatagtaaacctcatcatcagcagagagtatggtggggctcctcttcctgtgtkctgcggctcatgagcacacacatacagtttgtctaagacctggatcagatatttagatgtaagtgaaagagaaggggttattactgagttcaggtttggaaactgagttgtttggaaactgtttcttcccacttccctctgggtaatattgtgataaaggttttcaacaaacactgtcaaacaatgtcttgtttccagttacattttcatggaatgtaattagattattttagtgaccaatagtgaaatgattatgtcgtaagccaggctgcttcaggccataagctgatgtagagttttggagatgacacactgattgatccttggcgtaggcagaggtgaaatgtgcagtttattgggatggtgataactctaccttgactccacattcaggataagtagtagatcttttagttagaattacaattctccattcagaaaaactctgaagagtttatgaaagaccgtttgtagtgaaaagaattaacgtagtatttatttattttctgtttccatatgcctttaggattaaaaatatttggattaaaaacatttttttctttttgaaatcaaagttttattttgagatcactgtagattctcatgcagttgctagaaatattacacagagaccccatgtgctctttacccagttgctttcagtggttaaacaaatcctggtatatccatggtaccatgaattacagtacaatatcaccaccaggatattgacatcagaacagccaagctacagggcattccactgccgcaaggattcctcatgtggtctatttatagtcatacccactttctytcctatctccacccctccttagaccctggataccacgactctgtgctccacatctataattctgtcatttttgagaatattatgtaaattgaatcagatagtgtgtatctgatagtgtgtaagccagtcttttggaactggctttttctcactagcatcattctctggatattcatctgtttgatgtatttatctatagtttcttcttactgctgagtagtattccatagtatggatatatattaatagtacccaattgtttaaccatctacctgctgaaggacatctagttgtttccagtttttaactgttgtaaataaattgctataaatatttgtgaacaagtttttgtgtgaatgtaagccttcattgctctaggacaaatgtccaagagtataatcactgggtcatatgttatttgcatgtttatttttttaaaaaattgccaaactgttttccaatgtggctgaatgattctacattcctacttgcaatgtacgagtcatccaatttctctgcatccatgcattgggtgttgcacccaacattggttgttgcacccaacattgggtgttgttactattttttttttttttttttgagacggagtctcgttttatcgcccaggctggagtgctgtggcgcgatctccgctcactgcaagctccgccttccgggttcacaccattctcctgcctcagcctcccgagtagctgggactacaggcgcccgccactgcgcccggctaattttttgtatttttagtagagacggggtttcaccgtggtctcgatctcctgacctcgtgatccacccgcctcggcctcccaaagtgctgggattacaggcgtgagccaccgcgcccggccttactattttttattttagctattaatgtaggtatattggtggtatctcattgtgtttttaatttgcatttccctaaaggctaatgatgtaaaatatttcatgggcttattttccatctgtatatccactttgtctttgtgtcttttgtgcattttctaattcgatttttttaattgttagttttgaagcttctttatatattctagatattagtgctttgttggatatatgatctgcaaatattttcttacactctgtaactcatcttatcattctttcaacgaaagtttttaggccaggcacagtggcttacacctgtaatcccagcacttcagcaggctgaggtggtggattgcttgagctcaggagtttgagaacagcctgggcaacatggcaagcccctgtctctttaaagtaataacacaaaagttttaaactttgataaagcattccctccccttctatttcctggaaaagatgtacagaattggtgttaattcttctttagatttggtaggaatctccagtggaatcctggagataaatatttccatctgggcataaatatttcttttagggggttttaaaattacaaattaaatttccctaatagttattggctattcaaactatttatttatattggatgagctgtggtaatttgtccttttcaaggacttggtccattaaatctaagtttttgtagttatgtgtgctaagttgtttatggctttccctcgtcacccttttgctgtctgaagggtctgtattggttttccttgttttatttctgatattagtaatttgtatcttctctcttttccctttgccaatcttattagaggtttgtcagtttcattgataacctattgtttttctcttttgaatttcactgatttatctttgttatttctggaagcttgctttggatttatttttgtcttctctttctaggttcttgacagaggtacataaataaatgatttgaaacttttgttttctattgtgtacattcagtgctataaatttccctcttagcactgcttttaactgtgtcccacaaattttaatgttatgttttaatttttatttagctcgatgcatttacaaattttccttgagatagcctctttgactcagactatttagaaatgtgcttgtgagtttacaagtgcttgaaatttttcctgttatctttctcttactgatttctagttgattttattgtgattagagaacatactctctctgatttcaattcttttacatttgctgaggctagatttatagcctaagatagtgtctgtctttgttttctgttgcttataacagaatactcaaaactgggcgattgataaagaaaaggatttttttttttttatrgttatagaggctgggaagcccaaggttgagggctgcatcgtgtaaggaccttcttgctggggcggacttgctgcagagtcctgagatggtgcagggcatcacatagaaagggggcttaacatgctcatgtcctagtttaggtctcccttccttttcttgtaaagccaccagtcccacctctatgacaacttattaaccaattaatccatgaatgaactagtccattcmtgatgacagagcctttatgacccaatcacctcttaaaggtcccacctctcaatactgccacattggggattaaattttacaatgagttttgaaggggacaaacactcaaatcatagcactgtctatcttggcataggtttggtgggcacttgaaaagaatgttcattctgctgttgagtggagtgttctataaatgtcaatgagctcttgytgtttgatggtatccttgattattttttgtctagtttttttttaccaatggttgagagggggtgttaaagtttccaatgataaccgttgacttgtctatttttccttttagttctatctgttttcacgtcacatattttgtcgctctgttggttggtgcatacacgtttagcatttctatgccttctaaatggattgactcttttatcattaaataacgtctctggtaattgcttttgctctgaagtctactttatctgatatgaacattgttactcatttttttgattagtgtttgcattatatatatatatatatttttcttctatccatttactttctacttgcctatattgttatacttgaagtgagtttcttataaacaacatatatttgggccatttaaagagtgttctctgccaacctctaccttttatttggcctctttagtgcattcatggagtacttaattctattccaaattaaagtcttgtgaatgctatctgatagacagaaaataaatcatccagtatcctgagttcatgagaggttaagaaagctcatttgatgtaatcccagcactttggaaggccaaggtgggcggatcacgaggtcaggagtttgagaccagcctggccaacacagtgaaaccctgtctctactaaaaatacaaaaattagctaggtatggtggtgcatgcctgtagtaccagctactcaggaggctgagacacaagaattgcttgagccccagaggcagaggttgcagtaagccacaatcatgccactgcactccagcctgggtgaaggagctagactccatctcaaaaaaggaaaaaaaaaaagaaaagaaagcaagctcatttcaggtggggtgtggtggctcatgcctataatcccagcactttgggtggctgaggcaggtgggtctcctgagctcaggagttcaagaccaccctgggcaacattgtgaaacccygtctctactaaaatgcaaaaaattagctgggcatggtggtgcatgcctgtagtaccagctactcaggaggctgaggcacgagaatcgcttgagccccagaggcagaggttgcagtgagccgagaccatgccatcgcactccagcttgggctacagagtgagactctgtctcaaaaaaaaaaaaaaaaagctcatctcaactttccaaactgcttttcagtcaagcacatgagaaattaaaacagcagctgcatgaggtgtttactcatctcttagaaatgatctacttcctgctgagggactcctcgctcacctcaattcctggcactgttgttctcattcttatgtgctagtcacaactccgtcctcctgggagtttgtggagtgtggtgaatccaggatgagcttccttattttgaggtggctttcactgcagtggtctctttatttggacttgctattggttaaaccgtcggagctattctgtgtaagtgtccatagacatgggttttaggggactgatattttagctgtgtttaaattctcatatggctaagggcagcttatttttttctgaggcaaaggaaaagaaacacaggaaacatccatcaggtcatatttaatgctgaaaagttctgacgcagtttgacttcatggtgctaatgacagatttaaatggaactgatgcacatggatctgaaagtcgaattttctctgtttctggaaaattaacatgcgtctttagaggcatgatctgtcctcacacccgggaagacatgaatgagatatctaaagcagcactcaataggataaccaggaaagccacaggagggctagagaatcggctagtggagttgaaagccacatcaaatggttagaacttagttactagtgtgtaatctcttggataagagatgtctaaatccagaagaaccaatgccagaggtgaagcccgtccatccatccatccatccatccatccatccatccatccatccaggtaaacctgatgggatccatagaaaaacaagaggcagcagcatgttttcctgcacagggaagctgggttcaagacttatgccagtcaagcagcctggaggtctgaagtgtcaacctggggaaagaaggaaagtgtggaaaagacaagggaaggccgggcacagtgctgtaatcccagcactttgggaggccgaggcgggtggatcacctgaggtcaggagttcgaaaccggcctgaccaacatggtgaaaccccgtctctaccaataatacaaatttagccaggcatggtggcgcatgcctgtaatcccagctactagggagtctgaggcaggagaatcattggaatctgggaggcagtagttgcagtgagccgagattgcaccactggactccagcctgggcaacaagaggggaactccgtctcaaaaaaaaaaaaagacaagggaaaaacttgagggccctcagcttatggtggagggaaatgaaaaggggagagggagtgtgtgctgaaagccttcttagccctggccatcctggaatgtacccttatctggcatgaggataactccttgctctgaatcagatcccagcgtctctgcactaggaccccagctggtccgggagcacacgaacagccatcatctcctttgcttcccacctccacattttcttatatgccatgcgttctttaaacaattctttctacaagattttctgtgtcttcagagaatgctgcttgaatgttgctagagtttttattcatttcttatttaatgtgatatattaacagaatgtcttataggagggcaatgaaggactagggaacaaaggagtgacacagaaatgagaaaagtttgaaaggtaatgtcaaaaaaacctcccaaagtcaatgaaaaatctatgtccttataaatgaagcaattacactaattgaaggatacagatctgaataaatgaatagaccaagcatgttcctgaatgggaagactcaatagtgaagacattggttctcccaaatcagtggatgttattttgtctcagtgctaatccagtgctgcttctcctggtttcttcttataggtcattatttatatgaaaacttactcaagtactgtatctttatatatttattagccatcagtaccttttactatgaatctaatgttcatacattttgcttatatgtttatattgtttgtcttatttttttggtaggatttccatatatattctgggaattattactgttcattcttgttgtaaacattttccctgcctgtaactctgccacttatctttatactttgttcatggtgtcttctgtcatacagaactcttaagttttatctgggttcaagtgattctcatgcctcagcctcccgggtagctgggattacaggcatgcgccaccatgcctggctaatttttgtgtttttagtagaaatggggttttgccatgttggccaggctggtctttaactcctgacctcaagtaatctacctgccttggcctcccaaagtgctgggactataggcatgagccaccacacccggccatttccttctttttatttataattcatcaacaaygtgccttgttcagcaaggattcttccacctttataagtttgtatttaaaaaattcctatatgtacttttattccactggaagttttatatttatccttttattctagctagaattcatatttgcatattggtcaaagagggaactgactttattttctcttgtaattgtattgctggcttacagcagtttatttatttattaatcataactcaccctttccccacagttttgatataccgttttgatataccattttaaaaacacagtatatatggactcatttctactgcttttctgcttcatcggttacttaacaattcctccatcagtattgtttcaaaatatattctgatatctgaaacagcaagcctgttttcataattattctttctcagaattttattggttatacttatgtgtttcctagaagaactttagaatcaccttgtcacattttataaatcatcctttgagaatcttggtttgagtgtaataaatctcctaactgatttggtagaactgataattttacagtatgggggattctcagccagaaacgatttgtttctcattgattcaggtattttatagtttttcaagaatgtatgattgttttatttatatatgccataaacatttcttattagtttttaggagtcttatgggcttatgaaatttgtaaaggaggactttttttctatttattttttactacaaaatattaatttctgtatggcattcttattaatcacccatctccctgaattctattacagttttatttagtaagttatttgtcttggtattctaggtatataatcctttcagttgaaaacatagaattttctcttttgttttcaaaatcatagctttgctttatttttcttaacttactctattatatgaaacctctgtgcaatgccacacagtagcagtgattacagaattatcttatgcctgactttgtcatattttctaacccctacaaactgaaccaatattcaagaatcttagttctagttccatctcagttgccgctctttgttagtttcagtgtatttataaaataaggaaattgaattctctgagctcttattttccttccagttcatgtattatgtgatttaacagataggcatgacaacaaagattagcttttaaatgtgaaaatgggaacaaaatagggcctaatttatttataataaaatggaatctatttgataaccaggttacaatttacctacaagatttgaaaagttaagaaaacccaccagttggagatgtaaatcccaagagaggtcttcacccttcttgaaagctcatatgccagagaaactaatgatttgatcaagagagttttttcccccccagtattcagttgtgctaaattggctaaaaatggtgcataattgtacaccacaagtatccatacccaacctgccttactttctttgacttttcccttgtaaaatcttataatggacagagaagagaaattggagagaatttgaatgttgtgctagcaaaacataagatattgcaagactcagttcaagtttaaacttcattccctttcttctgaaagtcagccataattctctagccaaattgtctgaaaaaggatcctaaggggtgtcagagaaaatgaagcagatcagagagttatggggcctccatccactcaggagaaagctaaggggccttgcaggagacagtgatggattcaagccataggaaaaagcatacatcaagggcctctacctcatccctatctttggaggatgtgtataatttatagagtgtttaaattagacaaatggcccaatcgatttagaataagggacaggaaacacatgtttattttgcattaaactgaacttcaccagggtagaaatgcttatgatctcctgagttatggtgcttgggttctccatgaamgtgtgcctaattactgggattgcttctttgcacaaaggcgatccattatggaacatgctgtctccataaagaacagggaataagctaagcagctcaggctaagtggtaatttatatcattgtttatagaaagaaagagcaagagcaggcaggagggcaagacgacagcaagagaacaagaaagaaacctgaagaaaagaagttttagtgaagatggaaaggcttaaaacataccatggagaatgacctcagccttctgtgtggaggatttgcacttggagataaggaaagagagggacttcagagagttaagcagttcagtttcctttgcatttcttacatctgagcaggtgaccggagtgaacactctggaagccacagtggagtcctctgcttggggcctctttctggaaaccagatcaattcactgaaaaacaatttgcaaatgactagttcattgagaagcaagtgaccaaaactctaagtcaccgaatgacctgctcattgatttattgaagattttattccaaggtctacttccctctgcatttgtggctgccatttcatatgtgaatgggtgggcagtttgctgtcatgccctttttgtgcatctctatcctgaccctgtatgtggtgctgccttttcccaggccccctgcccctgccctggcctctgtctgcaaagcagttgcagcaacctccctcttgctgttgaagatactcatctgatgtctattgtgaattggctggagcccttctacaggtttgttagcgtccctctgcatccaggctgatggtgcctgccatgcttctacatgctgttctctgccacccacctgagcccagctagagtcagtggggaagtggaggagccacatcaaaacagtgtgtccacctcagtcaccctccagtgtgcattgacgaccaggcagccattagacccaaatgcagccccacagcatagaggcaaatggaaaggccacatatcctcttttcattctccttccatgtgaggccctgcagagcctggcatctgtcttcatcatcgtggcatcctcagactctttcttcttcctggagcgagctgtgctctctgaagccactgcctgtgtgggaagtaccccagcatttcttcgctgttgccaggcatcccttcctgtcctaccacttcaaatgcatcttttcatgtgtccttcctgagcacctctagcagctgcatgttcctgtttcagcctctgcctttccacagctcctccaagattcctctattgcagagcacagcaccaccttgcaggaaacctcccagaggactgtgaggaccatgaagcaaggggctgcatcttattctccttggtgtctggcccagcagtgggcccaggccaggtaagtcttctatgtgtgtgctgagtgatcaatggacaagaaaaccaagcagtgatgggcctgagagatgagcaccctggcgtgctgggggtgtcttgatatactgagttttaacaagctgagtgacaaaaaaaatgccagggaacttgagagaagatgggaaggaggtggagggtctctatgaggtgtgagtttcttccaacctggcgtatccggagtggggaatgaatcttcaaatgcctagagcctgctgtctgtaccatccagttacactccaggagcaacccacaactggtaattcccttggtgaattcaagcaaggatctccaatttatttttagatgttagatgtagtggttaattgaatatgccccacaccagcacagtccaaccaaacttccttcaataatggaaacatccgatattcactctccaacatagcttcctctggccacactgggcacttgaattgtgaatagtacaaactgagaaactgaatgtcttatttttaaaaatttttaatggattttggccactgtcttggatagtgcagtgagaagcaaaccatatggattcaaaacctgtctctagcaaatgtatactggctgtktgcctcatgtcccatttcctcatttattaaaggtaatagtatatgtactcttgttttttgtggtgattaaattattaatctgctttggttatctattgctacatgacaaatcacttcaaatgttgtggctttaaaacaccaggagcaattgatgacatttcatggtttctgtgggtcagagatttgggcaaggctgggctgtgcagttcttgcttggtgtctctgtggttgcagccatgtggccttctcttccacagtggctcagtcacatggctggcaggtggtccagtggcccctacatgggctgcatgagtgtcctcccagcacagcagttggcttccccaagagcgagccaccgtgagagtggggaaagctgcaatggctgtgattctgtagcctcagaagccactcactctcacactgaatgagcatccttgggggccatctcagaggcagctgccatagttaacactgaggccaggcctgaagaagccctgagcagataaagcttgttaagcctcctaagtgactttaacctcacttgctttgcaaacattacagagacttaacttgagctatttcttgtaaatatctatcttaaagaaaagcagaacgtaatctcaaccaatcagaagcagccaactcactcataattgaaagcataccgtgttttattgcacgtcactttattgaacttgacagatattgtgcttttttaaaaattgaaggtttgtggcaactctgtgttgtgcaagtccatcggcaccatttttccaacagcatatgctcactttgttgtcacattttggtaattcccacaatatttcaaaccttttcattattattatatatagtgatctgtcatcagtgatctttgatgttgctgttgtaattttttgcagggggtacaaactatacccatataagatggcgaacttagtagataaaggttgtgtgtgttctgaccgctctactgaaaagagagactgtttccctctctttccctctccgcaggcctccctttccctgagacataccaatgttgagactaggacaattaatagttcttcaatgacttctaagtgttcaagtgaaaggaagggtccacatctcccactttcaatcaacagctagaaacaattaagcttagtgaggaaggcgtgtcaaaagtggagacaggctgagagctaagtcttgtgcaccaaagagttagccaagttgtgaatgcaaaggaaacattcttgagaaagttaatttcttagagaaaatcatcattcatgtattcaatgaacacatgaacgataagaaagtgaaatagccttattgctgatacagagaaagtttaagtggtccaagtagaagatcaaaacagccacagtcttccttaagccaaagcctaatccacagcaaggccctaactcttcagttctatagaggatgagagaggtgagaaagttgcagaagaaaagttggaagctagcagaggttggttcatgaggttaaaggagagatgctgtctccataacataaaagtacaaggtaaagcagcaagagctgatggaggagctgcagtaagttctccagaagatctagctaagatcattgatgaaggtggttacactaaacaacagattttcagtgtagataaaacagtcctctgtcgaaagaagataccatctaggacttttgtacgtagagagaagtcaatgtctagctttaaagcttcaaagcttcaaagcttcaaatgacaggcttgttaggggctaatgcagctggcgacttgaagttgaaaccaatgctcgtttattattccaaaaaaacttagagcccttaagaattatgctaaatttcctctttctgaaaaaacaaagccttgatgatggcacatctgtttacagcatggtttactgaatattttaaacacataagtgaaacctagtgctcagaaaaaagattattttcaaaacattactgctcattgccaatgcacctggtcacccaagatggacatatacaaagagattaatgtttcatgcctgctaacacaacatccattctgcagcccatgaatcaaggagtaattttgactttcaagtcttattatttaaggaacaaattttgtaagactattgttcctatagatagtgattcctctgatggatctgggtaaagtaaattaaaaatcttctggaaataatttaccattctagatgccattaagaacattcatgattcatgagaggagatcaaaatatcaacataaacaggagtttgaaagaagttgatttcaacccttgtggatgactatgagagattcaaggcttcagtggagaatgcacctacagatatggtggaaacagcaaaagaaatagaatcagaagtggagcctgaagattaaactgaattgctgcaatctcatgataaaacttgaacagatgaggagttgcttcttacaggtgagtaaagaaagtgctttcttgagatgggatctatttcaggtgaaartgctgtgaacattgtgaaatgacaacaaaggatgaataattttatataaatgtagattacaataaagtagtgggagtgcttgaggggattgactccaattttgaaagatgttctaatgtgggtaaaatactatcaaacagcatcacatgctacagggaaatctttcatgaaagagtcaatggatgtagtaaacctcattgttgtcttattttatgaaattgccatggccaccccaaccttcagcaaccactgccctgattaatcaacagccgtcaacatgtcaacatcaagcctagaccctccaccagaaaaagattacaagtctcygaaggctcggataatcattagtatttctcagcaatgaagtatttttgaattagggtatgtgcactgcttttttagacataatgctattgtacacttcatagactatagtatactataaacataactggtattcagtgggaaacaaaaaacatgtgacacacttgattgtgatatttgcagtatttgcagacagtagtttgtcactgaacccgcaatgtctccaaggtatgcttgtatgtaactagaggttttttcagtgggatagactcaataagccaattgcatatccataatcaattaaatattttcttttgtttgacttccctgtttgtattatagaaatctccttcttgcattcctttgatggaactcacaaaccacttcctctttggagctgcctaattcatgaatccctgtttgctcaaactctttaaaaattttactgtgctttggtttacctttttaaccctgcaatgtgtatcaaagggtgcttagcacatagtgaatggagatattagtagttcttctctgatgctttccaagttcggygaaatcttgaggctctccactcacatttgcaaatgctaaacrctcctgtggtggagagagcaggggggctggtgtgtggacaccctctgaggtgttctcactggccactggctccttttgttgtctccctttcaattcagtaccagaacatcccttcaccggcaactttcgagtgggcctgctgaaacaatcaaggcagtgyctccacttaactttgagaaggtagtgtgtgagagatttagaataagcagctctggaactactcccagtttactcttataattacatacacaaaaaaatcaaaacctcagtttatttgtccaaaaatggggatagtattcttgtcctacatgatgagtgtactaatccttccagccagcattcacctggggctctgtgctccaggcagggtgagggttaggactgcatgtaggtgctgccttcacacccggagcaggctggagcgagtggtgtgaagcctcccaaccccacggctgggggcaaaggctgtgctaaggcacccggacatggagctggcctggcctgaggactcagagtggaaagacaggaaagacactggctgcgctgaagcgctgggacccgggaaggggcgtctaggcaagagcgcctgtgaacaggatttgtaagctgctcttggtgacttttggacagacactcttacttgctttactgctcccctttgtcttctgccccctttccctaaaagtatttccaaatgtgtgatgcccaccaggttcctgggcagtgcagtgggatgtctgcttggtttctgctgatcctcacagagcctggtgacttcttcctcccaggtctgtggatcaacactgtctccctggcctctacccagcgcgcaggaccccttagcagagcaggagaactcaggttggaactcattattgcatggtgcttgtcttgccatctgtccccataatgccttaagtgacaatgacataggcatctgacaatgtatgtggccatcactttttatcattttaagatatatgggccttctttttccaactcttttcccccgccagacagccaggagcccagagaagggttgtgttgtgtcctttactgagccccacaggcctgtgtgagccaggggcttggcatgcctgggaataagagcgccagcctttggccttcccgcagcctctccttggggcctttagggtccccacaggccctcccctcccctctgcattttccaggatccagccagctgccggcacactttcgtcctcctccgcacacgaggatccccaggcccagcggtgttagcccagagaggagcggcgtttgggatgtgatccacagctgatccctcgtggcccctcctctcccgaatcctgaaacatgaggaggcccttcagctgctggctcggagtccgactatgggaactttctccggtctacgggggcagcaagggtctcgcctcagggacttggtttatttatctagctggactccatcccttaatatcctacttacagaggaagaggctttagcagctaaatgcagccccatcccctcctgtggagactgtgagcagaaaaagaacagatatttacagaggcccgagccccccttgttgttttctgcaaggctgtcgagctggtggagcttcaggatcctggtcaggaaccccgaacccagcgctggaggccctgaagatcagggcacccgaccctcttcccagccgccaaaggcctgtgttggtctgattgtggattccaagctctaatttccatccatcctcccaatccgaattccctttgcagacataaacaccatcagcaatgtagagaatgtgtttcctcatctttgaatattaacactcatctgtttaattgagctactttttacatacatgtaagatgtgctgcaattgcaaaagaaacatgtgcttcgtgttctataagccatatcttccgcaagacctgccatcaaatgattgctcaaacatttgttgaatgggatgagcaatggaggttcagacaggtgccctgacctacccaggctggagggtagggagctagaaattcatacaaccatgccttgttctacttgttttgtgaaagaatcatgtgaccagtgacaaagaggctgggcagctgggtcaggcagcagggacagcgactgagctggggggactacagtgctgtgctcctctgcacccgtgctgggatgtctgaggccaagctgacactggccccccacaatcccttggggctgctcctcctcagggagtggctctccgggtttcctgcttgactcctgctgctcttgtgttgaagggccgtctctgggcagctccccctggcccctggccagagagccaggccctgtcaggcacgcacatggaggatgagggaggtgcagttgttttcacaggtgcagactctagagggaccccacgtggactctgtggcttctgccccgacgcactcgcgggaggacacagctctgcccggaagggagagtgctgagctgggtccctgctgctcatctctgtggcatcaccctgtcagtccttccctgtcacacatatgttccgcaagacctgccgtcaaatatttgctcagtcaaacatttgttgaatgggatgagccatggaggttcagacagatgccgtgacctgaagtgtcaaatgaagggatgcgtgtgtgatggccttcaccatttatattgttttaaacttgctaagcactagttaaaataaaaaagccaacacttttctttacatttttactctctctctttctaacatatagtatgtaaaaagaaaaatcttggctattccaatagaggaagtggctgtgttttgttttgctatttatttatttattaatttattttttctcctcactgtattagtctgcttgggctgccatagcaaagtaccacggactgggtggcttaaacaacagaaactcattttctcacggtcctgaagtccaagaacaaagtgtcagcagggttggtttctggtgaggactcttccgaacttgcaatggctgccttctcactgtgtcctcatgtggatttttccttgtgtgtgtgtacttctcatgtgctttccttttcctataggatagcagtcctgttggatcagggcctcacccttgtgactgcatttaaccttatttacttccttaaaggccctgcctctaaatcctgtcatactggggattatggcttcaacacttagattttgggggagacacagctcagtccatagcactgcccaatgggcaaagcttggccagcctccatgtctgtggggcttctctttcctgcgagggcctggtctcctagagaagccccagtcttccctgttcctggttgtccccatccttcctcctctcaggggaggaggccagaccttctccttggactcagtgcttgaccagctactccctccacaaggtgcaggcaggaggagttgagtgttagtagctcagcccaagatgtctcctggggttggctctcactgatccatgccaggggagctgatcaagcacctggaagtctctaagggcagctccctcctctggccctgctctcctcttttgtctccctgcagtgggtgcagtctgagggccctggtggtgcatttgcaccaaggagagagaggccacttctgcctgacacatatatcttctctcctcccttgtctagggttaggaactgtcagagtgtggctcaactgagaaacaactttctgagtagaggtggggaaagatgggctaagaggcttctgaggtcatgtgttcaccatcactgaggcactgtgatgtgttaggtgggtctgaaccctctggcttcagagagagtgcctgtggggcaccaggtaatccgagactgcagctcagagattactccagcaaagggtcaggtaggtgtgagccctccattcagagagaactctctgcattttttaccttcttttatttcattcttatttaataatcattcttatttcattaacttgtattttaactaaatgtattttttcctctgttaaaattgttttttgtttactttggagttcttcttaaattgaatgttacttcagtacaatattttaatttattttcagtatattttaaagccaatgcttttgaggctataaatgctccttagagtattttttggccatatcttataggtttcgataaataatgttctgaattacatttccttttaaagagcctttttacctttgatttctttttaaatctaaatattattttgaagttttttatatttttaaatgttaaccttattttggggagagaggctattcctttcttctttgtttctgggttattctacatatggagttgttataatttttcctctttcaaaattatgcgtttaaattgcatgcgttctgagtaatacgatgaaatctggtgccatcttgctgtgtctcactggggaggtgaatcatctctttgtgcaggtatccacactgcctctgctacctgcccgttggtcactcactcattgttctgatgataagatcgacagatcacaagaagggtgagtacagtacagtaagatattttgagagaccacattcacataactttcatgagtatattgttataattattctgctttactattattgttaatctcttactgtgccaaatttgtacattaaattttatcataggtgtgtatgtacaggaaaaagcagtatatagggtttggtgctatccaaggtttcaggcatctgctgggggtcttggaacaaatctcctggggataaggagggggtactgtacactgtagaattttataaaatttttatttattatttattgtttttggtagaaacaatgtctccatatctttgtctgttttctatttctagctatacaatcaagtttgttagttttattatttacaccctcggtcttttgtgctcttgcttctttcaatttctgacatgtttgttaaaatcccatccagtttttggagggagataaatacttgcacatctcttttgggttcttagtccactgggagcacagctggatgagtcctaagaacagaggtggttttattatggaaaagtagtcttgtgcttaagggaaaaatggaatttccttttccttttccttcttccccaaattggagattcttggtcctgcagactggatgactaaggtgctcaaccagccaaagcctgggagtgaggagcatgagaagagcaccagcttggcctcccagaggcagcaatgtgcccagccctgcaatgacaaagcacaggcaggtcctggaagctgcaggagaaagtagaacatgccctccctgctcaccttttaatgtggggaactcagtaacgtggtcacgagaatccaatagaagtcaccttccctgtgttttccgggtcagagaattcccttctggatagagacctgcacgtgagggagtctccagccaatggctggagtggtgtgcttacctctctagaaatgtgagaagcaggcgattagcaggcctctgtgacaactctgatactgttgtctttcttaatttcaatcctgtatgtgtttgtgtgtaagatttttgtattaacaatacatttaagttgacataatttgccttttgaagggaaaacttagcccagtaatagttattataatcagtgatatatttggaattatttatacaatcgctctaattttttgacttctatttaatagactttatatcaagaaagaagcagtataatagttaagggtgggggttttgcattcaaattctagttcttaaagttactagaaaggccatcataagaaaaccgcttaatctttctgcatctaaggctttttgtctttaagatgcacaactcataggatagtgaaagaattctttgatatttataaagtgttcagaatagtgcatggcaccaagtaaatgcaccatcagctattactgtttactttcttcccaaatttttccatttattaaatttctgttggttcttttttctgattggtttgatttgaaatttatacctctactaaggctgtcctcagagttttaattaatatatatttgttttatattaaatgagttttttgtttaattaaaaataatttcaaggcactgagatttatggttaaagttgctttgaatactactgaaaacataaaccaaaactagtagagaatggagagggagaaaatgaacatcttaaatgaaacaacagtttgccacaacttcaaagcagaaatgatgtaaaacgttcactaaataccatgtctttcgaccaacatgaaatgaatgagtatcatccatgcccagagaccacatacacctcctgggaacacagtaagtaccccaaacctcccaattgttgctgtgaccacccagaagttgctttcaatgaaccctagactagacatggtctaatccttggatggtttaatgatggaaccacttggccgcaggtgaccccactcatctgtacagacactttaacatctgtggaatcctgcatgaggtcaaggctactttgtgtccgttgttgatgcatttgctagtacaatcctagtgctccactttactgacttcctttatgtgatgaaagaaaaaccaccacattgcctccctttctgagagttcactgaggcagaaatagccccagttgagatgtgtttgtaaggaataaatttaatgcattgtcttggcaggaagcattttcttggtgccactttcctaggtggggtttcttcttgcagactgtggcttgaagttccagagcagagatgcacattactgtctaccgctgaagtgaactgctgcccctctggagtctggatatcatcagaatgaaaaaggttcagcactttttttcaggagcagtaaatcacaccctttgtgaggcgtacattcagtctgcttgcctctctttcttctagaagtgatgaagcagagtgatgcctttgtcttaactcctgtcggtgtggggaggggtgtctgggctgccaggaccctccctccaggcccataggcctgctggttcctgactggattccaaatgcgcacatgttcagaggtgcaccttgcctccagcatcccttgcatcccctcacaccctctctagagcacacagtcccttcacaatgcctcacatccatggtttaaagcattggagtcttctctgcttggcttccccaggagtaagggagcattatcagatgggcagggccctgcagagctttgtctttttgcacactctcccatcccaggtgacatgcttggagccaccatgcacgtcattaggaggga

SEQ ID NO: 6968 - DNA, 55005 bp, Homo sapiens
atgaatgggaagattcaccatagtcaagatgtcagttctccataaattgatctttagatttaacaaaatatcagtcaaaattctggaaggattgttttgtagatgtagataagtggattctaaagtgttatccaaggcaaaggaactggaatagctaaaacaagttttcacaaaactagaaaaagctttgactcactttacacaatttaagactctaaagatacagtaatcaagactgtggtattggtggaggtatagaaatacacatcagtggaacaaaatagtcaagaatggacccacagaaatatgactagttaaaaaattttaaacgtgggtgcaaaaacaattcaatagagaaagcatagtcttttcaacagatggtattggagcatttagacatgtattaaaaatgatctttgaccaatacttcacactttacacatagattaactcagaaaggattatagagctgaaagtagagcacaaacctgtaaaaattttagaagcaaacacaggagaaaatcttcatgatctgggttaggtacagaattcttagacataacacaaaaaccataatccatgcagaaaaatattgataaactgcagttcacagttctggaaggtgggaagtccagtattaagtttctggcatctagtgaggaacttctcgctatgtcatcccatggtggaaggtaagagagtgagagagagaaagtgaaagtgaaagtaaaaggggttgaattccctccttttgtaacaaacccactgccgtgccaacagcattaatccattcactgtacccacatggccttatcatctctcattaggccccacctccccaaacttgcattgggaataagtttccaacacatgattttgggggaacaaattcaaaccatagcaacaataaaatatttgagataaatttaacgaaataaatgtgagacttgtacactgaaaactacaaccattccagaaagaaatttttaaaaatctaaataaatgcagggacactctgcattaatggagttgaagctcaaaattttaagattgcagaactcttcaaattgatctataggttcaatgcagcacctatcacatttgcagcagagttgttctgaacaattgacaaactgattctgcaatttatactaaaagaagaattgagaatggtcaaaacaatcttgaaaaagaacaaagaacaaaattcatcccagtttcagagcgtactatacaactactaagggggaaaaaacaaacttttccatctgccctcacaccacgacagcaatcaacacagaagacttctgtgaccaaatgtgtggggatttttcctgacagatagtgtcagaccccacaggttgagggctcaagcctataagactgcctacaacctctcagatgctaggtgcatctggaggcattctggaggtaagccctggccaccaaaacttctgacccaccagcttcaagttggggcccccacaatcacctctttgggttccatttacataactgctgtcaccacacaattaatttgctagaacagctcacagaactcagggaaacacctacttaaatttactggtttattcttaaggatattacaaaggaaagtgatgaggaggtgcctagggtgaggcatgtgggaaggggtatggagctttcatgccctcctggagtgtgccaccctccagaacctccataggttttgctatctagaagctctctgaaccctgtccttgaggttattatggaggcttcattacatagccatgattgtttaaaccactggccattggtgatcaacataaccttcagtccctcaaccctctccagaggaggtaggcctgaaagtcccaaccctgtaatcctcccttggtctttatggtgacagccccatcctgaagctacctggggggctgtcaatgcattaacatacaataagacatcactttggtgtttctaagggttttaggagttgtatgctaggaaatgatttatatattatgtatttcacaatgttacagctactacatttatcaagacactgtggtcatagcataaaagtagacatatagacccatcaaacagaatagagattctagaaataaacccttatgtttttggtcagtggatttttttttttcagacagggtctctcactctattgcccaggctggaatgcagtggtaagatcatggctcactgcagcctcgacctcccaggctcaaacgatcctcccacctcagcctcctgagtaggtgggactacagatgtgcaacacaacactggctaattttaaaatatttttatagaaatggggtctccctatgttgatcaggctagtcttgaactcctgggctcaagcaatcctcttgcgtcaacctctcaaagtgctgggattacaggtgtgagccaccgggcccaccatcattggattttttttttaatgggctcaagtgatctctgtagtcccagctacttgggaggctgagacgggaggatcacctgagcccattaccaatggatttttgacagatgtgccaaggcaattcaatgtggagaaaggataggtttttcaacaaatggtgctggaataattggatatcctcatgtaaaaaaatatacgtttagtcattttacatcatacataaaaatcaagaaagataattgacctaaatataagaggtataactataaatttggtttgggatgtaaaagcgaagggaaaacttccccattgccctctgaaagtttgctgaaaatcactgacaaaaggcagattaatagaaaaggcatgcacatttatttgatcatagttttacttgaaataggcatgcgcctgtaattccagttccttgggaggctgaggcaggagaattgcttgaacctgggaggtggaggttgcagtgagccgagatggcgccattgtactccagcctgggcaacagagcaagattccatctaaaataaataaataaataaataaataaataaaaagaggccgggcgtggtggctcatgcctgtaatcccagcactttgggaggctggggcaggcagatcacgaggtcaggagttcgagaccagcctggccaacatggtgaaaccccatctctactaaaaatacaaaaattagctgggtgtggtagtcccagctactcgggaggctgaggcaggagaatcacttgaacccaggaggtggaggttgcagtgagctgagatcgcaccatagcactccagcctggtgacagagcgagactctgtctcaaaaaaaaaaaaaaaaaaaaaagaaagttcaataagcacatgaaaacatcgttagatattagagaaatgtaaattaaaacacaatgagatgccactgatgctttatgccccagggagtgttgtctgtaataaaaatccactaacaagtgttgagggatggtataatttggatatttgttccttccaattatcatgttgaaatgtggtctccagtgttggaggtggggcctggtgggaggtatttgggtcataggagtggatccctcatgaatggcttggtgcactccctgtggtaatgagttaccttgagatctaattgtttaaaagagcctgggacctcccccactgccaccccactctctttctcaccatgtgatgtgctggctccccctcaccttctgccatgattgtaagcttcttaaggcctcaccagaagctgagcagatgctggtaccatgcttgtacagcctgcggaattgtgagccaaataaacctcctttctttacagattacccagacttgtgtattactttttagcaggggtgtccaatcatttggcttccctgggccacattggaagaattgtcttgggccccacataaaatacactaacgctaatgatagctgatgagctaaaaaaaaattgcaaaattcttataatgttttaagaaagtttatgcatttgtgttgggctgcaggttggacaagcttgctttatagcaacacaggatggacaaatacaggggagaatgtgaagaaactggagccttcatacattgttggtggaaatgtaaaatgccattttgacaacagttttccagtttcttaaaatgctaaatacagttttaccatatgacccagtgattctactctgaggtatacccaagaaaattaaaatatatgtccacataaaaacttatatgtaaatattcatagcatcatttttctttctttctttcttttttttttgagatggagtcttgctgtgtcactcaggctggagtgcagtggcgcgatctcggctcactgtaacctctgcccccaggttcaagcgattctcctgcctcagcctctggagtagctgggattacaaacatacactatcatgcctggctaatttttgtatttttatttgagacagagtttcatcattttggccagactggtcttgaactcctgacctcaggtgatcgacctgcctcggcctcccaaagtgctaggattacaggcgtgacccaccgcatccagccgtcatttttcaaaatagccaaaaactggaaacaaccaaaatgtccatcaacttatgattggataaacaatatctgctatattcacacaatgaaatattactcaacaataaaaggaataaagtactgatacatgttactatatggatggacctcaaaaacattatactaaatgaaataagccatatattgtataattccttttatatgaaatgtccagaaaaggcaagtctatagaaacagatattagatttatggtcccgtggagcagagggtagcaatgagggatgattgcaaatggaaatgaagtttgttaatggtgtagtgcaaatgttctaatgatagattgcaatgttagttgttcagctttgcacattttctaaaaataattgaattgtacacctaaaataagtgagtgttattgtatgtgaattatgccttgataaaactgtttttaaaaataatagcaagatatgggagttgagggtgtttgcaagcaggtgattgattcaaagagggaccatataatgtaagctggtaaggaaggttgaagagtagtgggagagtagcaggatccatgaattattgatgcagctgacaatttattggctttagttcactagaggaagtgagatgcaaagacaggagttgataatcagaaaatgagatgattaaaattgagaccattgttggattaataatgcagaagttacaaatatgatcatggatggaggtgagtggctctggtcttctggagaggaagttcattggaagtaaggaggaaaagtgatgagtcatttataagcactccaagtgtgatgacagtagagctggagtgagtgataatgatacaggaactaaaatcttcaaggggtgacccaggtgatagatgattgctgcaaagaggaataatgtgtacaatggctttaaggcaagagactcaacgttggagttaagagggagggagagagtattgccttgaagcaagcagagacagggtcacaacaggctatagtcaggattatatgagatgtttgtataggcaaaaccccaagaaacttcctgaaaggttacggtaatagtaaaacaagtttttccatcacatctgtagcttgtgttgaatgagatgtattgattacagtcgccatctcggactatggcaaagctagggaggttagtggcctgaaaacataaaaggagtataatcagtaaaatcaagaaaaactaggcaggctggccagaattactgggaagagatagaaattagaaaacaagcagaattgtagagtgatttgcattctttaatcaaaggaatgaggctctctaagagtaaggtgagattcagcactgcagaaacacaagtcttggtcatggctggattgtacattctgttgtcactaagtccctgaccctatggcaacgacatcataatgaccccaaatgcaagtaaagtaaacaaaatcagggcagggctacaggtgatctggtgaactggacttggtggatggtgtggaagggactttgggagagacctgtgcccatgataaaagggaagatgaagatgttcctttgagtttgcatrtgtggggcctttttggcatggttgacttgtctgtactccttcctgtgacttgacatcaaaattaggtaagaaatcatgtatttattcatccttgttgacttttctagttttctgtggcattgattcttgaatggaagccctagcaatgaggaacttggcgtggaaaaggaggacagacatgcactgtctcaaccccctgtgtaaggagtagggtaatccaggccacctgctgcttggaattttcttcctgctcttttattgccctgaagggagttttgggtctgcctagagagtctggtagggttgagagtcaaactgtgcagctggtaagaagaatgggctgtaggcttgttaaaacacagtgtgctgtctctccctcccttttccgcaatctccgcagtttcggggtcagtaggtctgggataggccctgaggatttgcatttcctataagttcccaggtgatgctgatgtcctcaggaaccactaggttggatttatatgtatttctgcagaagaatgtttttgataccgtggaggrtacaccccaagtgttatgggttcaattctgtcctccaaaaagatatgttgaagtcctaactgccagtacctcagaccatgtcctgcttggaaataggatctttgcagatgtaattagttaggatgacatcatagtggcatagggtgggcctttaatccaatgtgactggtgtccatataagaggtggagaaatgtagagacacagacacatgggagaaggccatgtgatggcacaggcggaaagtgaagtcctgcagctgcaagccaagagcgccaagggttgacagcaaaccaccagagctagggacaggcaaggaggggctctcgctacagtttcagagggagcacggcctcgattttggacttctagcctccagaactgccagataataaatttctgttatttaagccacctggtttgttgtactttattatagaatccttagaaaagtaacacactaaagttaccttcaatgggtcacgcccttgtgtaacctctccctttgtgggaataaccagagacttgcctctgatagaatatggcagaggtgatgggatgccactcctatggtggttatgttatataagactctggagactctcagcagacttggaagataagcagactcttagcagacttggaagataaattctcttctgttggacttgaagaggcaaactgccatgtggtggcagagaagtttaagtggcctgcaggacctcagggcaaacttcagctaatagtaagaagctgggacccttagtactacagccatcgggaaatgcattgtgccaccatctgaatgggctaaggagggatcttctctagttaagaccagatggacacggcttggctggcaacctgatttcaggctggtgagaccctgagcagagttcccagcttggcccctccttaacttcagaaccacgcaaaattgtgagataatgtatttgtgtttttcaacctgctaagtttgcagtaatatgttactagaatgtaaagatagatacgtttattaatgaaaaaagaaaaactaaacttccaaacgatgtgtatagagtggtccttttttgtttaaaaagaatgaaataagaaaatatgttcaaattccatggtttgtgtaagtatatatatcaaatagtatatagaaatacacacgaccagtatactgtggtgtgtgtgtgtgtgtgtgtgtgtgtgtgtgtaactttggagtgatgttatttggaatgatgtaacacttgggattttggagtagggagattattggcttttttaagtataactttttctttggaagtggtaaggagcatgtttagctttaatgggaaaatcagataaagtttattaaagagaaaattaatgtatgttgttggtcatttttggttataaaaataatgtatgtttattatagaaaaacacagaaacaagaaaataaaagtttattatggcccttttggccagaaccaccgtcttccagtaattcgacaaaatgacaaacacaaagggaaagaggagaggctcctggtagatgtcttctaggccttttaggaagcatggagttgttccctttggtcacgtatatgtgaatctataagaaagatgatattgtagacattaaaggagtgggcactgttcaagaaggaatgccccacaagtgttatcatggcagaactggaagagtctacagtgttacscagcaggccgtcggcattgttgtaaacacacaagttaagggcaagttcttgccaagagaattcatgtgggtattgagcactttaagcgctctgagagctgagctagcttcctgaaacttgtgaaggaaaatgatcagaaaaagaaggaagccaaagagaaaggtacctggattcagcagaagtgccagtctgctctgcccagagaagcgcactgtgtgagaacaaatgggaaggagcttgagctgctggaacctcttccctatggattgattcatggcataatyggtgttaaaaaaaataaaatagaagacctctggattgtaaaaaaaagaaaattatgagcacccctccagaagataaacactatgtaatccttgcttttaacagttcaccttttaaacattatatttaataatatatttaatattttgtatacacaaacatatataacacaacacatgtaaactacggaacagtggagtaaattgcgtgttgatgtttatggactttagcaaaagcgccggcccagtttgtgtttggtctcagagcctctttggggttgatggaagtcatattcacagtgctgaacagtcgcagccgctgcttctgaattttgtcccaccttgtgtttatttccctccctttctgaattctctgtttctatctgtgaccctaacccctaagaactctcaggaacagtgctccctggctggtttaagctaaaatttccaccctgtggcagaggagatccagtggttctcttctggagtttacttgtcaccaccttttatttcctgggaaaatttgattatgaggttggatagtttgtttaaaaaaagtctgttaatgtttaatccacacgttcaaacctaaggagctctggaaataattttttaaataaaaaaaattttaatatgaaacaattaaagggccaggcacggtggcacacacctgcaatcccagcactttgggaggccgaggtgggaggatggcttaagtccaggagttcgagaccagcttgggcaacatagggagaccctgtctctacaaaaaatagaaaaatagctgggtgtggtggtgcatgcctggggtcccaggtagttggaaggctgaggtgagaggatcgcttgagcctgggaggttgaggctgcagtgagctgtgatcatatcactacactccagcctgggcgacagagtgagaccctgtctcaaaacaacaacaacaacaaccattaaagtrtatataacttaatctagcaattctacttctacgaatgtattttatgtttaactgttcacagttacatgaaaagatatgcataaagatgttccctgcggcatcgtttgtgatagtaaacacttctaagctaataaatcaacagagaaacttgtaaatgaaatataacctgtgatattgtgaaatatatatatttaatctttgtcctcatttcctgacatacagctcataattgtcaattaacaatccaggcagatctagatgaagtaatgtagaaaatcagaatattttcaggggaaaaagtaaatgtgtagatcaagcttgtccaacccatggcccatggccgcatacggcccagatagctttgaatgcggcccaacacaaattcgtaaactttcttaaaacattatgagattttttttggcgattttttttaaagctctttagctattgttaatgttagcgtattttatgtgtggctcaagacaattcttcttccaatgtggcccagggaagccaaaagactagacccgcctgatgtagatcattatgtgtggtttgatcctgttaaggaaataaaccatatgtgtacctccaagctcccttcctcactctttttatagtgaaattgctctgaatgtttcctctgcacacattgagaaccacatcagtgttatagttattgcttcagaagcctaacatagcttagaaaacttaagagaaggataatctattatatctacccatatttctactctttctgttttttgtttgtttgttttgttttttgagacaatctcactctgttgcccaggctggagtacagtggtgcgatcttggctcactgcaacctttgccttccaagttcaagtgattctcctgcctcagcctcccgagtagctgggattacaggcgtctgccaccatgccaggctaatttttttttgagatagagtcttgctctgttgcccaggctggagtgcagtggcgtgatctcagctcactgtagcctctgcctcctgggttcaagcgattctcctatctcagcctcccgagtagctgggattacaggcacacaccaccacacctggctaatttttgtatttttagtagagacggggtttcaccatttttgccaggctggtctcgaactcctgacctcaggtgatccacccagctcggcctcccaaagtggtgggattacaggcatgagccaccggacctggcctctttctgtttttatttcttattttctcatgcttcaagtttccttgttttatcattttttctgctcgaagaacttttttagccattaatttagggatggtctgctgttgacaaattctgttggttttctttcatctgaaagaaatgattgatttccccttcatgttccttttcatacttaaaaaaattaacttttaagttccgggtacatgtgccggtttgttatgaaggtaaactagtgtgatggggatttgttgtacagattatttcatcactcaagtattaagcctagtacccattagcagtttttcctgatcctctccctgctcccaacctccaataggccccaatgtgtgttgttctcctctatgtgtccatgtgttctcatcatttagctcccacttataagtgagaacatgcagcatttggttttctgttcctgcattagtttgctaaggataatggtctccagctccatccatgttcctgcaaaggatgtgatctcattcttttttatggctgcatagtattccatggtgtatatgtaccacattttctttatccagtctatcactgatgaacatttaggttgagtctatgtctttactattgtgagtagtgctgcagtgaacacatgtgtgcatgtgtctttataatggaatgacttatattcctttggatgtatacctagtaatttaattgctgggtcaaatggtatttccgtttataggtctttgaggaatcaccatattgtcttccacaatgtttgaaataatttacactcccaacaacagagtaaaagcattccttttttctatctacaccttcactagcatctgttacgctttgactttttagtgatagccattctgattggcatgagatggtatctcattgtggttttgatttgcatttctctaatgatcagtgatgttgagtttttaaaaagtgtgattgttggccccatgtatgtcttcttttgaaaagtgtctgttcatgtccattgtccactttttctttttcttttttttgagacagagcctcgctctattgccctggcagtgcagtggcattagcttggctcactgcaacctctgcttcccaggttcaagtgattctcctgcctcagcctcctgagtagctgggattacaggtgcatgccaccatgcctggctaatttttgtatttttaggagggatggccaggttagtcttgaactccttacctcaagtgatccrtctgcctcagcctcccaaagcgctgggattaaagacgtgagccactgtgccccatctgtttgcccactttttaatgggttgtttgtttttctcttgtaaatttgtttaagttcctgatagatgctgggtattagacctttgtcaggtgcatagtttgcaaaaattttttcccattctataggctgtctgttcactctattgatagtttcctttgctgtacagaagctctttagtttaattagatgccatttgtcaatttttgctttttctgcaattgcttttggtgtctttatcatgaaatctttgctcatttctatgtccagaatggtattgcctaggttgtcttccagggttattatagcttcgggttttacatttaagtctttaatccatcttgagttaatttttgtatattgtgtaaggaagagtttcagattcaatcttctgcatatggctagccagttatcccagcactatttattgaatagagaatcctttcctcattgcttgttttcatcaggtttgttgaagattggatagttgtaggtgggtggccttatttctggcttctctattctgttctattggtctctctgtttttgtaccagtaccgtgctgttttggttactgtagccctgtaatatagtttgaagttaggtagcatgatgcctccagctttgttctttttgcttaggattgccttggctcttcaggctcttttttggttctatatgaattttaaaatagttttttctagttctgtgaagaatgtcaatggtagtttaataggaatagcattgaatctgtaaattgctttgggcaatatggccattttaatgatattgagttttcctattcatgagcatggaatatttttccatttgtttgtgtcatctctgatttctttgaacagtgttttatagctcttcttgtagagaaagatctttcacctccctggttagctgtattcctaggtattttattttattttttggcaattgtgaatgggactgcattcctgatttggccctcagcttgactgttgttggtgtaaaggaatgttagcgatttttgcatattgattttgtatcctgagactttgctgaagttgtttatcagcttaaggagcttttaggctgagactatggggttttctagatataggttcttatcatcagcaaacagggagactttgacttcctctcttcctatttggatgccttttatttctttctcttgtctgattgctctggccaggactttcaatattatgttgaataggagtggtgagagggggcatccttgtcttgtgccagttttcaaggggaatgctgcttccagcttttccccattcaggctgtgggcttgtcataggtggctcttattattttgaggtatgttccttccatacctaggttattgagaatttttaacatgaagggatgttgcattttatcaaaagccttttctgcatatactatagatgatcatgtggtttttgtctttagttctgttgatgtgatgaattacatttattgatttgcatatgttggaccaaccaaacttgcatcccagagataaagcctattttgttgaggatttttgcattgatgttcttcaaggatgttggcctgacgttttctttttttgttgtgtctctgccaggttttggcatcagaatgatgctggcctcatagaatgagttagggaggagtccttccttcccctttgttcttgaatgatatattttcactgatataaaattttgggttgagagttcttctccctgaaaaatgtgtgccaactccttctggcccctgtaatttctagtggcatatccattgttactcaaatcattcattcgctatagattatgttttgtttctctctagctgctttcaagattttttcatcatgattgatttaacgaagtttgattacgatgtgtcttgctgtgtgtttctttgggtttatcatgtttaaagtttgctctgcttcttgaatctggaagtttgtggctttcaccaaatttgggcaattttcagccattatttttttcaagtactttctcagccttactttattttctcttctaaaataacagtgataccaatgttatctcttttgttattgtctcacaggtccctgataatctgttcatttctttttagtctattttctctctcattcagattgggtaatttctattattctattttcaaatttattgattccttgctctaccatattcttgctgctattgagccatctagtgagttttaaatttatttttcagttctaaaatttccatttgattcttttttattcaccacctgcatgaccttgtgtagttttttaacccctctagactttagtttcctgaattataattagcacttacccaagtttgctgtgagagccaaggatataaagcttagctcagcatctagcaaagcctaaacatttcaaaaatgttagttcccatttaaaaatcatttttctacatactaatatcaaatatttctggttttctggtgtatgatttttattgtatgggggtcagtcccaccttacagacacattgatattttacaatgaaagtcagtgggaagttagattctcattttaccagagcaaaattctgcacttcagtggaatatgtttactcattcttaatgtacccatacattaggaactttagcctaaaattttaatttaacattttgatattttatgatttgttttaagtatattttatgtgttatacatattatacaaatatatgcacatttatacagatatatgtattatatatacatatatagatacatatatatatatacagatgtatgtattatgtatacatayatagttgattctcattattcacagtagttatgttctgtaaagtctctgtgaacattgattagcaaatatggaaccattgttcctaggagaaatacagggttaggttcctacaagcttctagtcacaatattttaataatctgatcaacatataaccttgttttatgtatgtttgtttaaagaaacctaattcaatatatattgttgattcatttactttaaactcattgccaagaggaatataactcatccctgaacaaagcttatgtaacacatgtgttttctcccttcacaaggcacatcacagcttaggaacagcagagagcacttcagcactacatttgaagtcattttaaacagcaaaatcatcaacaaaaagcacaaacctgtgaaaaacatagcactaaatatattgtgaaaaggccacttgcttataatgtgagaattgaaacaagaagacagaataatactttgtttgatcttagctgggaatgtgcatgttgcatgactcgaatttctcactgtcctctgcatgtctgtgaatgactgaccacaaaagcacagtaaattgattcgagggttacaaataaaacttagcaagtaggtatatttgtaagaatggaatgtatgaataatgaagatcagctctacagmcacacacacacacacacacacacacacacacacccctacatatatacattttcttaattatcgacattctaggtagatgaaacagatttgggtctttacttgggcatataatatggtgctgtgatggggaaaaattttagacttgcaaaggcacattaattttayaaactacactttatcatgatgtattatgtattttatgtattgtttgattagatttgctaaaatattaagtatttttgtgtctatgttcatgagggatgctgatgtataattttcttttcttatgatatctttggttctagagtcaaagtaatactgattttatacaatgacttggtgcatattctctttcattttctgaaaaaatgtgtaggaatactttttttttatgttttacgttttatcagtgaagccatttggcctgcagttttctttgtgtgaaggtatttgaaattctttattagatatagggatattggattttctatttcttttcttttcytttttttttttttttttttttttggtggagacagggtctcagtatgttgcccaggctaattttaaatgcctggcctcagggtgatcttcctgtcttggtctctcaaagtgctaggattacaggtgtgacccactgcacccggctgattttctgtttcttcttgtgtcattttggcaagttgtgtcttttaaagactttgtaaacttcatttttgttgttgaacttatcgacataacattgttcacagtatgctttcattattcctttaatatctttgtaatttgttgtgatgtcctttcttttattactgatatttgtaatttgtgtttttttttgattagccttggtatgagtttatcagttttattaaccttttcaaagagctaacttctggtttgctgatattcagtttcattgatctactctattatgaacaaatatcttcttactttggttttgattaactctttttctagcttctcaagtgggtaacagatagtgattttatgttttttcttttctaatccaggcattttaaagctacacaattccctaaagagctgctttaactgcagccctcagattttgacatgtattatcattcagttcaaaatattttccaattttctttgtgacttattctttgaactataagtgatttagaagtgtatagtttaatttccaaacaattgggggaattttctagatattttattattattgattactaatttaatgctgtagtggccaaagaatatactctgtataattcaratgttttaaatttattgagacttgttttgtggcccagcatatggtctgttttggtgaaggtttcatgtgcacttgaaaggaatgtgtatgctacttttgatgtgtgtagtgtcccacaaataccaatggcatcaagttggttgatagtgctattcaaatcttccatatccttactgtttttttttccctaattttaccagctgttgagagagggggtgtcaacatctctaactatgggattttggtggtgtctatatttcctttgttctctcaatttttgctttatgtatttgggacctgtgatattgcattatatatatattttttaattttaattttaatwtatttttttgagacagagtctcattctgtcacccaggctggagtgcagtggcacaatcttggctcactgcagcctccatctcctggattcaagtggttctcctgtctcagagtcccaagtagctgggattacaggtgtccaccaccactcctgtctaatttttgtatctttagtagagatggggtttcaccatgttggctagactggcctcgaactcctgatctcaagtgatccacccacgtcagcctcccaaagtgctgggattacagacataaaccaccgtaccctggcctatatatttggttttcgtctccatttcctgacatatcagcttctaactctcttggaatctcctgagtgataagagtgtcttttttatgctaatgagatgactatggccagaggccccaaggtagcttcaggatggggctggtcaccataaagaccaaagtaggattaggggactggaactttcagcacccccctaccacagggaggggagagggtctaaaggtttagttgatcaccaatggccaatgatatattttctgacctctttactctttattatttactcattcctttttgcagaactatgcttttaagattatatatatctatatagctctttctctatatctatctatatatacacatatatatatttgaggttctgaaagtataagtatacatataggcatatatttttacatttcttatagtgcagtactgctggagtccagcatctacttcttcattttataacttggattagatctcagttaactaacctataccatgcctcttattttgtcaaagagaatgtttatttttaaaccttaagctttctgatgaatcataaaccataatttcctattttgatttagccagtgaggtaatatcaagttgcttccccaggtttttctttttcttttttttttttttctttgagacagagtttttgttcttgttgcccaggctggagtgcagtggtgcaatctcagctcactgtracatctgcgtcctgrgttcaagtgactcttctgcctcagcctcccaagtagctgggattataggcatgcgccaccatgcctggctaattttgtatctttaatagagacagagtttctccatgttggtcaggctggtcttgaactcccgacctcaggtgatccacccaccttggcctcccaaagtgctgggattacaggcgtgagccatcgtgcctggcctcagatttttcctatatataaattttacaatggcttatccttaaaaagtacttaagttattctattattgctgcataacaaattacctgaaaatttagtggtatccaaccataatgtttcatttttctcatgattttgtcagggattaggtgaggcagtctcactttggagtctgtcatgcagttttggccagatgtcagatggggctgcagtcatgtgaaggttctactgggccggaaacctacaatgaccctcacacatggctggcaggctgttgggagctcagctgaaactgttggctggagcatttatatgcagcttgtccrtgacagtgatttcaggataactggactttttacatgggctggtttcacctgagaggaagtgtctcaagagaaccaggcagaaatttttcagaccttttagaggcttttcagaactatacttggtgtagtatcatttctgttgtgttctattgtttgaagcagtcacaagcgtgtccagattcaagtggtggtgacataccccccatctcttcatgggatgagtgtcaaagagcttgtgggcaatacatttatactgtttcatggttactgaagtatatcttacatrtaataaaatgcacggatcttaagcatcgagttcaatgaattttggtaattgtttagacccctgcatcaactgcctgatgtcaggtacagaacattgttttcactctgtaaacttcccttgcgtgcctttcaagtcaatcctcacacatagtttttcctgttctgtgaaggcacataagtggaattatactatttgtgtatttggcttcttcaactcaaataaaactttcagattcatccatattgttgatgtaccacgtgtatgttcttttttattgctgagttgtatttcactgtatggatatactacagtttctttatccctcacccattgttggacatttctaagtgtgtggctattataaatgaagatgacatgaacattcttgtatacagcttcaaatgttattgtggtatctttggaatatttttgtattattagaatccagtgtttccaaattgtttcagtgctcaaagacctttgaaatttacctctctacatggtaaagatttactattacaagctttttgggattaaggaagcaataatttatagcagggggttcccaaccctgggccatggatcagtaccagtctgtggcctgttaggaactggggcacacagcaggaggtgagtggtgggagagcaagcgaagcttcatctgtatttacagctgctgcctgctgctcacattactacctgagctctgcctcctgtcagatagtggcagcattagattctcataagagtgtgaaccccattgtgaactgtgcatgcaacggatctaggttgtgcactccttatgagaatttaatgccttatgatctgtcactgtctcccatcacccctagatgggactgtctagtagcaggaaaacaagctcaggactcccactgattctaccttatggtgagtaccttataattgtttcattatatacttcaatgtaataataataaagtgcacaataaatgtaatgtgcttggatcatcccaaaaycatccccctctgtgggaaaattgtctttatgaaactggtccctggtgccaaaaaggttggggaccactgatttataggatccactagaaaggatggaatggtgtcttaccaagaaaaccaaaatctctatcattcatcatttcacttacataaatgctcagtatgaaaaattatagagatggctaagattttaaaaaatggaaatggaaatttcccctcaaaaccaatttctcctctgcagccttcttcaaatctcatcccctggaggtcagaaaaaaggatgggttagaattccaaatttcttggtgtgtgtgcaggaggaagaggatagtattgttggaaagtggaagttcattattgactacaaactacaagtctgggttcagtaataacacttayatcctttctagataacccaaccccaagatattgctgctgttaccaaagagggagtgaaggtctctgaaaatgtaggagtccctttagtagatggggagaaatgggttaaagatttttaaaaattgcacagacagtagttgtttgctctttggttacaggtgaattatctctatcctagttaggagtggaggactgaagtatgtctcaatgcacaaactaaggctgtgcaggcttggaaagaaattttcttttgtaataaaaggctaggccccttgctatagacatgagtgattagttacaataggttattgggggtatcatccaggtaatgaaatgttcaacaagaagattataaaggtaactagatttgccccatggattttgcccagtggttttgaaggcaaaacaagattaatttgaatatgtaaggaagaaaaataacttgggattgatgaggggctgattttttacatttataaaagcctgatggtgtcaactacaaatttaaaatctgtattgggtatacacagaacaatctctagtgtggcaccagattaatgggggtaccttgaaaaatcaggtcagaataaagtgacagaaattataaaacatacatgataatgataataaacaagacatttatttttcatactcttttgggggaaaggaaaaaaatcagtttgccctacccaatgatggtctttctgaaagattctccattcattccatagaactggataggttgcttcatctcagaggattttgtactcttaattcataaagagaacttctcttcaggaaagtggtcaaagggtgagcctctgtgagcagcttcgctggtkcacagccagactccctctctgggtgaagctttttccacactggccgcacagatagggtgtctctcctgtgtggattttgccatgcagaatacaattccccctggtgtggaaactcttcctgcactgggtacaggcatagggcttcaggcctgtgtggactctgatgtgaacaattaagcttcctttctgactgaaggcttttccacactgatcacatctatagggcttctcaccactgtgaactctcctgtgaacagcaaggttactctgattcctgaagcttctctgacaaatagcacactcgtagggtttctgtccagtgtggagtctctcgtggacagcgagactacctcgttgactgaagcttttcccacactccttgcactgataaggcttctctcccgtgtgtatccgttgatgtgtaacaagattgcctttggccctgaagctttttccacagtgggtgcactcaaaaggcttttgaccagtgtggattctctcatgtaacgttagactacctttttgccggaaggattttccacactcctggcactcatagaccctttgtctcactccaggtgaatcttcctgtagtgtcttcgaatctggggatttttgttccagcttctctcttctgaaagaattttggatatcccagcttgaggatcctgtagcctcagagtggtcatatttgtggtgggcttcagtcatcacatctgataaaatgagagggaagtcatataagaagcaccaataatgctgagttagaatagggaaaaagaaacataatactttgagtgcttatgatgtgccaggccttattctttgcatagacaatgcaatcctgaaaacaatgccatgagagtgatacagataatgggagcaaagggagcctgtcaaaggtcacagagctaggtaagttagagctgactcaaataggcattctccatagcagtgtactgcctctaaatttaatttaggccaacaaataaccttgtaagatagacatggttttctctattttacaggtcagaaaacaggctcagaaaatttagaaaactatacagaatcacacagagccccatacccaacttttatctgactccaaaacaggtgtggatccaggctatataaggcctaaaactttcccattttagaggcacccttttaagaaaatgtataaaattaagcacagggtcttggagagaccaatccaagtgaggggtcctaaaactgaagctgcatttgcttcttcagaaatccacctctgtccaatctgttctgacaatagaataagcaccatgacctcagaaaatatgtagcacaatcctgggtactttacatctatcattgctaatccctgcaaccctacaagatagaacttattgtcctattttacagacgaacctggagcttaaggaagttaaataacctgtctgatactgcagatctagccatggcaattatagaatctgatccaaggaatttttcccattaaaatccttgctattttcagtctactaagctatggcaaaactgaaatcaattttggtttggaagttattctctatgcagatattgacttttttttttccgaatactgccctgcatctgagcctcctggtgcactttaaatatgggtccattcatcaccattaacagttttcttggtgtctgtcactccagggtaatcttctccttgttcccttgccttattcagagacagtgctgagatttaagctgctcattcattctcagagactacttcaacgctacctccatatcaagatggttctcttgctctgtttctactattacttctaactccagctcacaggcttttcttataaccctaggaacagcaagctctaccaaagcaaggtctcctctgcttcctcagactgccgaccagtgctgagaacagggacactgaatatctgtgagctgagcgcatccagccatcaactgactcactcactgaagaacgctacattctgggcatatcttccatgacagtccagcagggtagctgttggaaatccaaacatgtccactcctgcttacgacctcagtcaccacctcttcatatgattcttccatgggctgttcctgagcacctgagggagaaaaacaaacagaaacaaacaggaaagggcagaataattgatatgtgagaaggaaaaagtcaacagttgttgagacataagtgaatgtaagaaacctagattgtttgacataatgtcagttactaaaatatcactgcaaaatgggcccaaaggtaccaggaccacacacaaatgagtctaggaggaagcaggatgtgggaaagcagagaacacataaacatatatctcttcctgccaatcccaagttaayagtcactcctgtttacactttggtcttggcatgtaattgggaycttccattttggttccccacctaaccacctactaytttcttccctccaagccccagaggaattcagaatctaagaaaacaacatttcagccttcatgattggttggagccaatcagctctccagttatctgtagttacaaagacttaacaagagagtccatttgttaccactgaacaattcttaggaggctccagacccagactcgcctttctcttgctcttgaagatacaagaataccagttctgaccaagtgtaaacacttgtcaattcttggaaaagaaagacctactctggactccaagcccaaggcactccaactaggttaagtaacttgcccaraaacccacagaaaataaggagtcaaagtggagcaaaggttcaaatccaagactttctggatccaaaatgtatgctcttacattagacagttgtctagttcctaatcactaaagagctggtcagaatgcttataaaattgaacagaaaggaagagagtttgaccagattgaagtrctctttcagatcctaggaatcctcttgtatgtgctctaaattattttttaatttttttaaaattctgagtcaagattttgctctgttgcccaggctggagtacagtgactcaattatagcttgctgtgactttgawctcctggactcaacggatcctcccacttcagcctcccaaataactaggactacaggtaagcaccaccaagcctggctaatttttaaaaattattttaacttttttttgtagagatcgggtctcattatcctgcccaggctggtctccaactcttggcctgaagtgaccctcctgcctcggcctcccaagacatgtaggcatgagctactacacctggcccacatgatctattttttwaaaaaaatatttcttcttacttcaggatcctaattactgaattcttayacttttaagaaatgcagtggttcaatgcatactccttgtttccctctaatttgtcctatcaaaatgctggccttctgatttaatgaaataatagtatgatgctaccattctttgttttgtcaacctaagcacctggttcttcttgacaactgcacattctgctacatgctgtgatgaccaggagaatcatttaaatttttatttggaggactcacttccaacttggaacacaagctgcaaaggaattccctaccagcatgccagcamatcatttggaagttcaaggtattcttgctcaacagctgcacacacattaaaagtccctggggtacatggcgcctgctgcctggggttggactctgtcgccggggattccagaaattagagtagaattcacagctctgcctctccacctgctgtgaggtcttcaagttacaactccgccgcctatcagggacctccgtgattagtaagggagaaattgtcatatttttctccctagatcacaggtctgaggaagcagtttccccaagattttgtaaaagtggctttataattaaaaacattgattttcctattagaaagrctactatatcctttggaaaaagcttagaagtagtccgtgagtcttggcttcttgccgtggctcccccaggatatgatcttgggcgagtaacccagcagccctgactctgcttccccacttattaaacaggttactaacactgtcctatcaggtaggacaatgagaaggaaagaaccaaacaagaggagtatcagacgagaccaccagacttaagatctaaaatccggcgtcctctggagggcggatgagaagaggggtacacttggcggtctggaaaatgtcctggggccagtttcaggtttaggagcttgtgggtagcgtggtttcccacacgctgcctggcttcctactctcccccgcaggggctgcctctcctcccaccccggaaggccggcaccggcttcccgcactcgctgaagcccgcacggaggccgggtgagcctgccgcggcctccccctcccacgccccgacgccatgggccctgctcctctccgcagacgctgccctcccgcctcaggccccgggccccgggcaccgggcccgccctgcgtcctgaacctcggcatcccgctctccggtccacgggaccctgctctgcggaccgccgacctctccgctcgcggctggcctccctcggggcccgggccggccaggcctgctcatttccttggcggccgctggcataaggcggccacacggagggcccgggacagcggtctgatggcgcagccccgccttgccccggcgctctgacccggccagcggcctcactcaccgcagcggcgcgtgcccgcagacaaaggccggcgccgagcccgcagcagcgccagcgccggcgccggcggaatggactacaactcccaggagtctccccgcgagcccgcccgccgggccgtgggtctcggcggccccggcttcccaagagctctgtgggaaatgtagttctctggcgcgccctgcgctcgggccccgcaggtccctagggcgcggggacctcaagccgtcccgtttggactggtaatccggagactcacagcggtgacctgtcagcggacgcggagccgggacggagccacggccgctcagattagcaggatctgattgacagcatcggggtagcagacgctgagccagggactcaggaatacagggttcttgcagggcgtcgcggaaggaaacgaagtttttgggagaaatccgtttgataaagccttggcggcttcgaggtcatgtgttgagcctctggctgcatgaacaaaagcgaagcccgctttcatggagcttctgtgaagagcaacaggaacacaggcagtccagtcgtcctgagatactgggaggagcatggttgcttttgaacacgtaggagataaagcctctctaataatgcctgttttttttttttccttcactctgtctcccaggctkgagtgcagtggcacggtgtcgcctcactgcaacctccgccttctgggctcaagtgattctcctgccccagcctcccaagtagctgggactacaggtctgtgccaccatgcctggctaatttttttgtatttttagtagagatgaaggttttaccatgttggccaggctgtctgatatgccttaagcctcttttaaacgcacttttccaggatcggggccacatcctggagctgttctgcctggccgggtgtatctctgggtccctgcctctggagcccctctccgtagatgtgtctgtccatcctctttcgtgaaggactaataaagaatgcttcctcttgctatgttcttgttctctaccccaaagccacagatttgttaaatcaaacaacttaatttcactcaatatgcaaaggtgtcgtgtaagtaataagttgattcctaaatgttagcttttactattgcacatcatttctgaatttcattcaacatttatccgttgaatccattttaagtgctgacactggggatacgaatgtgagcaagacacactccgtgctcctagggaggagctgacagtctggtggagcaaacaaacaccaccttcctcacatgggggtcggggtgttgcacagctaagtcccagagtgtgtggtgcaaactgtcctgaagctccccattcctgaactgccccaggtggctcctctcctcactcctcccaagtctgagaaaggggtggagggcggcacacagcaaaggccaaggctcagagtcctaaggctgcggcctctgcttcacacaagggtacataggttctgttaaggtcaagaccggctgtggacactaggacaagtttcagatcctgccgtgaaggtacatgacaaagcattggtgggaaaaggtggctgtgaggggggaccatcgkcacttttatagatctgcataaattcccttaaggcgtctcaggaaagtggacacattgaagggcccaaagcaggggagaaagctgttaggattggggttgatgtgaccccagcctccatagacagactgcccagctgcaaaatggggcacatcctcacccaccacctgcatcttaaggcaaatactcaacaaaagggagggtgtggggtgagggtgaaagggaaatcatccgcagtgtagatttgaaaaattaccaaagaacaatttcctcactttgcaggcatttcaaaatattaggggaaggacagataattcaataaatggtgttatgacaagggctagacattggtggggtcggggagttgaatgtttacctaactcccatgccaagagaacctccagatggattaatgtaaaatgggaaacacagagccacaaaggcccagaagaacacatggattaatcttcttataatcttgtcatagggaaggctttcatttttgttttttttttgagatggagtctcactcagtcgcccaggctggagtgcagtggcgctatctcggctcactgcaagctctgccagggaaggctttcttaaccaatgtaacaaaggcagaaacaataaggaagaagatttaaatccagcacttctgtgtggccaaagtaccactaaatgaagttaacatgtgacaagctgggaaaatattagcaatcgtcatacttaaagacaccatacaaatcaataagaaaaagacagttcactagaaatgtggcaaaggacagcaactcacacacacacaaatgaaaggaaaatacattcattattcattttataaaatttccaattgaaacaaatgaaaattacttcccaagtactaaatggcaaagattgcaaaggagactggggaagtggacatgtctgtccgtgtgtaaattgagatgactgctctgataggacatttggcagtgcataccaaaagtcctaaaaatgcacatattccttctagaattttttctttggggaaaaataatcagataattgtatcctaattgtggaatgaaagccttagggtccaggttgctgaagtraattattggctttgaaaggacttttagttcctttgaaaggattggctgccctagaagtttccatgagactgtgaaggtctagggaagctgaagycttcacttgctgccatagttctgaacaaatacagtcatttggtgcttagtgatggggacaccttctgagaaatgcatcgttaggcaatttcatctttgaacatcgtagaatgtacttacacaaacctagatggtacctcccattacacactcagtgtaagactcagtgtaaggctcagtggtttagactctattcagtacagtcacatgctagyaactgtactgaatactgcatgcaattgtaacacaatggcaagtatttgtgtatctaaacatagaaatgctatagtaaaaatatggtggtataatcttctgggaccaccgttgtatatatggccagtcgttgactgaaaggttataatgcggcgcatgactgcacctgggtctagagtggtagaatgagagcccaccctcctggggtagggggttgatcagaacactttccatcgtgcttaccatctgtgtctactccagtccctgtcagaaatgcaggcctcttcagtccccactggctgtgttcctccttcctcagtgctctgcacactcactgcactgtgcgagccttctgtccactccacactctcctctcactctgtccattatggagcagtgcttggagaaagtcagctttcttgcagatccctctgtcttggtggccaagcttgggcagctggacccccaggataaagggatctgtgctttagtgtgattctttggaaaggttgttgaacctgggctagagctgtccaagcatttcctgatgtgctagccatttctcagggctggaagtgatcgtggattctccttggacaaaccattccttttctctgaagccgcctttgtccttttgagcaaatgtgtcttgtgtttgatttcactagcacctgatttataaactcaggatatgaagactttggccttcatgagcctagtgtgtgcatcgttactcttgtcccctcataactcccacaactattcatataaaaatcatactgatggaagctatctctgcaagcttcaggcagattttgggtcttgcctttcatttctaccatttagccagctgtgcccttctttaacctcttgatggaattgtttataagccagaaagtgggagggaaagtgtggggtggagcagatgacccacacctagtacaaawttgcatttgttttcagcactgtgggctaagccaacatttcctgcagaggctctgatacccagatctgattaccctgtttggtgtcacttagtggggctgcagtcaggacccctttaggatgtatttatggtgctcctcagctcacaaagactatgtgccctgtattgtgcacgtgattgctgtgctttcataatgaaccttttgaggaaatgtcatggaggagcatgaagtcctgcattcctgtctcccattttgtaggaaggtctcccacgtggccagaggctggagacatgaatgtggctgtgtagcaggatgagctgcagacaaaacccctcagacaccgagttaaagaaggcagggctttattcagcaggaagcatcggcaagactcacgtctcaaaaactgagctcccctagtgagcaattcctgtccctcttaagggcttacaactctaagggggtccgcgtgagagggtcatgatcgattgagcaacagggggtacatgactgggggctgcatgcactggtaattagaacggaacataacagaacagggattttcacagtgcttttccatacaatgtctgtaatctatagataatataacccgattaggtcaggggtcgatctttaactatgaggcccagggtgtggcactgggctgtctgcctgtggatttcatttctgccttttagttttcactgcttttttctttggaggcagaaattgggcataagacaatatgaagggtggtctccttccttagctgaagtgggaactaggtgttcctcatcagatcaactgttggatgctacttcctctcacacctgagtcctgagctgtggaccctggagctagggttcttcactgaggcccacagatgggctccacgtgggtctgtgaactgatgaaatggcaacagtggatgtcttagtccatttagtgttgctataaaggaatgcctgaagttgagtaatttataaagaaaagagggttatttggctcatggttctgcaggctgtacaagaagcctggtgccaacatctgcttctggggaggcctcaggctgcttctgctcttggcgggaggtgaaggagagtggtgtgtagagatcacacggtgagagaggaagcaagagagacagaggaggtgccaggttcttttaacaaccagctaatgggggaactctcaagggagctaatagagtgagaacttactcagagcatgaatctattcatgaggatctgccctcatgacccagacacttcctgtgaggcaccacttccaacatggggatcaaatttcaacataaggtttggggtacaaacatccaaactatgaagtggacttgaggctctttaggacagatggtacataacttttcatcaaagagttggctgaaggtacctacttttcatcaaagagttggttgatctccaaaaagatgaaaatgattgagaatccttgaatatgcagagacagatcattttaaacttttttcttttaacttttcattttgaaatgattttmgacttacagaaaagttgcaaaaacaatgcagaggattcacatatatttttcactcaccttcccctaatattaacaactcacagaattataataacaccagaaaattagcattggtaccatgcatcatggtaattattattattattattattattttttttttttgagacagtcttgctctgtctcccaggctggatggagtgcagtggcgtgatctccgctccctgctacctctgcctcccaggtcaagtgattctcctgcctcagcctctcgagtagctaggattacaggcacccgctgccatgcccagctaatttttgtatttttartagagacggggtttcactatgttggtcaggctggtcttgaactcctgacctcatgatccacccatctcggcttcccaaaggcatcatggtaataattaatagtaaacwgctgaccttgtttgtgtttcactagtttcccccctaacgatcattttctttccaaggatccaatccaggatcctacattgcacccacttgttgtgtctccataatctctttgaatctgtggcattttctcattttaaagaagaaaataaaatctgttggtagcaatgatggtaaactgcaagataactgtagggacacacaaatgatctgcycttcttgcttcttgccttcttattctttttctgtcccaagcaaaacttaaaattaagtttattttcatttgctatcaccaaagtatgtcataatttttattttaacatatgcaaaacatatagttgttggttttaaaggtttgaaaggcttcaactctatttcacaatagtcaaacacatttcttgaaatataaaatacatgactgtaataatcatacaactgatttgtgtagtaaggagtttaaccttgccctaaagagctctgactttgtcctcagcttctggcaggtgatctatctccaagcccttggagtatagtgcttaataggattgtcttcatttgccagtggcctgggctcacgmtgggtagtctagatgtgatttacggtggggctgccccactgggtagtctcaggatgggacctggacactccaggtggtaacgacatgctatgggtgggggatttgggggtcacatggaatcagtcaacttcgggagggcaggaggctggaggctgagatcggccaggggaacaatcagtcacatgcatgtgagggaactctagcagacacctcagacccaatgctcgagtggctttgcagggtggccctgctgcatgcctactgttacacagcgatgctgggaaagccacgccttcctcactccatggggaggggacagtgggaactgcatgyggtactttccctgcaccctgcccttggccaattttaatctagactttcactgtaataaaccctacctacaatgacagcagctctcagtcggttctgtgtcttcctagcaaatgattgaatctgagggtggttttgggaacctccccaccaaattgacagctagtgtcagaagtgagggcagtcttggctgggtgcagtggctcatgcctgtaatctcagtactctgacaggccagggcaggaagattgcttgagcttaggagtttgagaccagcctgggccacacagtgggacactgtctctaaaaaaacaaaaacaaacaaacaaaaacctgcatgtggtggtgcatgcctgtagtcccagctactctggaggctgaagtgagagaattgcctgaggctgcgaagtcaagactgcagtaagctgtgattgtgccactgcactccagcctgggtaggcagagctagaccctgtctcaaaaaaaaaaaaaaaaaaagtgaaggcagtcttgtggactgtttctctaactttgcagttggccttaacttttgcaatgactttaaaagttgaatctgatgctggagaggatgtggagaaataggaacacttttacactgttagtgggagtgtaaactagttcaaccattgtggaagacagtgtggcgattcctcaaggatctagaactagaaataccatttgacccagaaatcccattattgggtatatacccgaggattataaatcattctactataaagacacatgcatatgtatgtttattgcgacactattcacaatagcaaagacttggaaccaacccaaatgtccatcaatgatagactggattaagaaaatgtggcacatatacaccatggaatactatgcagccataaaaaggatgagtttatgtcctttgcagggacatggatgaagctggaaaccatcattctcaaaaaactatcacaaggacagaaaaccaaacactacatgttctcattcataggtgggaactcaacaatgagaacacttggacacagggcggggaacatcacacaccggggcctgtcgtggggtgggggactgggggagggatagcattaggagaactacctaatgtaaatgacgagttaatgggtgcagcaaaccaaaatggcacatgcatacctatgtaacaaacctgcacattgtgcacatgtaccctagaacttaaagtataataacaataaaaaaagttgaatctgaaaccatgtctttgcacttgaagataaaaataacccttctcccaagacaaacaagagattgtcactagtaaagtgtcattttcaatttagcaaatgcacttcaacatgtttaatttataagaacccaatagaactatggtcagtttaagacctgaagttatctcacttgcattgagggtttataacgagcactagatttcttcttttctttttttctaaatttatttatttcttttttttatatatttttattatactttaagttctagggtgtatgtgcacatgtggacacaggagggggaacataacgaggactagatttcttctaaacaatggagattaaacaatgtacatccactgtctgtaaagaccttgatcttgacccatcactcatgaatctgtcttaagtccagagcttttaaaatgtctccagtgttctgccaagacctaagttctttaggactacaaaacagcttgattgacttgttttcttttagaaaattccatatgaacactaaacacatttatgtaattccagagggggtggtggtgtattttggcaacaggggtatctttctgaaggcgcagctctatgataggtttgctctgaattgatgcatcttttcattatgggaaccagacgcatcaagtgcagagtattttccaggcacttgaacttgccttgtggttattaagtttctgaaagaaagtaccaatatttacttaagagaaaagacaaattatagggtgaaggctaaattgatgtttacattatcaaagactgctgttttcagagcaaaaatggatgttaaccatgaaaatgttttatgccgtggcattttttggaacatatttttttcatttaaaaagtttcaatatatggcaaatatgtaaatgtgcacatgggaacacgtcatttttctgtacttttgtcctctttatttctgaaatccttccaactacctaaaagttccaactattaaaaagtactgcagtctgttagcatttcaaatgtttgtaaactttgatttagaactgttccagtatttaattctgaacttgccagtttattaatgcttttaaaataaaatttattgcactaggagttgaaataagttgtttttaactcataaaaagagctgctgaaaagtattttcctacatttttccgaataacattttcagaaatgcctagagagatacaaatttaaaatacttaattggaaacattttacatttagaagtacttctaataaaattagagacaatatttttctgcaatttttctacagcagaaggagaagttgttacttcwgttttgggcccctggcattggtccatacctggaggtcctcctgggaaggtgttcccatggcctaggttctgtgatgttggtgaagggcaccataaggcagccgttcccagccacgttcagttggcagagcccctcatgctctgacacttcataaaacatggcacgcagcagctgctggtagcgcccctgacatctcttgagctcaccttgtgctttggtggccaatgtccctgtatgtygagggctccycacctcaagaacttgagctccctgcttgaggcctttcagtggccacaggaatttgcctgccctgtgggtgtgcccagcttcaggtgctggggatttaatgcttccaggaggcaccttccatcgataaggactaggagttcctggaggactatcccagctcacccccttttccgtgagtcagtcctgccgtgtttcatgttctcttacagtgcctcagtgggattgtacccartttgccacagtggtaccccactcattcttgcacctgtgtgtggcacagcttctggttctggctcattgctcagtggctgacagtgcttcccaaacgactagccccaagcctgtctcagagtctcctttttggggaggccagcagaagatgccatgtgcaccaggtgactcaacagcacccccaggctcatggggggtgtcgaaagcttgtggtggccccgaagctacttgaagtaatggggaattcaggaaaatcactaaactccaacaggaagggccaaggaaatggatacaaaacacataatgcacacacacacacgtaagtaatggaagagaagatagtatcattttaaaccagcgtttaagatcatgagctaaataataaagaatagaaacaggtgggaaagtggacggagggaaaccaaaaatcattaaagacttacacttccataaagggcaaaccaagttttgtgtgttcattaccagtatatttatttattattatttttagatggagtcttgctctgtcacccaggctggagtgcaatagcgcaatcttggctcactgtaacctctgcctcctgggttcaaatgtttctcctgcctcagcctcctaagtagctgggattacaggcacccaccaccacgcccagctaatttttgtatttttgttttttaaagtggagatgggatttcaccatgttggccaggctggtctccaactcctgacctcaggtgatctgcccaccttggcctcccaaagtgcttggattacaggcatgagcccctgagcccagcctagatatattttaaatgagactgatactgttttaggataataactctaggatcaaaactgggctgatttcttggctgaccttagtaaaagatggaagcaaacaagaatgtggctcccttatcccaagacagtaaatagataaggaagatgaaaagctgggcctgctctgcaggtgtccatggtaggcactgccaatggggcgggggctccctcacctcccacgatttccctacacgggtccttccagctttcctgttaatcatttagtagatctgccacctccttcttctctctccatcactccgcaccatctgtgtgaactttttctggatttctggatgggcttctaaatgttgacttgtctaaaatatacaagtattgtgtatattaggcacccaataaattccaaaccataacgaatacacaaaatcccctaaagaccggcttgcggccgggcgcggtggctcacgcctgtaatcccagcacttcgggaggctgatgtgggtggatcacttgaggtcaggagatctaractagcctggtcaacatggtgaaaccccgtctctactaaaaatacaaaacttagctgggcgtggtggtgcattcctgtaatcccagctactcaggaggctgaggcacgagaattgcttgaacctgggaggcggagctacagtgagccaagatcgtgccactgcacttcgcctgggcaacagagtgagaacctgtctcaaaaataccaaaccatagtgatggtttggtattatatttatatttgagcaccactrtgctcaaatataaatataatttaaaaaatgggcttggaaacagtccacgtctgtcgctcttggtcacagatgtgtgtatgtagccattgctgcatagaatstataatttcatcctttgtagtaggcattgttcttccctccatggtttggagaggttaccacacatatccaagatctcacaaccagtgagcagtcgatgtgggattctacccaggtctgactcaagtaccttgttccttccaactcaccaggctttcatgacgggatatgcattgggcagcagcagaataaccagaaagcctttgccaaataggatcacaggcactgacaccaatattaatattaaaagggcatggtttagtcaactgcaattggcaaaatatgtataaacagcatttaacaaaaattattatcaatattaaggataatgtctttgaaactttatgaattttgttactttttgacataaagacataagatgtagagttaggagcaatttgacaaaatatgttagacaatttgactcaccattattaaagtcaagctggcaaaggtaagtagaaattacaaaaatacaaaacagaattcatcgatagattctgactttggagcctttctttgagacagggtctcactctgttgcccaggctggggtgcagtggagatcatagctcactgcagcctcaacttcctgggctcaagccaccctcccacctcagcttcctgagtagctgggactataggcacataccaccacaccatctaatttgtaaatttttttgtagagacaggatctcactatgttgctcaggctgatctcaaactcctgggctcaagagatcctcccactgcagccttccaaagtgttgggattacaggcgtgagccatcaggtcctgcctggggactttctggtgtctaaaatgtttacaaaatatggtaaatcattatgacataaaaaggatcaaagcattagaaaatacaaagaaaatcagccaggcgcagtggctcatacctgtaatcccagaactttgggagggtgaggtgagcagatctcttgaggtcaggagttcaagaccagcctggccaacatggtggaaccccgtctctactaaaaatatgaaaattagcctggcatggtggtgctcaaatataattaattataactcaagtattttgggagaaatacttttatgaagtcaaatttatcattttttaatgatttaatgtttctgtgtcctaagaaccctttgcctactctaatttttttttttttaagaatctcctgtgttatcctctagatgctttatggttctagcttttatttttaggtctataacccattttaatttttgtgtatgtagtgacgtagaggtcaaagttcattttttccatgtgaataatcagtgcttgagcaccatttgttaaggaagacttttttgggaaagaaagcaaaggccctctctcccgagggcttctggactgaatgctaacagcagtctgggctagctaaaattataaaagacaacgcaaccaaatataggcaagaatatatagcactgaactctcaaatattgctgaaaggagtataaaatggctggagaactttagagaccttttgttaatttcttataagtttcaagatacatctaccctatggttcagaaatttcactcctaggtatttgccaacaggaataaaacacgtctacaaaaagacttgcacaagaatgtagccttattcgaataacccaaaagggaaaacaaccaaatgtccatcaatagtagaatggatatacaaactgtggcacattaatactatggaatagtagtcagcaaacaacaaaaggatgctcacctgactcgcacaatatacattgatctcaaaaaaacattatgtggattgaacgaaagcaagacacaaatacagacaatatgatcccatttatatgaagctcaggaagagaaaaattaatctatgatgacagaaatcagaacaccagagcatagtttctctgggatggaagaaggtgggaggactagttggaaagaacttgaaacacttggggtaatggacatgcaccatctcttgtttacagtgattgcacaggagtaatataattaccaaagcatattgaaatgaatgttttgcatttttttgtgtgtctaaattacatctccactaaaaattaccaccaaagaagytgtatcagtgaaagtagattagattatactgcagcaaaaacagtaaaatcctagtgacaagtcaaaaaggtgtatttcttctctattccattctcatgctatcctattgcagggaattctactcattgtagacattcagcaacccaagctgacaaagcagccagtatctttacagtgccagttactatggcagagagataagaaagctttggaacatcttatactggcaattaagtgcacagcccagtagtgacataaatcacatttgctcatatcttagtctttttagtgttgctatacaggaatacctgaggctaggtaatttataagaaaaagagtttaaaaaattatttatttatttatttgtttgtttgtttattgatttatttatgaatgacagggttctgctgtgtcacccagcctggaatacagtgaagcaattatagcttactataacctcaaacttctgggttcaagtgatcctcctgtctcagcctcccagagtgctgggattacaggtgtgagctattgcacccagctgaagaaaagaggtttatttggctcacagttctgcaggctgtaccagaagcatggcaccaacattaggtgagagcctcaggctgcttcccctcatggcagaaggtgaaggggatctctgtgtgtagagatcacatgttgagagaggaagcaagggggaaatgccaggctctttgcaggaacttactcagccccacccctggacactaatctatttatgaggggtccacccttatgacccaaacaccttctattaggctcttaccttcaacactggggatcaratttcatcatgaggttttcaggggtcaaatattcaaatcatagcagctcacaaattgttgtccagaactaattacacaatctaattcatccctaagtgtgccaagaagcaccatcctacaattggccagaaaaattgtggtatggactgaattgtgtcccctcaaaatccacatgttgaagctctaatccccaatgtgactgtattttgggatgaggactttgaacaggtaattaaggttaaatgaggccatgaggacagggacctaatgccacagygctgatgtcctgagaagaagaggaagagacagcagttttcttagtccatttgtgctactataaaaaataccacaaactgggtaatttataaataatagagcctatttctcactgttctggaggctgggaagtccaagagcaaggcccaggcaggtttagtgtgtggtgagggtccagtctttgcttccaagatggcaccgtctaggtgtcctcacgtgctggaagggatggaagggcaaaaaagggctgaactagtttctttgagcccttttacaaggtttctgatcccatttatgagggcagagacttcatggcctaatcatctcctagaagctccacctcttaatactgttgaaattcagtttcaacatgaaactgaatgtcggcagggacacaaacactcacaccatagcacaagggatgcatgttcatcaaaagaaggccatgtgaggatacagcaagaasgtgtttgtctacaagccaggaagggagccctcmccaggaaccaaactgcccagcactctgatctcaaacttccagcctccagagctgtgagaaataaatttctgttgtttaagacacgttcaaatagtttgtggtattctgttatggcaaaccgagcagactaatagaagttgagagtggaaatgactaagtaaacagaactaataagttggaaatacatagacgaatcattgtatgtttttaaagaacagacaatgcatatsccatatacattttgcaagacagccacatgcacacaaacataaaagccttcttcctttactgtagctagcagaaccatcatagtaaaatctgaaacatgctgatatacagtattacacttatgtagatagaaagaaacttgatgtaaataaaatgaatataccaaaatactcacattttatatttgttgggtacctactctgtaaaacgggttttatattttagacaaatcaacgtttaggagcccacccagcaatccagaaaaagttcacacagatggtgtggagtgatggaaagggaagaaggaggtggcagatctactaaatgattaagaggaaggttgcgaggacccatgttggggggagcatgggaggtgagggagcccctgccccattagtggtgcctaccatggacacctgcagagtaggccyagctttctgtcttctttctctatttgctgtctttggatgagtgagccacattccatttgcttccatctcttactaagggtcagccaggaaatcagmccagttttgatcctatggttgttatcctaaaacmgtatcagtctcatttaaaatatatctacaattggcaacaaacacacaaaacttggtctgccctttatggaagcgtaagtctttaatgattttcggtttccctctgtccaatttcccacctgtttctattctttattgtttagtttgtgatcttaaatgctggtttaaaatgatgctaacttactctcttttcctgatgggaktgtgtgtgtgtgtgtgtgtgtgtgtgtgtgtagacagagagagagagagagaaagagagaggggttgcatctagttcacttggttcatcagacttgttagtaatatatcctctcttattgcagtttagtgattttctttaattcttcatyccttccagtaagtggttttggactcatctagggctttttgtttgtttgttttaaacggcaatgttctcattcactactcaacaatttgcatgaaaccattgcataattttgacacacacacrtaatacacttgggataatattttcagaaatggcttatttgggtttgcctttgctcttgaagctggctattctgaatgtaacacttgttgatcctcccaaagatctgatgcttatgattgcagaggggcagcttgatgctaccttgcttcacgttcatttaatctgacttttccaccaatctaccctaaactcctttgaacagcaaagacagaatatgaattaatgctataattagcactatgtcaaattatgtctgaatatgagaagggataggagataaatatgaaaatgtaaaagataatttgagagcagtgagatgaagtgtgaatgtttgcacttaaaaatttttattctttgctgttaaaatagtgtttatgcaaaaataatttagaaraccataaaaatccctgaagaaagtctgagaaagaggtgcaaggagagagggagaatttccagcttcatcaaaactgtgtgcagatggagcctctgcaggtytgtcatcccagcagtgatgtggacaacacgaacacagcagaggcagccactggtctttaacggcaccaccagcccatcccgaagtccatcagaggcacctgtgaatccacaggttcagcggacacttatttcctgggtgcctatgccatggaggccctcttcctagtgctctgtggatgctggtgtgggcccctctctacagctctaggaagcaggggtcttagtctgttttctgttgcttataacagaatacctgaaactgggtaatttataaagaaaagaaatgtatttctcacagttttgggggctgggaagtccaaggttgagtgggtgcatctggtgagcattttttttgctggtggggactctgcagagcccagaggtggttcagggcatcatatggcagggggctgagcgtgccatctcaagtctcttttccctttttataagccaacagtcctactgcataacacattaatccatcaacyccttcatcaatccattaatccaggaatggactaacctattcaagagggcagaaccttcatcacccagtcacctcttaaaggccccacctctcaatactgccatattgaggattaggtttcaacatgagttttgaagggaggagtattcaaatcacagcagcagggaccattactaccctcctgagagaaggggacctcatgggggccatagtcaagggctcacctcctgctgccaagctgggaggctgcatcaccagcccaagtggcccgggccccggggttcacgcttctgattctggactccctgtcccctaaccatcccccatcccatccctccttcactccctgggctctactttcacgaatccgctgtcccctcctcaggccacagctctttcctcagcagacatcatcctgcctgttacagaggaagtgggcactgccgggcagagccccagctcttctgcaccacgttcaagaaggcaggcaccacacaggcaacctcacgcctccttcggaagcagatggagtttttttttttttttttgcacaaggttactctaacctgtttgtcttcttggggtaacttgttcattcatatatgaattgtcacccattctatcaaacaaataaaatcaccatgacaattgctatttttaggcacattttaaagctataaatgagatcatgttagttaataaaaattatctcctcagttaaatgggtattaattacaatttccaaaattacagcaaactctgaaccctccttttagactggctggtaccatctgttctagctaggtattatactttacttagccattcccctgctgttggacatttaggacgtttctaatytgaaatttaacattgggtggttttccaagtatttatgtatatatgtattggtgctgattatgacgacgtcaaatttctctccgtctctgcctgccggcttcagctgcggcccctcctctcggaaggttcctcaggrgttctcctgtccagttagaggttttggggtttcctccttacgctggtctcagcgacttcctgcggctcagaagcagcacaggctggacccaacccctgcctcggaaaaccactgtgctgatgcgccagcagagggccgagaggacagccgcgkcggaacccaggggcgacagttccctggggccaaggggagccatgtggagcccggcccaggcttggcgcccaggctcggccgggctgctgtgcgcgcggggagtccgggtgtccactggcccgagccagggtcccgcacttagcgatttccaagcgcgacttagacgtggcctagtgggtgtttttcgctgatggaaacgctggccgggactgcccccagcctccgcggagagtgggaagctcccagcaggggcgcggcgggtgcgctccggggccctccccactgcggggcttcatcatacgaaaaacctttggaagggcctggagagctttggcctttgtttcgtgggctgtttactgactttcgctcccagttaaatcttccaacccgaagacatccttctgaagtcagcagcacagattacacctaaggggaggcgactcggccttcttcccttcccttcccttcccctcctacggcaggtcccgctggcgggaggacgccccgcgagtggggtgggccgcgagcgggaggaacacgcacgtcccggggcggccggaggggccccgcttgcgcagggggttgtcagaagactcgcacgcggcaggaggcctggccgtgggtgcagagttcccagtaggacgcccacgaaaaaaacctaactcccattatgttctgtaattctagtctagcccctatttcatgcttgatagagagcagtcgaccccttcttggtgaattctgccaagttagtcacttctcagtcatgttaattaattcttttagagacaaggttctgctctgtcgaccaggctggagtgcagtggagcgatcacggctcactgcagcctccgcacctccgactccagcgatcagattcgcctgggttgtccagctttcaagtccaccggggtccccatggaacttctggctgccctccctcctcagcctttcagggaagatggggctgctgtgggtgccaaatgtgcccaaaccacctgcacccctgaggcgggtgacacagcctctccaagagccttggtattgtgccatccaggctgtccttcaacctcagccctagaccaaggcctcagacttcgggaaggaggccactgcacatccaccctcaagcccactgcactcagcccaaggagctgaggggagtgagcagggcctggggcctgggcctgtatcaggcttcctctcccaactcttcctgcccctacccggcctggagggcacagacacacatagacacacacagatatgcagagacacacacacacagacacgcagacacggacacgcatggatgcacacagagacacacagacacacacacagacccagacacacatacgtggatgtacacagagagacacagacacacatggacacacatacacaattctagatatagagaagccgtgcctgtagcttgcagtgccatgtgtctgcacgcactgcgggtgaggactacaccagctccggggtcgctctacttcattgcctttccaatctttggtctcacagctggatggcactctctagatgagaagctagggttgtatctttattttctggttccacagtgacctcccctttccccagagcatccccgagtcagggtttcaatgaggaggggatggtccttgggccagaaggagccatcagagggcaggggcaggccagtgtgggtggtcctggctgcacttgggtctgtgtggctctgggcatggtcggagcacatctccaaggccacatcttgagcagaggrggcttctcctgaggggaatgggcctttattgtcaccatcctgggaagtggagactcttagggaagggcatggactcgggagggcctgggatgtctgggcaaacccgtaaagacagccccttatgtgtaggtactgaacaaattgagagctttctcccaagagtgaagggtgggggccaaggcacggcttgaccctgactagtgctagtgggcaggtcacacctctgtcatgcacaggcctcctgggccaggcaggggatcagttcagggactctaggatagaggcaaagcctgctgctaagttctctgttacatttcccttggcttcttcctgtgtcttcaggaaatttccactaaaagataccatctgggctcagcagcgtggcaggctgctgggrggactggcagggttttgtgcatgtggcttggtgagcagcccagagggacagagcctgcttcctaggacagcaaggcttaccacagggcagagccctgtggacctgactccccggggctgtgagcaggaaaagtgtggagggagatgggagctgggagaagggaagggaggaagagagcccatgagtccttgagccccctggatagttctaaacagcgctggccagtgaccaggggtactctgccttccagatccgggtgagagtggaatcccaccttggcctgggcttggttggccatggtgttgtgccattgtcctctgtgcactaaggaggcagtcttaaagcatgtcaaccactgtcctgcatgaaagtgttagtgctgaagtttaatcatggtgtgtggctgaggagacggaaactagtttgtatttttattcttttgagacagagcaagactctgtctcccaggctggagtgcagtggtgccatcatagctagctcattgcagcctcgaactcctgggctccagagatccttctgcctcagcctcctgagtagctgggaccacaagcacgtgtcagtatgcctggctaatttttttaattttttgtggagacagagtctccctgtgttacccaggctgttcttgaactcctgggctcaagcgatccttccgcattggcctcccaaagtgcggacactacaggcgtgagccactgtgcccagccgtaaactagtttttaaagctgatcaagggcttggtcacttcatgttggacaaggggttgggtgagtcatgacactcagcctttcccatgcagtgtctctttcccaagggttctagaaggagstgaaggggccaccagacccccatgcactgccctcccccacaaagacctctactgcacccccagaggacccattgtacccacgcaggcgtcttcgtcctgagcctgagctgtcacaacactggaatctgctcgcttttccctgggacagctttgtgttactagagttgggtctgaggtttgcacatcatgtcgcccgccccaggtccccccaggccagacacagggcactttgagtcccgggccccccaagttccagctgatatgtactatgggcttcctgagacttccccggtcctgggcacacctgttttgctgtggaactcttgacttggcttctgcctttgcctagagtcctggaaatgtccagaagcctgggggcggggccaaacagatcaccctgtatctttcttccctgattccctagagcaaatggcaaacgttttggttttaaatcagagacagtggacctcatagtctttgaacatatcccttggtcttggtctctagctcttttcgtttttcattttgaaacctgggggtctgttgccaggcctggaatcctggagccccatcacaggcaatctcttgcgtgctgtggcttcttgactgcacccaattgtggtctaactcacccttttctttcacctcctgttctctctccagccttgcagcttcaggactgctgatcctgattatgctgtgcaaagggtgttcrttccacggtcacactgtctctatgaggcagcaacgtctaggagtgttatccccattgagggggcagataaaccaaggaaggaggagggcaggtgctggcccaagtcacacacagatgaaggcacacatggtcacgcatacctgggaaagcttagcagcactcctggctctcctcaggagttcatagaaccctgcgctgtgtggaccaccgagctcagaagggttgctgtgtgatgctcgaatcaggaggctctgatggactcttcccttctctgtctctccagcatctgactgaggcacgtttatgggactctggcgaggaagactccggtttgcagaacacctccaatgtaggcagagcaccaatctaagcctgcagagactagataataacagttggaagatgtctttcttccctccttccttccccttgcgcccgccccctccccaaactagaaagtgatgggatctttgtgtcatttgcatgatgacttctgggactcctgtgaattagttgcttcttccttctatatttccccaacccagggccactgcttaaattgaacaaatgatgcatcacaaaactacaacgggactcttcaaattcacggtcggcgcaatctgtatgtaattgtattgcaacaattgtccagcagatggcagtaaagtgtcatgaaacagagttgcctggtgacctgtgctgcacctttgtgagttagcggtgaccaggcttcacacactggacttactggagtcactactaagccaaggccacagcagaaagagcactgcgttttgcatgacctaggggctccaagtcggcctggctgcaccagagccctttcaaaacacgcggtttagttcagggctcacattggccattgcctggttttgtttggccagcaaggtaagaatggttttaacatttttgaatgactgaaaaaaaaaaagaaaataatattttgtggaaggtaaaactcacataaaattcaaatttcagggtttgtaaatgaagttttgttggacacatgagtgctcatttgttcagtgttgtctctgctgctttgagttgagaagccgctgcagacaccgtgtggccgcagagcctagaatatttactgtctggccctttacaggaaaatgtgcaaagccctggattgctcctttgggacttcatcagctgcaaaccctcacagtatttttgtgtgtttggaagtaagaagagagcaagcgagggccgagacctaatgggaagacccggcggctgggagaaggtggttatgagctctcttattccagggcacagcaccctgtctgggaagtgggggggcaggccttggcagaagtgatccccctcagtcctaggactagctgcagttcctgtggccctgtcttcaacgttacattcttgcttcagcatccctgctggtctgagggtcctagtccgtgcaccaactttgattcctggacctagcagaataatgcttccagattttcaaactccttgggtgacaatttgagcatctgctaatgtcagccctgtctgaaatcccagctgattttcaacactgtgtaagggaactccttcatgagtcttggatgggtaatggatgatagggtcaagttgacatttgacaagaacttgctaaactctgaaaacctgaacttacagtccctgctctagcaggcctgggttctcatggaaacatcctcaacagaccaactcaagaaagtaatttccacagcaaattgatttcccagaatatgttctgttaaaagaagtatggttatgatatctgatcaaatattcagcattatcaggaaattcagctgtctctaccttcaaaaaaggtccagaatccaaccacctacctcttcctctgctgtcacctggtccaagactctgccacctcattcctaagggttattgcaaaaatttctcaatggctctcaccgcttcagtccttggcctgttataggctattgtcaagagagcgagcacagtggccatcaaaccagcagggagctcctcaccctccatcgctcaaaatcccacaatgcccctcagctcactgatggccaaaaccctctgccttctggccctgtatgtctctgaccttttgtgtttgagccttttccagtctgtccccagtgctctccttgctattcctctgggacactgggcacacacctgctgagaacattcacactgctgggtacttctgtctggaacactcctccgcagacactcttctcttctcagcttttgcccagatgtccttttctccccaaggtctgtctcgaccctccttcatgtcgcactctgtctccccaccccctggtgctgtgctgttacttacgctgcagcacttatcccccagcatcctattggatttgcttatttattatctagtgctgactgcttttccttctagaatgcgagctccacaaggccaagcatgctttgtttattgatgtgccccaagtgcttggagcagtatctggcatgcagcaggtgcctagcacatatttgttgaatgaataaataacgaaatgaattcttgagaggcaagcctgcccaagtactgaagactgggttggaactgtaggtacttcctccattaacaaattatctcaaaaagtttgggtattgttttaacagggctcctggccaggatccgtgagtcggcttcttgaagtgaaagacagaactctctgctcttcaggttctatcagtgcaaagagggcccactaagacccactctgcagggctgttgaggaaagccccatctgacaggcacccgacaaagctcctcacactccgtaaatgccacccatcatgaatgtggctatgattaaattgtgatgaggactgtgacccacaagactggaaaaccagtttggcaccttgatgcagatgttttcaaggactgggttagagaatacataccatcattctacttttagctgttttgtttcattaaaacctttttggttttaatgaaacaaaccataacatgtatgacaaccataacatgtatgacaacatagcatgacaaccataacaagtacaatattttggccaatttcatttaatttggcacatagaatggaagaaatattaagatattattttctacatgactatgtagctgggatgattggaactgaatcatttattgcacatttgaatggttaattttattatgctcacattgtgtacatattctgtggcttatatataatcagtaaatattctatgacttattcctcttcagaaacatgtggaaagatgaacaaaaaacaaccacagcatgacagggttagggaattctagaaatggaaaagatgttaaaaatgggtttatagtaaaatccaacatctagaggaaggatttaaagtctaagcagaaaccctttctggcggtctgcagaagtctcccatcttgctaaagtgtcacatttggcacatattcctggaaaacgttttagtgtttttcaattaaattccttactgctgtccctcttgccaacctgctgttaacttgcctcccgttgctgcaccttcagtgattttccatttcctttaggacagactccagagaaactcataatctggcaccaacatattaagactgttacttctttccacgtgtcctttgtcccagtcttggcctcagtgtgagctcatatttctgtgatagggagccaccatgctttggggctctggagccaagggggcaggcgtgtcacggaggcgttgcctcatcattggggctctggggttcttctgttacctcttttcacacatcagtgtggtggaggttgtgatgagccgagagggaatgtcagtgttaccaagcaaccatgagcctatgagaacccagtcgggattatggccacttgcactgcgggtagcaggcatttagtacacagcaaggacctgtgcatggacaatcctgtgtagtgtacgaatcacctcgtgcgtgcttgtctatttcctcctgtagctaaaacactgctcacaagtccttccacagttacctattaaataatagtcaccatcttttaaggaactgataacttctgttattttaaactgttccagaacacagcaaaggatgaaacagtctttatcttgtttttttttttttttgtttttgagacagagtctctctcttgtcgcccaggctggagtgcattggctcactgcaacctctgcctcccaggttcaagcgattctcctgcctcagcctcctgagtagctgggacacatgagtaggcgtccaccaccatgcttggctaattttttgtatttttagtagagacaggatttcaccttgttggccaggctggtctcgaactcctgacctcaggtgatccacctgccttggcctcccaaagtgctgggattacaggtttgaggcaccttgtcttccattctttaaaggagaagaaaaaggtaacaaatcaaacaagcagtgctctcaaggatagtgcatcctgaccaagaaaggtttgtgagcaatgcaaggatagttcaacaaaaggaaatctgtgaacattactaccatgttactagagtggaaacagagtaaccttgtgatctgcagagatgtcagaaaacacatgtgagaagctgtaaaactcttccgcaagcaccactactgagtgcagtgcttgaaaaggtaaacacatatggctgtgacctttcatttttttccaagagagtaaatactttcagggttaaattaatattttctctaagctgtgattctctgagtgattctgcctgtcagttaaaaactatcatctcactctatctttggctccctgtttatgtcttatggctattaactttttttgaattttaaagataaaagtgcaggcagagcccatagatattttcactccaggcaagaagtggaattaaaggttcctgagattcagaggggcacatgctcctgtgctgatggccaagagcctccaggaagggctaggagagcagctcatttcaaatggaagagtgtgagcagggccacaaccatataaccggtcacgctttgacctttctcattatgtggattaactggaggattcgtacaaatggtgttttaatcataagttatcaatttaaaccagacaaaatgctcttgggaattcttcattctgtgaaggggtttttataaacttccatgatttttcacctaattctcccttgtttactttcattgggacattgtaatattttataatttagacttttcacctttggaaataaaccagacttggaaaaaaaattttgtcagaaatttggatgcatttagtaagctgtgtaatttatgtaatcaggactgctaatttgaggaagtaggatggttggagcccagcccgggccaggtcagcactgggcctcctgaccccatcttagtgagtctggtgagtctgtggcttctgggccgcatctccgtcttgagcccagtggaacctgggttttcatggtacccagcacagcaacgtgtggctgaaagggactacattagaagctagttgtagtcttcagacatttaatgagattagcagatggtttctcgcaggataactcactgaccaccctttgggcagaactggacccacttgaatgcggcgaatttgtctcaaagatgtgtgtagtggacacaattaaccatccagtgttcttattctgaaaaaccccctccgggagacagcccactccgtgatgcactattcagcacttattctcatccacattttctcttgaatttctcctgtgttctgtcttctcctatctgggatgaagccgacgacgcatcccggttcttgccatggagctggttggcttcactggattggcagactcttcctctagccatactctcttgggaggggtgcagagtgcttgttggaacggtgagacctcttgctaggcaagaataaggaagcatggagtgtgatttttacacagcactgaatttcagtcatgaggagatggagctgacactgtggcagaaagaaggaaatgaagaactccgtgctattggagagcccctgggctaaccaattctgaagctgtgttaactcttagacttagtggttatgtgttttaattttttttaagccaggctgcgttgggcctcctcttacatatactggaaaggtcctgagtaatacagaggtgagaatgattctccataattttgtgagtgtaagattttttcacttccctttctgtgatgcatcctcacttatggccttgaagttacaaatatccaaaactaaccatttcttcctttgaattgcttctttttaaatattgttttgaagccccaggagcaggtagtagtaataataatagcagtagcagtattacgactattggtagtattaataataacaactcatattgagtgtgtgtttcctatttgttgggcactctcctaagcattttatgtgtatattttgtaatctctacagtaacactttgaagccaagatcaccatttccctattttacagaagatgacaactaaggcagggagaggtgcctaatgccacactgttagtgaccagaaccggacgcaggcacagttggtcaggtctcagggacctgcatttcactgtctccagaagcgcatttcaactctctttaagcagggaa

SEQ ID NO: 6969 - DNA, 26920 bp, Homo sapiens
agtctatgctccacttaaaggcagctgggctgggcttgttttttcttgtaaacagtgtccacaaacagcacggatattcttactcactccttttgagcaaatatacatggaactcttactaagtgatgagcaattcagaagagaatcagcctcatagcccctgtctccatacagtgtgtaatctagctcaggaagaaagagcatttacagcaatgatatttccagatactacaataggttcgggcaggtgtgatagctcatgcttgtagtcccagctactcagaaggctgaggtgggaaggtggcttgagcctaggagttggaagctacagtgagctatgattgtgccactgcactccagcctgggtgacagagcaagaccctgtctcaaaaaaagtaatacaggtttgggtattgcaaggaggaaggtctggatgtaggtgagagaaagacaggtgattggaaaacttatcttgaacgggagagaaaacggtaaaaggggcatttaaaggaaaccataagaactcaatgcaagcctacaccacagctcaaacctccagcacaactccgggtggggtaaaaccagaggcaaactgggacaaacagcatgggcacaaatccattcagatgcacagcccagctcctcccaggcaaccccagtgcccacaggcacacacttcacgatacaacagctcagacataaaggctgggctctctgagaggcccaggttagagagggatctgaggaaggcttctgacatgcagaacgagctttggtctaactgcacagtctgtgcccatagccacaggggacctcagggcccgctaccacctttcatggcctcataggaccctccatgcagatgggctggtgcatgttagccatgggatagtcaggcgggtagaaccaagagctctggcttcagagaagggaatgcccactgacttacattagcggccctagaaactcattttccatcttaagattaactctgctgcctggaacttaccactggtccctgcccatggcagcatcaccagataagtgttctgaaaactgaatcggaatgcctgggttccaggaccggttttgtcaatgatgctgtgtggctttcagccctatgccttctacgggtggtgggaggctttttgtcactccagtgacactgcccaggctgggaacagcaggctgttcagggctcagcctggcttctactggggacaggacccttacacttcatatgagttgatgccttggacacttgggctacagtggagctcattctggttctcagatcatttgaggtgtcttttcttagtggttcttctccattctcctctcatcccccaatcaactcgacattcattgccaagattattaaaagggtagctccaataacattgttcccaggatcagaaaccatcagtggctcagaaaccatgcagaggtcattaatggataagctaaagaagttggagaaaagatgatttaaacgttgctaaagaaaagaagaaaatgagcagtagtggaagagcaagggtccacaagccacagtggcatgggaatgtcccatgaaaggagaggaggagagaatggaggtgctctgagggatcagacagagggtggggaaagtcaaggaaaaggctggggatggaaggaagcatgcttgtcatgggatgggcactcctggcttttggagcactcataaaaaggtattgaggctgaggctcctgggatctggccagcgaagatggagaggaggaagagaatgagaggcaagtggtcccatcatgggtggggttgtaggaaatgcctgggatatgattgaatattgtagagaggtcaggcaagagagtgcaagtggcctgggaaagaaggggctggggaaatatagaaaagaagagggaatagaaaaaataaaagagaagaaaaagcagtaagggaggagatttcctggacctttaaggagggctcttcaccaggagcctggaggaggacttaggaaggacttcttagaactgacatacttgtgcctcaccctcgggcccatgtgtatagatacctggtacctctcgaatagagtcacccccttgcctgctggaaaacaatgcagcacagtccaccccataggatccctggtcctcaagggccaagggagatgaagacctcacccagggccccagctccaactcctcccaacccagcctagctggcaaagcaatggaggctgggctgcccgtcccacgcacccggtaccatacctggccttgctgccatcacccatgatatggaggctgcagctgcattgagaggggcagaagccccgggcctgggggggccacgcaagggccaagagccagagcatgcctaatgccaccctcatggctcctggctcctctctggcccaggcaggggcctgtccctggaccgctccgtcccaccggcccagcaagcccagcaagctcagcagctgcccacttgctcgccagccccttacaccccctcctgaggccatcggataaacatggacagactggggattagggaggggagtcccagccgcagcactcagaggcttattgctttctgaatcactcagtcctgagggtaggggcgggggacccccttccatagcaatatccacaggcccagagaggccagggcagggcacagcaaagcaagacaagtaggcagctttccagaggcgagcagccatgggactgtcatctgcaaagcatcccatcccaacaaggccacggacaacacagaccccactggagtgccagggaagatggagaaagaacccccgcctcagtaagggcctttggaaattctttcctgtgacactgtctcatagcaaaaaagcagtgaaatgaagcaactcttcctgatggtgctaaaggcattggaaggaggctaagctctggacccaggcttcctggggtcaaatcccagctgctccattaaggggctgtgaccttgggtgagtcacattatctcttggcctctgtgtccttatctgacaaagagaaataaagttacttcatgcagggtgtttgtgaaaatcaaactcaaattccaaggccttgacagcctgtgggaacagaagctctctcacaagttgtaagtgcccagtttcactggtacttataagaccctacttacagaagaactggacagattcagatattttggggagacatcagaggtgtctctcatgagcccacaaactgtcccaggctgccaggcaaacagctgcctgccttgagtgccccatggatatggactcaacacactactatttcagctgagcccttctgggcattgctacgaatgccaaaggtggagatgtctccacataagggacaagggcacccctctcctcaaggtgccctactccaaggagggccccagagaggtagctcagagaggtcttagagaaggcactttcaggtttttttggagacaggaccccaacctctaataagggcctttggaaattctccatccataaagctttgttttgctttatagggacagggttgctctgtcactcagagtggagtgcaatggtgtaatcatagctcactgtagccccgaactcctgagctcaagccatcctcctgcctcagcctcgcaagtagctggaactgcaggcaaccaccaccatgtttggctatttttaaaaaattattttttgcagtcagggtcttgccatgttgcccaggatggtctcaaactcctggcctcaagcgatcctcctacctcagtctcccaaagtgctgggattacaggcctgagccactgcacccagactaatttcaatttttacttattctctcctaaccctatctcgccccaccatatctactcaagatgccagtggggactgaccagggatgattcccagcagtagacactcagtcgactcattcattcattcttcacatttgaccctgaggcattgttctctggtccagcatgccctacctatgttgtttggcttttctagaaggttccccagtccttcatgcctgtggctccaggcaggcctagaccagtgaggtatgacctgcaaagatatctggggccccagtgcacacataaaatgcctagctcggagccaggtctgtttcaacaatactggcttctcattctttccttccttccaatgcagccagtaggattttctcagtgcttcccagctatacttccacctccccaaacccagccgtcagcttgcctgttcccacatctctgcttcttcctccttgtgtcttttgcccaaatgaactttaccctttaatcttggccttgccctgctttatctcctctcatgaaggcttttgtgatctcgaaggcatgaaaaaaggactgacatatgtattaaccaacaccataaggtagaaattgagacagaaggccaggcagggtggctcatgactgttatcccagcattttgggagtccaaggccagcagatcacctgaggtcgggagttcaagaccagcctgaccaacatggagaaaccctgtctctaataaaaatacaaaattagccgagcatggtggcacatgcctgtaatcccagctactcgggaggctgaggcaggagaatagcttgaactggggaggtagaggttgcgtgagccgagattgcgccattgcactccagcctgggcgacagagcgagactccatctcaaaaacaaacaaaaaaacaaaaaagaaattgagaaagaacagggaacgctctggagggcgcagccataagctcagccctgcagagggattaggcttggatgtaagtgaggactcatgagaggaaaggcctgggaagtgggcattcctggaacagagtgggttgctctaccaggtgagtcagaagatgccattgaaaaatgcctgagcctgaggaataggagatcggcttttgttccagctccatccataaattactgcatggcctcaggcagattcttaactgtttttagccacagtttcctcatctaaaatggaaaggataatggtatctaactcatggagttgttgtaggactcatcagaagatcccctagcacagggcctgacctcactcaatattagctatgttgctgatagtgctctggagcttggtttctttatctgaaaatgaactaagttgtcctagatcagtatttcctggtgtaaattttatcatgagccagagcataacagtgcataaagagccagtgtatcaagaagtcatttgtagcagccaaagctcttagtggggccggcaaggctgggcgggttcggggtcggagactgacaagacggcaggcagcccctctgttctaagacagtgtcctaggacattttttatgctcaggtgctctatgggagacaggaaatgcagccctgaggtttatattcgtgatatctaaccaggacttatataaaggccacagacaaaagacattgacattgcagaaaagtaaacggaagagtccagtggtcccactccaaggcgcataactagttagtggcagattcagaaccagaaccccaaccccattttctggtcccagatggggttcttcctctgacagcaggcgacttcccaagcctcatcctttccccagcgctttggagtatactcatgtgagcctgaggacacacacacaggcaccaggcttgttgggaacagctgcggctcaaatccctcctcctgctcccctcccctggttatgcaactcttttccaattaggctctcagccacacaccatttggattccccgaccttaatcctgtgcaatggggctgaaatgaatgagacagggctccattctggcttcacaaaggctgcattgtccaactcgtgaatgggttccttctgcttgggccaagaggaccatttgcagcggggaggcatccagaaacagcccaaggtccaacataataacctgcatgtgcctccacgcacatgggatggccctttaaaagggagggcctggctgtgggaagccagagacagctgggccactggcagtgagggagagtgaggatggcagagaccagtgccytgcccacyggcttcggggagctcgaggtgctggctgtggggatggtgctactggtggaaggtgagccaggcagaacctggggtgcagcgggggcccagtgggttctgaggacccaggccaccagtgtggagctggcaaggagaggagaggtccccaaacccagctgggtgtccggtcccattggctgccttcccctctgtgcccggactcggggggtgttctgacaattgaacctgtgaggtgcagcacactgcccgctgggagcagagaggaagccaggcaagggtcagggagggagggactttgaaaggggacatctgcccaggagatgatcaagagccaggctttaggacttttcatgtccctccagccrggagaaaatttaatccactccttggaaatcctgctgagaatcccacataagatcagtccccmaaaaggctctggggacagacagctctgcctcctgctcttgtgtggctggaaccaagtcccttcagctctctgccctcaatgccttgacattccgaatgggtggttgtaaagattaaatgggataatgggtataaagtgctagcctaaatagactctagggtatttaagttcattcactcccatcctctccagccccaccactattttcactgtgtctactcctatgagcccaagcacttcacctctggaggcaacctgggtctgcgaggtacctacctcaacctagaatccctaagatgctcgctgaggccagagctagagacagtgtcaatcctgaatctgggccagcccaagctaaattgatggagaacgcagctttggttcaaagcagacccagagaaatcatcagcacgttttctcacctaatgagaactgacaatggagaggaagtgacagtcattagattggtcctgaaggctctggacacgactgtctggtggccccagcccgtgtctccctttcctgagaaccctacaatctagcatccttccaggtcctcaaacatgccataaaattttaccactttattttttggaaggggtttaaatttacatttttatttcatgtttaatgactagaaatgtcattatatacacaatgctttggtttttattttatttaaaatatgttttaaatttcaatagctttggggrtacaagtgatttttgtttacatagatgaattacatcgtggcaaatgctaggactttagtgcactcatcacccaagtagcgtacattgtgcctcatttgtaggtttttttaatcccactccctctcccacccttccccttctgagtctccagagtccattgtgtcctctgaatgcctttgcgtactcacggtttagctcccacttgtaactgagaacaaacagcatttggttttccattcctgagttacttcacttacaataatggcctccagctccatccaaattgctgtaataagacattatttcattcctttttacagctattattccatgatgtatatatactacattttctttatccattcattggtcagtgggcacttacattgatttcgtatctttgcaattgtgaattgtgcctcggtaagcatagatgtgcatgtgtgtttttggctggattaaatggcagatctacttttagttatttaaggaatctctatactgttttccatagaggttgtattaatttacatattcccaccagcagtgcataagcattccctttttaccacatccatggcattgatctattgttttttgactttttaatgatggtcattcttataggagtaaggtggtatctcattgtaccatagcatgtctttgcacatgctattccctcctggaatgctcttccatgcactgtcctgcaggtaagtgcttctcatagttttgaaggcaggattttttcctgttcctcactttagataggggaagctgaggttcagagagcttaaggagcagcaagcgaggcaaccaagccaaaattcaaggtcgggtctctctgttgccagagtacgcccccttcatgttcacttccatgcctggcgtcctgggcagctcccagctctaacatcgactcttctccttggagcctctctgactttgctctacagtccttggagaaggcattttgaaatccaaaaggcctgaattcaagttccagctccaccgcttactagctgtgtacttagggcaagttagctagtgtctctgagcctcagtttcccagctataaatggagaagagagtatccaagtaaagattgaatgagatgactcatataaagtgcttatcctggtgcctggtgtgtgctaagtgcctggcagctgtcagtgattatgactgttatagcatgaagcatgctaccctatattgattgtcttccttgtctgtccaggaggttgctgatgttccatccaccccacacacactgttctgaccccagctgggcctcagcagccccaatgccagcccccacccttcctttcagctctctccggtctcagcctcaataccctgaccatcttctctttctgcaagaccccggagctgcggactccctgccacctactggtgctgagcttggctcttgcggacagtgggatcmgcctgaatgccctcgttgcagccacatccagccttctccggtaccagccccctccccagtccacaggctctggggtcctgcctggggcctgacccctgggccctgggcagccaggccaagggcatttttactacttacagaaaattggccaagggcagagggtgggcaggctaaaatgggctgaattccagattgattctgaagaacgacagctgatttctggaagacaggggttgctgaaacctgatgaaagagatggtaggctgtagagatcaatggtgtgggttctgtaaccaagcaacctaggtttgcattctggcttcagcatttctagttctgggcttcttccataaatcggatattatttcctaactcatataggtggttggaagtatttacttctattatgtgtaaataacttaaaataatgcttgatacctaggactctacgtaagtgtttgtgaacacaaatgggggcgttatcaccactactgcacccgtatgtatctgggctcctggagtggagggacaccgatgcagtgtggagaggataagaggcagggaggggcagtcataactagctagtgtctaatacctccttatacaaaaaccagggtcttccatcacagcttcagaaggtgtttataaaattgttttctgaagcagactggacattctcattctggttttggacactacagacggaggctggagcccccccggatgtgcatgctcagtgctgaccagcctggggggtctgcatcagtgagaactcttcctcccacagagaattgaagtttccacctttgcttgcccttttaggctggggaggcctgggatctcccctctgactttgccttcatcttctgtgtgaccttggcttcagtatctttgcctctttgaatgtcagtttccccacctatcaaatacaggcatgagctctcctgtgacagagggatctgatcacgcagagagagcctatggcccaaccatggtgcagtcaaagtcacccagcctggagagtgtgcattgggctccaccccttcagcccagttacttgagctccaacgcctcataggaaagacaccaatattaaggccctcttcagagaagaagggcagcattcaggaacacacactccaagctgtacttggcaggtgtgggaggtggaaaggatcggaggagaggtcactggtgcccagtgtctcccacaggcgctggccctacggctcggacggctgccaggctcacggcttccagggctttgtgacagcgttggccagcatctgcagcagtgcagccatcgcatgggggcgttatcaccactactgcacccgtatgtatctgggctcctggagtggagggacaccgatgcagtgtggagaggataagaggcagggaggggcagtcataactagctactgctccgtgtttcccagtacagggaagtgtgggtaggtgtgagtgtgcatgcataggcactcatttcaggaaaggagggagggtgggagagtgtgcaggagagctgttgggcctctcttgccattaccgcaaccttgggcaagtcagggatcctctctgaaccttagtctcctcctctgcgaaatgattttctttttctttttgagacggaatcgctctattgcccaggctggagtgcagtggtgtgacctcggctcactgcaacctcggccttctggtttcaagygattcttttgcctcagcctcctgagtagctgggactacaggcatgtgccaccacacctggctaatttttgtatttttagtagagatggggtttcaccatattggctaggctggtcttgaactcctgacctcgtgatctacccacctcagcctcccaaagtgctgggattacaggcgtgagccaccgtacccggctgagatgattttaataaccaatctcagttttattttgaaaatgaaatgagatcagggatacagaaaatgcccttgcagacaggcactactctgcagacaggcgcagagaggctgtgtgtatgtgtgtgtagctgggcatgtgccctggcaccccacacttccatgaggcttcatgaaaactgtccagctctagatttcacaagctgcactgtcaaataccatcttcataattggccatatcagtgtacaaactgctccatttttccttaattttttttttcttaaaagtgactcattttttaaaatgtaaacacctgctacaagctcattctaaacaacatctgggaaatcacaggtttaatgttcttataattttaatacaattaaaataaaaacctgttcaccagagaccatctagaaccctgtttaccaccaggggtacataaacaygttttggggagctgtggctcagctaaccctcctagcaaaccttcagctcacagcctcggaagcagaggcacagagaagttaagcagcttgcctcgctactaagggcagagccagcactgggcatgacctggtacctccaagtcctgagctatgaatttgtccagcacagaggctgctgtgaggtctatagccagcacagcctcaaaccatggcatgtcctctttggaatccacagaacttcccttgccatagtcacatgtatagcccccttccctgaaaattcactgcccctcatgggtctctcctgtcatatgcctctctccaggccaaaatgctgccatcggtctcatcattttgagtggcgataggttagccctcttgtccacttggcctcagagcacttctcccactccttacatcccagcccctgcccctaatgctcccttggaccatcttatmcacacacacacacacacacacacacacacacacacacacacacacaccaccttctcagatagcaacaggcttctctgcctcaatatagaacagttaatccctgtgccagaggccttagatcaaagccctttctatactgagagcatggcagagcagtgtgaaggcaggcaaaggggaatgaggaggtctgaattcatctactccatccctgggtggttgtaggcatgtcaccttggccatctgtttctaaagctgaaagtctgaggcagcacaatggtccaggtagatattaattattgtgcccacagagaattgtttgaacctggaaggcagaggttgcagtgagctgagatggcaccactgcactccagcctgggcaacagaatgagactccgcctcaataaaaaaaaaaaaaaaaagaagaagaagaagaagaaaagaaaaggccaggcatggtggcttatgcctgtaatcccaacactttgggaggctgaggtgggcagataacttgaggtcaggagttcgagaccagcctggccaacatggtgaaaccccatctctactaaaaatacaagaattagctgggcatggtggcatgagcttgtaatcccagctacttgagaggctgaggaaggagaatcgcttgaacctgggaggtggaagttgcagtgagccgagatcacgccactgcactccagcctgggtgacacagcaagactctgtctcaaaaatttttttwaaaaaagacaggaagaactgacatcttaactatattgagtcttcctgtccttgcacgtaattatcgtgcccacagttgggatgggaggtgtcttagtctgcccaggctcctataatagaatgccatcgactcggtggcttgaacaatagaaatttatttctcagttattcaggctgggaagtccaaatgcgaggtgtcarcatggtcaggttcggtgagggcttgattcttggtttatagatgttcaccttcttgccatgtcctcacattaaaagagagagattgtcactcttgtgttccttctttcatttttttgaaacagagtctcactctattgcccaggctagaatgtagtggcaccatctcagtacactgcaacctccgccttctgggttcaagcaattctccacctcagtctcctgactagctgggactactggcgcatgcagcatgtccagctaattgtgtcccttcttataagggcactaatcacatcatgggggctccacccttatggcctagttatctcccaaaggccccacctccaaatgccatcacattggggattagggcttcaacatataaatttgaggggacacaaacattcagttcatatcagaaggtcacatccaagcaaactccatctggagccgtatcagtagaagcaaactgtcagatgagggaggttgtagacatgctcttctctcccgatcaaaacccatctggagaactgtcctctgccctggtatcttatatacaaaggagtatgacaaaaaaacagtagacagaggagggcacctgggaagtgcatcctgaagccagatccaggaggaaccactgaatgggaaggacccaatgacactgcagcagagaggggggcttcagggaagggactagaggaggtcaaatcagcatggctggttcacatcaaaagatgctgctgggacccagcctctgccattggcactgagattgagccccaacccccgagtcaagcattctcagagggtgtcctggaagcaggggcagtggcctgattctgagcaagtgctgaggatggtggtaagtccagacttctgcctccatcccctatgaccctcacctgaacccctgcctrtgcttcttcctgaactttgtctctgaaaacgtatctgtctctttgccactccctygtctctgtcctctgaagaagatggtatagtgtgtctatttggagaccttcaccatccattatctatttcattcttcataacaatcctctgaggcaaggattatcattcccattgtgggcgagaatactggggctcaaagaagctcttcacttgcctgaggctctgagttattaagcatcagagctggggttctcattttggtgagttgcttagttaacccctctctcagcctcaattttttagaccgtaacacagggataagaaaacctccttctggcaggatgtagtggctcaatcctgtaatcccagcactttgggagactgaggctggtggatcacttgaagggacactcttcgagatcaggaagtccattctttctcactctatcaggccatctcctcctcacaacctcctcttcttcctctgtcctgtgcaggtagccagctggcctggaactcagccgtctctctggtgctcttcgtgtggctgtcttctgccttctgggcagctctgccccttctgggttggggtmactaygactatgagccactggggacatgctgcaccctggactactccaagggggacaggtgaggtgggaggagcagcttcraggctcctatccatgggaatcttggctttgaactcctatgayaagggtgccccagctgaaaatccaaatggggaaatgtcaacgtttgccagacaatctcaacttcttaatcatgatacccacctgcaggtggacagtgggactggaaaaagcctgttctgaaaactggccaggtgatgrgaatgctgtgaaaattgggacccagagttgaacccaaaaagagacatcatacagggagccattggcttgtgtcagtgrtaacagtcaccaagccgcaccacctcttagccatcttcagcacagtcgaccatyatggctctgacctcatcaatttctagagggagccaygcccttggtacaatagattcaaagaacattaaggtccttgcattgggagggaatgccctgagcatacgctatgaggcaatccctggagaaataggacagaatgcatgagggtccccaccctcatggggctcgtgttctggtactgccccatcaggaggctctagggagacaagggcttagggggatcctttaggaactgccttgaggaatggtcacatgggctccagcccctcttgcttccaccagagccaagttgcattcatctgctttacccatggtgtttaatcatgaggcatctgcactggatgacaggctttccaggtgatgcattcttgagaacgctgggcctggtccaagtgtccctccatggcactccccagccagggtccagtccttccagctgcccctccctggtggacggctccaaggtgacatagtcttcccttcagaaaatgggaatctgtctccctgggactcccactattcccttcacctccccatgaccactacctgggaacccaagctcttctgtggtgccttcaaccatttcttcagtgacacagtatccagtcttcttgttatcccgtctccttttaaaacctttgggcctagaatgctccttgaatgttcctttctcttggcccactgacatccccaccattgggtgaacatgtttcccaaactaaaatttcccattcttcatgcttgggggacaaacaggaaagcagggctgagcacttgaacaagaaagaggcctcttcctccttgtagctccctggctcctaaagggagttcacctgggacccgggagcaaccacactgcgagcttgtctgaatggggcatttccccacaaccgatcatctagggcagagctggtgggtccttgagggcagctggccatccctgagagctaaccccaatcctccacccgctctccctgtagaaacttcaccagcttcctcttcaccatgtccttcttcaacttcgccatgcccctcttcatcacgatcacttcctacagtctcatggagcagaaactggggaagagtggccatctccaggtaaggacccccttcyggagtgttatctgatggtgcagcgcagctccaggctcttggtgtcccgaacaaagaattggatgtgacacacacaaacagcaaaacaaatattcattgcttttgcagcaaaagcttattcagcacagtattacactctcagagaggggagggtggaccaatctctgcgaagtgagatcagcaccagtttggtgtattttgggytcttttatatgtttatttttcttctcttcccaaggctgcctaatctctagccagcatctgccttttgattgataggtgggttgcttatgttactttggcccttgtgtgcttgcctgtcacctccatcccataatcttaagtacatgcatgatatgcagtccatatgcatcagctttaataagcttattatcatacggggtcattttaaggatactttttctctctaatgcacatgcgcatctctgaggagctgcccytgacaggtttggtccagmcctagctggccacaggagcttcttactcactttttaatcttatttgtgttttggttgctcaacttctgtttcttgtcttgcttcttgctcactgcctcttcaccttgcttctgcttctactcattccgccctttaacctccaattccctctgctattctcytgcctcaagagcagcagtaatttctcgtttcctctcagggacaccagggaatatgaacaatgtgacagacagcaaccaggggttttctgcgttttcagtgatcaagagaaaatccagcttgtgcacagcataggatgttagaactggaaaccaccctccctttgctcagatcgccaaggcctggggagcaaggatcaggactgctcagattcacccagaccccgtaactctggggaccagggctccctactggacacatccgtgctgttccacttaactcttgccaaggatgtgaggtttggcacaaagttacaggctttttaaatgctacttttaaaccrctttgagatgtttaatttaatcacagtcacagggtggtgcccaaaagataaaaatcaacctataagcacatttgtccaagaaatacaatacttcaaaataagccctcctggccattttttagtttctgaattactattcccttgccacggttttattttaacttggtcacctggatgacctctagcaaaggagtcgtaacaagcaacaaagattagaacaaattcagatcttaatattatttctttgcaaccactctatgaggaaagaggttttctttctttttttttttttttttttttttaggccgagtttcactcttgttgcccaggctggagcgcaatggtgtgatgtcggctcaccgcaacctccgcctctggggttcaagcgattctcctgcctcagcttcccgagtacctgggattataggcatgtgccaccacacccacctaattttgtatttttggtagagacggggtttctccatgttggccaggctggtttcgaactcctgatctcaggtgatccgcccgcctccgcctcctaaattgttgggatataggcgtgagctgccgtgtccagccttttttttttttctttgtttcttttttttttcctttctttttttttttttttttttttttttttttgagacaaggtcttactctgttgcccaggctggagtgcagtggcaatctcggctcactgcaacctccgcctctcgggttcaagcgattctcctgcctcagcgtccctagtagctgggattataggcacctgccaccacgcctggctaatttttgtatcttttgtatctgttggccaggctggtcttgaactcctgacctcaggtgatccacccacttcagcctcccaaagtgctgggattacaggtttgagctatcgcgccggccagaaggaggttttcttatccctgtgtcgcggactaaaaaattgaggctgagatgggggttaactaagcaactcaccaaaaaccacacacctggattcaaacctaggtctgggactccaccacccatgtggtcaatcacagtgcatgaaagaaactcttttttttaagtcacttcatctgccactttatttatttattgtaaattggaaaaggactgtgcaaatctattttagctggagccccgatgctcccccgaggtcagaaggagagaaagggctttcctgggaccagaatccagtcccctggctcccagctggctgctggcataggcgccgcttctaggctgtcctccgcgatgccggtcccaagccctgtctggaggygcaaagttcacatttactggaggctcaggcagccgggagacaaggctgccaccatgatctcctcatttttctgcgttgactttaaaccattgtctctggtgggcatcgccaaggtcacacgcaggggtccagggacctcatcccaagctgagcggcttcccgagaccgcstagcctccccaggggattccacgtcttagggcctcggctcccgggagggcccygaggtgctgagctccgttgttcgtgggkttttttttccccaaataagggacagttaagaggaaaaaaaaagtctcttggtcaacatattttaataatccaagatggaagaaaatatgccctcttccagcttaatcaccctctttgttaaagaaagtcaggtcagggagaaaacaggcaagaacttgagcgtcagaattgcacgtccgcgtgtttgtgcggggctggaacttggcagctcccgctgaaattaaagcgcgagtcttgcgccccctcatggccccaggcggcaccccagcatctcccgctctctggacaagcccctcccccgctgattgtatttcacattgggagcccagacagggtggtctcgccgggtggctgtagctgtggatgacgagttggttctaggactgaggcctgagggcagctcagcctggggccccttgagcacgcagtcacagagcccaggattcctcttaaagagcacagacgcaggccaggcacagtggctcatgcttgtaatcccagcacgttgggaggccgaggcaggagaatcccttgaacccaggagttcgagaccagcctaggaaacatagtgagaccccttctgtatttgacaaacaaagagtacagacccaggaggaagcgctyattatccacccagtctcggcctccagccacgttgggtattgtcaggccattttacagacacagcagctgaggtcaggcaagtttaaataaaaggcttaaggtcacacagtcttaaacaacagagaggcccatctggtcccaagttcccctgcagactcagccccctcctgaagcmtggtccatgctgccccgccctgctgagtgctgacctggttttcttggccacatagggctgtgggccacctggagcaagctgacatctcctgtgacaatttctccccaggtaaacaccactctgccagcaaggacgctgctgctcggctggggcccctatgccatcctgtatctatacrcagtcatcgcagacgtgacttycatctcccccaaactgcagatggtacagatacttctagtacctaaaactagacccctctccatctttgttctctgtctcatctcatctcactttctggatttatgacctctgtgtcagtctcttcctttctgtgtttcttcctttggatactcacaaggcatagagcattagtttgcccccctaatcccccacctcgtctctgagtcataccaggctgctgcttgacattgcccaaacctcatgtgagatgacagggacagccagccagatggtgtagataaagactctgtgaccaggggttgagattagtccccaggctgggagcaggtgggtctggacaagagtatggctccatggactccgtgagccatgcatctccaccaactagtcagggaagcctccaaggctgcagaactaaatgattggcagttgtaggtggagggtgaccggggtcaccaggtgagaccagagagaggatcagtggctttgaagcttcttttctggacttttctgccacaacaggtgcccgccctcattgccaaaatggtgcccacgatcaatgccatcaactatgccctgggcaatgagatggtctgcaggggaatctggcagtgcctctcaccgcagaagagggagaaggaccgaaccaagtgagcctgccaccctggagtgagccccaggccaggaggctgttccaggagtcctgcccagcagcctcrgtggccaagcccagacactcacccaccttccccagtggccccgtggatcctggtcctaggctggacacaggattcagaaagacaccaggctgcacagaaagagccagatggacctgagtgtcggtcacagccccctacactcaaggctgagaggcctcaggaaagtcattcctttttaaaaataataataaatgtaagggggtacagtgcagttttgttacatggatagattgcctagtggtgaagtctgggcttttagtgtaaccatcaccctaataatatacgttgtacccattaagttatttctcatccctcaccccctcccaccttgtcacccttctgagtctccartgtctattattccacactccatgtccacgtgtacacattatttagctcccacttacaagtgagaacatgtggtatttgactttctgtttttgagttatttcacttaaaataatgacctccagtttcatccatgttgctgcaaaagacatgatctcgttcttttttatggcagtgtagtattccattccatatacatatataaacgttatatatatgtaacgttttctttatccaatcatctgttgatggatagattccatatctttgctactgtaaacrgctgtgataagcatacaagtgcaggtttctttttgatatactgatttcttttcctttgggtagataccagtagtaggactgctggatcaaatggtagctctatttttaagacagtatggagaaatcaccatactgttttccataggggttgtactaatttacagtcccaccaacagtgtataggtgttcccttttctctgcatccttaccaatatctgtaattttttgactttttaataatagccattctcayttgtgtgagataaggtctcattgtggttttaatttccatttctctgatgacttttgatgttaagcattttttcatatgcttcttagccacgtgtatgtattctttttgaaaaaatgtttattcatgtcttttgcccactttttaatggcattatttggattttttttgttgagttatttgagtttcttatatattctggataatagtctggataatatattctggataatatataatagtcttatatattctggatatattctggatacatggtttgcaaatattttctccggttctgcacgttgttcattctgttgatggtttattttgctgtgcagaaacttttttagtttaattaagtcccatttgtctatttttggttttgttgcttgtgcttttgaggtttctgtcatgaattctttgcctagaccaatgcccagaagagtttttcctagattttcttccaagatttttatagtgtccattcttacacttaagtctttaatccatcttgagttgattttttttttttaagacggagtcctgctctgtcacccaggctgaagtacagtagcaccatcatagctcactgcaacctttgcctcccaggttcaagcagttctcatgcctcagcctcctaagtagctgggattacaggcatgcgctactatgtctggctaattttttggggtttagtagagacagggtttcaccatgttgaacaggctgtcctcaaattcctgacctcaggtgatccacccaccttggcccccaaagtgctgggattacaggcatgagccaccgtgtctatccttgagttgatttttatatatggtaagagatatgggtccagtttcattcttctgcatatggcaatttaattttcccagcaccatttattgaaaaggtgtcctaacatcactccttctaaatcctctaacccttaacataaggatgttaacatggacatcacagggttgttgtgaggcttgaagataacatgtactcactaagcacatagaaaatactcattaaaacagagctgttcgttaagtcttggccatgccttgcagggactcagtcttacatagaaaggggtaaaagccccagggtttgcttatgggacctcaagccaggctgccagcattcaaacaccatgtattaaatcgtgatctgctgcccgtcacttcctctgcctgtgcatcgtttcccaagttgggaggtgagatgatggaagtggcaacttgactacacagaaaggaccagaacattccctgtcatggtaagtgctcatggagtatcagccaccagtacatgccagtcaaagacagcctctggtaatacggggctaggcctgcacattactttaaaatgttttgaggtttgttgccaacatttaaaaatcaggacagtttatttaaatccagatgtcagaagatgaggctttacccggctgccttcctacattgttacagtttgtagagctcagggcagctcggccctttgcccaggacacatgctcttgtgtcaacctcagtgcctgtgtcccctgtggatcctgtgggcctctgggtttgtgacaagagccatcccgagtccccaagagaaagagacgaggccgaacacatcagcgtcctcatctgtgctcagaggagaggcagggaggaaggtggtttggttaggctgctttcagggatggcttaagctcaagccttgcatccccaaggcttcccgcaggagtgaaaggagggcttgggaatggccaccctggcctgggttggcaggagatgggaagggctgaagcagcacctggtgaggaatgaccagagtcccgcctgaagctactcacttcagaagccccatgtcggcccacaccccccaattcccactcatggagtgggcttggggagactcatcaccttcaggctcttctgcccatgttcccaagcacttttaggatcttgtcccctgtgacactgcgtgcagggcttcttctctgccctccttcccactcaccccacaacctcccctgcacccctgccttcttttaagcagctcagctgcctctgggggaagaggacaaagaaagtggctgaatcctgtctgaagtccacctccctgtgggcccttggcacagtccctgagctgggataggaatcagagtccgcccatccctggcacttggcctggcagaagttagaccacagccctcaaaggcctaaatccttctcaggctcgctttgctctgcgcaacccctaaggtgatggattcacagtcctcaagctctctgctgattttctacaatgaatatgtaccacttttgcaatcacaaaaacatgtaaagagtaatgttacttctacctccttcaagtgttttatccctggctgtagttgtatgttccctgcagagcctgtgggcctctgggtttgtgacactaatgcaggagtccccatccctgaatgtatatctgtatatctggtgagacccggggccctgaagggaaatggagatggtgggcaaggtgactgaggaagtctgatgatgaaggcgcagctgacccaggaccgtggaggcaggagaaagcaagctccgtcccacagagcggaggggaagaatagataagccccatcagtctgagtttgctgagcgtcattccccaccagccttcctctcctgcctccctcctaggctcctctggagcaactgctcaccctttcctgggcaccccttggtcttttttctccattcacttgtgaccccttaatgccaccccctgcagacacaatgaattttagggggacacaccaacaaggtccccccgcccatgttagtcatcactagcaccacagtgctctctccaagttccgtgcagccctggagaactggggccacattgtggaaaggggaacaagagcaaggtgagaagactgagtctggagaagtcaggaaggaagaaagaagggtgaaaatagcagagactgtgctagagcctcatctgcagagctcgagggctcagggcatcttcactggaggcccggggaaccagcctaacttctcctgccctggcctctagccacactctacactaaagaccacattgatatgcagacacacagactggacttggaagaggccaccaggaggtggacgtccagaaccagcaagcatcaagcaccagaaaatgtcacctccagcaatcacttcctcatttgtaagccagcatccatttgaccccctgaatccctgtctgtgtcacttagttctgacatattcacctatccatccaatacgtatctactgaacagctgctgtgtgtcagacacgtgctcgatgcgacgacgcagtaccaagatcctttccagatactgccagaaaatgtccactgcctctttgtctcttcgttacatttgtgagtaaaatacaggtgttaacaatagctaggaaatcaaagatagaaattacggtacagccatgtccaagtaagtgaaatcaggtataataataaggttatcaagatagcccagaaatttccttcagaatctctgcaagtccttatcacaaaactaaacagttatccctggctctagataaattaagcgtgcactctatgcttcattgtgtacttgatttaattgtatttcaagagaattatcccccactgaatttcaatgtgtagccaattttagccccattctggatttttaaaattttctgtttgacttggaaatcaccattttttttcttttgtttctctattttttaaaaaccacatagtcctatgtaagaaaaccaccatgatttctaagaacagttttccctaaattggcatccacagaggaaggccccataacatgcactcctgtagtgtgaccaggccttgccatcccctcgctgggtaaccttgggagtcaagaccccctctggcccatcccctctatcatctcagtcccccagggctctgacacaggcagaagattctcaaacactatcgaattttttttctccaaactagatgtttgtggtggactgaatgtttgtgtcccctgaaatacctatgttgaaacccagtacagttaaatgaggtcataagagcggagccctgatcccataggattgtgtccttatgagaagagacaccggagagcctgagctccctcttctcccaccccaagcatatgtccaggaaagaccatgtgagctcactgtgaaaagttggcccagcccaaggagagagcccttaccagacaccaacactgccggcaacttgatctccgacttccagcctccagaaatgtgcaaaataaatttctgttgcttaagccacccagtctatgtattttgttacagccgctttaacaaactaatacagtgttacatcaaagctcatcattgaaacagatgataatggaggggaccaacagcccaactggtgcccccagcccaggaacacccagtgccacttctgcagaacccggggattgtaaaaatcccatttaaaagttataaaatttggcttctaagatcccctcccactctaagatccattgattctagaatgtatttgagttctttcacaaagaaatgtaagtaccgtagaatattatcacccacctcatcctcttgctgggaaagatggctctgcctattgccaaatggacttgacatcacaaataaagtagaaagttgtaaccaaggtaaaggattggccccttccggagaccttcactggcacaattttcctggggagggaaagggctgtgcatttgattgtctagcaagaaagtagataccaactagatactgcctgaactatacagtatctatattccctgttaaagggaaaagggatcccgcaaattttctatatagataaataaattcattggcaaagaagttggcctaatttattcatatctttctttttgcctcataattaatagaatttctgctgttctccctgtcagagatactcctggtccaattctctcaaatacaagctcactctccttcccaccacaactgtctcccttcttgtgttccctgtgtatgtaaatatcactattatctgtcctgtcatctaaggtaaatgaagagagaagggaaaagcagagatccgacatgcataaatactcgcactgggcagaatgtgagggtggcgcagtgctcagcaggtaccacaaggtggcagtgccctctcaatgatcagtacatcctgagctgccagccctgatggtagtgcctctccgcagagcctgggggtctcctgctgaggccgcgtgggtgggttattgattcctgcaggatttccgacacgttttcctttgcctgctcgtgatacagacgaaacctgacacttaactgtttctacctcaaatgatgacatgattccacatctctctctttcttaaaggaaacacagtgtcatgcacgttggccagaggagtctttgatggccccatggagtcagtcccttttctctgtctatagaacagccattgaatgtctagccaaatggaggcctccaaagccctgcacaccacagcattttgataagaggtctgggcctgggttttgtctttgtctgactgataagtcagggcagtccctggatttctccaacctgggattgttcatctgaaaagtggtggtgattagccctcatgctgtgatcataggtggaagaacactgcaaactatggggtgtggggcaggagggttcggagaagcaccccactcctcaggcagaggcacaataaatgacatttggcaattgtgggcaatgtttctaaggtaacgagggctgggaaagcactgggtgaaggccagagatataatccttaagtcttccctctgttctcggttgaggtaacttgctgctcctctcttaagctgctccttggccccaacatcacacacctgctcttccctccatccacctggcagctctcacaatggcctccattgtcccctgcacagcatcctcagctcagctgccctgccctctgcagctgtccaacacatgcaccgccttcgccttctagatcacagccagcttggcagattggaaagggctcagctttgggtgttggaaatccctgggcatgaatccaggatttaccatttattcaatgtgacaaagattctctgcttgaccaaactcgagtcaggctcttgaaccttcttctaggcccatctctgaacttccttgtaacacccagttgtagcaaagaaccctattaagttagtttagcaagaaccatcagccctggatatctgatcaggttcctcagcctgcaccatcccccaggtgatttctgatcaccctggcctgtcttcagcaagaatcttgttcgataggtttagccagaa
